United States Patent Application Publication US 2013/0332133 A1 - sequence listing, part 20

SEQ ID NO: 195098 - protein, 244 aa, Unknown
  Bacterial polypetide isolated from the Sargasso Sea
MKIEIAKTEIIHFVGIGGIGMSGLSLIMKGKGFKVQGSDLSLNKNIERLKKEKIKIFIGQKKQNLKDATIVVVSSAIKKNNPEIIEAKRKNLPIIKRGKMLAHIVSLMKNIVVVGSHGKTTTTSLITSIFQTTKIDPTIINGGVINSINNTAKLGKSDWSILEADESDGSFIHIPPTYSIITNIDREHMDFYKSMEDLKKYFIEFIEKVPSFGKSFICLDDKINNELVKRLKGKNFYTYGVNSK

SEQ ID NO: 195099 - protein, 300 aa, Unknown
  Bacterial polypetide isolated from the Sargasso Sea
EADESDGSFLNFPVNFSVVTNIDKEHIDFYKNFENLKNSFLYFLNKTPAIGKAFICVDDQEIKKIIPKIKNKNFLTYGFSKDANFQILNPVYKKHFSSFDLKISTPNLKKTVIKNIKLNLMGAYNILNSVSAIALCLYIGISSKIIRNSLYKFSGIQRRLNKVLVKGKIEFFDDYAHHPTEIKSVLKSVRNTNLKRKIISVFQPHRYSRLKLLKNEFASSFHDSNVVILCPVFSAGEKIDNKYDTFNFAKLIAKNSNVQVITVQNEKDLKRFFQKNLFNDELVLCMGAGSISKWIREMEL

SEQ ID NO: 195100 - protein, 160 aa, Unknown
  Bacterial polypetide isolated from the Sargasso Sea
RRFQVYGELPVEGGSVMLVDDYGHHPTEVAAVIKAVRGGWPSRRLVIVYQPHRYSRTRDLYDDFVQVLGDANVLLLMEVYPAGEEPIPGADSRQLCHSIRQRGKLDPIYIERGAELAPLVKPLLRAGDILICQGAGDVGGLAPQLMKSPLFAGAKQEKSK

SEQ ID NO: 195101 - protein, 263 aa, Unknown
  Bacterial polypetide isolated from the Sargasso Sea
FPQYANATPFYGAVFACVDEPMVKRILPDISRPVITYGFSGDAEFQADCREYREIRSTFVAKHGKKELGKVELNVPGAHNIKNSLAAISLGIEMDIDFETIQRGLREFSGVKRRFEIKGIYDDILVVDDYAHHPTEVSATLRAIKNGWERRLVTVFQPHLYSRTRDFYEDFARSFLISDVLIVTDIFPAREEKIKGISGELITNVAKSMGHQNVHWVKDKLMLVNAMSALIEPGDIVITMGAGDIWRICDEYVSKIKKEAQKV

SEQ ID NO: 195102 - protein, 268 aa, Unknown
  Bacterial polypetide isolated from the Sargasso Sea
SAGRSVDYDASRTLNVPVGRRDVTFGMYETSALAATQLEINEFETLFTVKYDGDTLGTVLIRIPGKHNVLNALGAIGAALSIDVNWDSIQTGLNDFRGVRRRFEIVGEVNDVTVVNDYAHHPTEIDKTIQAARDVRDGRVVAIFQPHLYSRTRDFAPEFSKALTNADVCWLTDIYPARELPIEGISGRTIAEGIDDCHYEADLDRLADAVVGTIEEGDTVLVMGAGSIDRVASEVLERLPRGRCTDGQAASPIRAEGPARRERSSSKH

SEQ ID NO: 195103 - protein, 287 aa, Unknown
  Bacterial polypetide isolated from the Sargasso Sea
ATIAVVTNIDPEHLDYYGTFDKLRDAFLAFAENIPFYGFAALCSDHIEVQSMISRLSDRRVITYGFNPQADFRAVNLRTEPDGGTFDCIISERKAGIKLEVNDLFLPMFGKHNIQNCLAAILIAMEMGVNADIIRSALRSFKGVKRRFTKIGEINGVTIIDDYGHHPIEIAAVLGAARQATEGRVIAVVQPHRYSRLRDLFEEFCTCFNEAEIVLVSDVYAAGEKPVEGFSKETLVEGLKYHGHRQVEAINGPDEIAKRIFLISRPGDLVIFLGAGDITQWANALPK

SEQ ID NO: 195104 - protein, 281 aa, Unknown
  Bacterial polypetide isolated from the Sargasso Sea
IITNIEPDHLVNYENSFENLKIAFLNFVKKLPFNGMAIVCGDDPIVRELIPKFSRPYITYGFDEGNDYVLSNYSSSNFQSSFNLRSESDSLDLSFNMLGRHNALNASAAVVLCIQEGISTKVINNSLKHFMGINRRMQVLGELSINGSSCILVDDYGHHPSEIESTIDSIRESFPNKELNMVFQPHRYTRTKDLFDEFVNVLTKVDKLILLDIYSAGEIPIKGIGSKELMKKISDQGFDKVKLLNSRNEIIRSLEDQVDDDSVLIMQGAGNISDVSSEIKK

SEQ ID NO: 195105 - protein, 248 aa, Unknown
  Bacterial polypetide isolated from the Sargasso Sea
MSLKIKTKLPLDLGKMHFIGIGGIGMSGIAEIIYNLGYKVSGSDLKYSPIVNRLIKLGIDVRIGHDPNNINTAEIIVISSAVGSDNIELKEARRKKIPVIRRSEILAELMRLKSNIAVAGTHGKTTTTSMVAAVLESGMFDPTVVNGGIIQDYGSNARLGEGDWMIVEADESDGTLIEIPSTISIVTNLDPEHLDHYGTFTALKNTFLEFLNSIPFYGVAICFIDHPEVKKLISKVKDRNVLTYGYSS

SEQ ID NO: 195106 - protein, 265 aa, Unknown
  Bacterial polypetide isolated from the Sargasso Sea
SLKKNIVISGSHGKTTTTSLIAQILLKSKLDPTIINGGVIKYLNSNAKFGKGELTVLEADESDGSFLKLPINYSVVTNIDKEHLDFYKNLSNLKKAFLSFINKTPPTGKSFVCFDDKNIREILKKVNKKNYFTYGFNKYSDCKIYNVKYLIDKCIFDLKIKYSSKKFKILKRISLNLIGNHNILNATAAISVCLNLGIKSKVIKNALKNFKGVERRMTKIFKKGNNVFYDDYAHHPTEIKAILEGVKNASSKKIVAVFQPHRYSR

SEQ ID NO: 195107 - protein, 279 aa, Unknown
  Bacterial polypetide isolated from the Sargasso Sea
TNIDLEHLDFYKTKNKIITAFKKFILNLPFYGCSVVCIDNTNLRNLIKKIKTRKIITYSKNENSDIIIKSIKKNINNTEFSLYFKKGIIKNIKGKKRFTTTLLGDHNILNATAAIIVSLITGISLTKINSSLNSFQGVKRRFSFLGKVNKAKIYDDYAHHPTEIKASYEIAKQISRKKIIVLFQPHRFSRTKILYADFIKILKKIQILYVLDIYPAGEKPIKSINSKGLVNRLKKTNKKVYYLNNKTNLRLVLKPYFEQENTIVFMGAGSITYMAQELF

SEQ ID NO: 195108 - protein, 276 aa, Unknown
  Bacterial polypetide isolated from the Sargasso Sea
GGKVIGRTQRRRSGCGPSRAAERHASKWRCRTSQRPGKGDRGMKSLPLSIGTIHFVGIGGIGMSGIAEILRNLNYAVQGSDIADGANVKRLRGLGIDISIGHRGENLGNAEVVVISSAVKPDNPEVVEARLRLIPVVPRAEMLAEIMRLKWGIAVAGTHGKTTTTSIVASVLDAGQFDPTVINGGIINAYGTNARLGSGEWIVVEADESDGTFVKLPATIAVVTNIDPEHLDHYGDFDTLKAAFVKFVQNIPFYGFATMCIDDAEVQALIPQVSDR

SEQ ID NO: 195109 - protein, 295 aa, Unknown
  Bacterial polypetide isolated from the Sargasso Sea
TSIIASIFNAANLSPTYVVGGQVLSVGRSSNLGDGDYIIVEADESDGSFLHLQPDIAVFTNIDNDHLDFYESNQEKLNQSFVSFAENLPFYGYILLNLDDLNIRKISKDVHRRQITYGFSAKNRFQITDVKLKNGIQKFQITDHSNKKRYKFSTNLSGKHNLYNVTAAICVAIEENISITNISKGLNNFQGVSRRFEISNLYIYDQPRILIDDYGHHPVEISATIQAIRQKFPRKKICMIFEPHRYTRTQQLFNDFVQVLSQVDCLLLLDIYPASEKPIKGISSKKLISEITKKH

SEQ ID NO: 195110 - protein, 303 aa, Unknown
  Bacterial polypetide isolated from the Sargasso Sea
LEADESDGSFLKLPINYSVITNLDKEHIDFYKNYQNLKNAFIKFIKKTPALGKAIICSDNSDLKNILKEINRKNYLTYGFEKKSDYQVLNPIYNLTNSKFDLKIYSQESKKIVVRDIVLNLIGKHNILNATGAIAVCLNLGISINVIKKALRNFSGVQRRLTKVFIKNKNEFYDDYAHHPTEICSVLEGLRRVHKGRKIISIFQPHRYSRVSSLKKEFASSFSISDLVLLCPIYPAGEKRDKNYKQDRFAKLIAKSSKVQVINVENEKDLQKYLQKNLINDEIVIGLGAGSISKWMYNLKGAV

SEQ ID NO: 195111 - protein, 183 aa, Unknown
  Bacterial polypetide isolated from the Sargasso Sea
HLDFYENNIEKLNETFHQFLENLPFYGTAIICTDEEKGEKLFNDLSRPKISYGFNKSADYYLKDLKQTSSFQEFTLVRNSVGKEVRLQLKIAGRHNALNATAAYIVAKEAGIATKIIKNSLKSFGGVSRRLEFKGDLKINNKKIKLLDDYGHHPTEISATVEAIKSSYKNKKINMIFQPHRYS

SEQ ID NO: 195112 - protein, 131 aa, Unknown
  Bacterial polypetide isolated from the Sargasso Sea
MSIYQDGIIHFVGIGGIGMSGIAEVLHNLGYTVQGSDVTDSSNVRRLSKMGIRIMIGHVQENVEDAAVVVVSSAIKPDNSELEEARNRRIPVVRRAEMLGELMRFKSSIAVGGTHGKTTTTSLVASLLESA

SEQ ID NO: 195113 - protein, 265 aa, Unknown
  Bacterial polypetide isolated from the Sargasso Sea
CGSQRQRLEGLGIPVAIGHATENVATADVVVISSAVTSDNPEVIAARSNLVPVVRRAEMLAELMRLKWAVAVGGTHGKTTTTSLISTILDNAGHDPTVINGGIINAYGTNARLGSSDWMVVEADESDGSFVKLPATIAVVTNIDPEHLDFYGDFDALKQAFQAFIENIPFYGFAALCIDHPEVQAMIGQITDRRIVSYGMSPQAEIRGENLRQGSGGTVFDVYLSRRSGSDACIEGIRLPMFGEHNVLNALASIAVTTEMGIPNE

SEQ ID NO: 195114 - protein, 124 aa, Unknown
  Bacterial polypetide isolated from the Sargasso Sea
MKRIETIHFVGIGGAGMCGIAEVLLNQGYKITGSDISVSANTKRLSELGVEIFLSHSKENVRYADAVVFSSAVDSKNPELIAAVEREKPILARAEMLAELMRYRHSIAIAGTHGKTTTTSIVAS

SEQ ID NO: 195115 - protein, 207 aa, Unknown
  Bacterial polypetide isolated from the Sargasso Sea
TLGVKIFLGHKNENVEHADAVIFSSAVDSENPEIVSAAEKGKPILARAEMLAELMRFRHSIAIAGTHGKTTTTSMVASILAEGGCDPTFVIGGVLKSVGTSAKLGGSKYFVAEADESDASFLHLQPMIAVVTNIESDHMETYQGDFENLKKHFVEFLHNLPFYGLAVLCIDEKVIKEVLPKISRPKITYGFSKQADFRIINYRQTET

SEQ ID NO: 195116 - protein, 80 aa, Unknown
  Bacterial polypetide isolated from the Sargasso Sea
MNSLTKLPINIGAIHFVGIGGIGMSGIAEVLLNLNYTVQGSDIKKSPITERLEKLGINIFYEHDASNLKKATVVVIFTAV

SEQ ID NO: 195117 - protein, 285 aa, Unknown
  Bacterial polypetide isolated from the Sargasso Sea
HQISIITNLDIEHMDFYKSKKNLINAFEKFINLLPFYGTTIMCYDDNNLKLLINKIKTRNILTYSIKNKKADVLIFDIIQNKLKTSFKLKINNKIIHSSNYKFTINAVGNHNILNATASIVAAKLNGIKNKDINNALTNYVGVKRRFSFIGKKNKSFVYDDYAHHPTEIAATLSAAKSLKNKVIVVFQPHRYTRTKLLMREFINVLSKVDYLFLLETYPAGEKIINGATSKDIFSKLLKKNKNTTYLKNIGDLNKLMQPHTMNQNTIVFMGAGSISSIAKKYLNN

SEQ ID NO: 195118 - protein, 286 aa, Unknown
  Bacterial polypetide isolated from the Sargasso Sea
GSRERIHFVGIGGIGMSGLAQVMKDMGFSVQGSDVVNSKNVERCKKNGIKVFIRHNKRNIKNSTIIVRSSAVKNNNPEIQAAKNRKLKILKRAEMLAHVVSLKKNIVITGSHGKTTTTSLISRILYEAKLDPTIINGGVINSIKSPARLGRGDWAVLEADESDGSFLNLPINYSVVTNIDREHVDFYKNFKNLKKSFLKFLNKTPTIGKAFVCVDDKEIKKIIPTIKNKNFLTYGFSKKANFKIFNTVYKKDYSMFDLKVSIKGLKKTIIKKIKLNLIGPPYVFNF

SEQ ID NO: 195119 - protein, 98 aa, Unknown
  Bacterial polypetide isolated from the Sargasso Sea
MSNLPLSIGLIHFIGIGGIGMSGIAEVLNELGYKVSGSDIAENSNTKRLKDLGIEVIIGHKKTNISNAQIIVVSTAISKDNSELIEAKSKKIPIVTEQ

SEQ ID NO: 195120 - protein, 328 aa, Unknown
  Bacterial polypetide isolated from the Sargasso Sea
TNIEGAEVIVVSCAIDRTNPEISSAIEARIPVIPRAQMLAELMRFKFGIAVSGTHGKTTTTSLAASVLAEGGLDPTYIIGGKLNQVGTNASLGQSEYMVAEADESDASFLVLKPMVAVVTNIDIDHMSTYGGDFERLKQTFVQFLQNLPFYGLVIANTDDPVLTGLLSNVGRTFLTYGIESDSDFRAMDITSYGLQTHFNVRRPNAGSLEITLPMPGRHNVLNALAVIALADHLGVNDDSLVAALSNFQGVDRRFQLAGFVHKKGRKIPVIDDYGHHPKELQVTFDAVRAAYPYHRLVSVFQPHRFTRTQELFDEFVTVLNRADELVL

SEQ ID NO: 195121 - protein, 287 aa, Unknown
  Bacterial polypetide isolated from the Sargasso Sea
TFVIGGLLNSAGTNARLGTSRYLIAEADESDASFLHLQPMVSVVTNIEADHMDTYGGDFEKLKSTFVDFLHNLPFYGVAVVCIDDAVVREIMPRIGRHMITYGFSDDADVQALNFHQQGHQCRFTVRRKGKEDLDLLLNLPGQHNVLNALAAIAVATEDEIDDSAIIQALAEFQGIGRRFQHLGKFATPKGEVMLVDDYGHHPSEVAATIKAARARWPDKRLVMAYQPHRYTRTRDLYEDFIEVLSQVDCLLLLEVYSAGEAPIPGADGRALCRSIRLRGQLDPIFI

SEQ ID NO: 195122 - protein, 229 aa, Unknown
  Bacterial polypetide isolated from the Sargasso Sea
VVISSAIGPKNSELLAAREKKIPIVRRAEMLAELMRLKWSVAVGGTHGKTTTTSLIAAILDTAKADPTVINGGIINAYGTNARLGKGEWIVVEADESDGTFIKLPATIAVVNNIDPEHMDFYRTFEEVKEAFRAFVSNIPFYGLAVLCVDHPEVQALIPQIFDRRIVTFGFDSQADIRAVNFTTKGGKSEFDIVFSGRSSLAGKTLKNVRLPMVGQHNVQNSLAAAAVA

SEQ ID NO: 195123 - protein, 284 aa, Unknown
  Bacterial polypetide isolated from the Sargasso Sea
QISIITNLDIEHMDFYKSKKNLINAFEKFINILPFYGTTIMCYDDKNLKLLINKIKTRNILTYSIKNKKADVLIFDIIQDKLKTSFKLKIKNKIIHSSDYKFTINSIGKHNILNAAASIVAAKLNGIKNKDINNALTNYVGVKRRFSFIGKKNKSFVYDDYAHHPTEIAATLSAAKSLKNKVIVVFQPHRYTRTKTLIKEFTKVLSKVDYLFLLETYSAGEKIIKGATSKDLFSKILKKNKNTIYLKNISDLNKLMNPHTINQNTIVFMGAGSISNIAKKYLNN

SEQ ID NO: 195124 - protein, 303 aa, Unknown
  Bacterial polypetide isolated from the Sargasso Sea
NIKDINAVVYSSAINQNNPEIAEAKKNKIPIVSRADMLGELMKNKKCIAVAGSHGKTTTTSLVGNILESGKLDPTIVNGGIINSISKNNKFGKGEWMVVEADESDGSFLKLPHQISIITNLDIEHLDYYKSSRNLNTAFEQFIKNLPFYGTSIINEDDKNLKKLILKNDTRKIICYSNKNKNANVYIEEVIFLKHYSEFKLKFNNPINKLSGSHSYKIKTIGLHNIYNATASIIAGLLAGVKNNYIKLALINYIGVKRRFTHIGKINLSNIYDDYAHHPTEILATLKGAKQVNKNIIVVFQPP

SEQ ID NO: 195125 - protein, 254 aa, Unknown
  Bacterial polypetide isolated from the Sargasso Sea
NEAGLDPTIVNGGIINSFSNNNRYGKGEWMIVEADESDGTFLKLPHQISIITNLDIEHMDFYKSKKNLINAFEKFINLLPFYGTTIMCYDDKNLKLLSNKIKTRNILTYSIKNKKADVLIFDIIQNKLKTSFKLKINNKIIHSSNYKFNINAIGNHNILNATASIIAAKLNGIKNKDINNALTNYVGVKRRFSFIGKKNKSFVYDDYAHHPTEIAATLSAAKSLKNKVIVVFQPHRYTRTKILIREFIKVLSKA

SEQ ID NO: 195126 - protein, 195 aa, Unknown
  Bacterial polypetide isolated from the Sargasso Sea
MIATRLPLNLGPIHFIGIGGIGMSGIAEVLVNLGYFVQGSDIKKTNITVRLASLGVKTFYEHDKENVSNCSVVVISSAIGQDNIELASAKQLGIPIVSRAEMLAELMRMKLNIVVAGSHGKTTTTSLVASIAEVGNLDPTVINGGVIKAYGSNARLGEGEWMVVEADESDGSFNKLPATVAIVTNIDREHIDYYS

SEQ ID NO: 195127 - protein, 293 aa, Unknown
  Bacterial polypetide isolated from the Sargasso Sea
QVAAWSWPMREFVRHVHFVGIGGAGMSGIAAVLIDQGYEVSGSDQADSAETRHLSKKGAQVWLGHDAANVTGADVVVASNAIGSDNPEVVAAADQGIPVVPRAQMLGELMRFRSGIAVAGTHGKTTATSLIATVFAEAQLDPTFLVGGLVKSEAGNARLGNGRWLIAEADESDASFLHLQPHIAVVTNIDTDHMATYGGDFDQLTDTFLKFLHNLPFYGLAVLCSDDAVIRDLRSHIRRPVVTYGVEPEADYQAIDIRQHGTRMQFAVSLMDRSVIEVDLALPGLHNVRNALA

SEQ ID NO: 195128 - protein, 245 aa, Unknown
  Bacterial polypetide isolated from the Sargasso Sea
MKNIRIGQKEIIHFIGIGGIGMSGLAQVMKTMSFNIQGSDQNKNKSTSDCLKAGIKIFKGHARKNIKNATIIVKSSAIKDKNIEIQEAKKKKIPIYSRAEVLANVVSLKKNIIITGSHGKTTTTSLVAKILSDQKLDPTIINGGVINSFNSNAKLGKGEWAILEADESDGSFLKLPINYSVVTNIDFEHIDYYKSYKNLENAFIEFINKTPPIGKSLICIDNKNIKKILKRIKNKNILTYGFNNK

SEQ ID NO: 195129 - protein, 340 aa, Unknown
  Bacterial polypetide isolated from the Sargasso Sea
EYRYAVNTIPCLSRGELLAKCVNQKHLVRVAGTHGKTTTSSLAAFVAECCQGSVSSIVGGTLTGRDSPVCYTDDALCIVESDESDRSFLLLKPQAAIVTNIDHDHLSSYGGEYTNLLDAFVCFLNGMGPEGVAIVNIDDPGVQAILPRLTCKTLTYGLSAAADTRATALESIALSSRFQLAGNGRAEEVVLNLVGRHNVLNALGVCALGRHLGWAGDVVASALARFPGVNRRLCCHGEVSYGTGSVMVIEDYGHHPTELMASFSAVQAAWPNRRLFVVFQPHRYSRTKALLLPFAEALSVVSAVMLLPIYAAGEAHDPDVTSADLGRMMQQHGAAGSVTV

SEQ ID NO: 195130 - protein, 226 aa, Unknown
  Bacterial polypetide isolated from the Sargasso Sea
MNSILKNSKITIHFIGIGGIGMSGIAELMLDQGFNIKGSDIVLNENIKRLRKKGAKIFLKHHKNNVKNISAAVFSSAIKKTNTEIVECNKLSIPLVSRASMLAELMRNKNSIAIAGSHGKTTTTSLVGTMLESSKLDPTIINGGVINAYSKNNKLGLGNWMVVEADESDGSFLKLPHEINIVTNIDSEHLDYYQTNKNLINSFEKFINNIPFYGYSIICTDNISAL

SEQ ID NO: 195131 - protein, 204 aa, Unknown
  Bacterial polypetide isolated from the Sargasso Sea
MLYSVTKVHFIGIGGIGMSGIAELLLNKDFIVTGSDISDSPNVQRLKKLGIEITIGHDKKNISDSELIIYSDAIPKDNVELKEAFSKNLLIYSRAKMISEIAKLNNSTVAIAGTHGKTTTTSMVGSILKNLNLDPTIIVGGVVKSLDSNSVLGSGDTFVVEADEYNKSLLHLNPTIAVINNIDFEHIECYQDLDDLKDTFIKFA

SEQ ID NO: 195132 - protein, 150 aa, Unknown
  Bacterial polypetide isolated from the Sargasso Sea
MSSIKNIHLIGIGGAGMSGIAEILHNQDYSVSGSDLEDTNVTKRLKNLGVKIFKGHKENNVLKKDLVVISSAISKTNIELKKAISMGIPVIPRAEMLANLMMLKNSIAVAGSHGKTTVTCIMAHIFTEAGLDPTYIIGGKVKSFESNAKL

SEQ ID NO: 195133 - protein, 263 aa, Unknown
  Bacterial polypetide isolated from the Sargasso Sea
NNPNHEFPEMRRIRSIHFVGIGGAGMCGIAEVLCNQGYKITGSDISESANTKRLSNLGVKISFGHKKENIEHADAVIFSSAVNSKNPEIVSAIEKGKPILTRAEMLAELMRYRHSIAIAGTHGKTTTTSIVASILAEGGCDPTFVIGGVLKSVGASAQLGESKYFVAEADESDASFLHLQPMVAVVTNIESDHMETYEGDFENLKKHFIEFLHNLPFYGLTVLCVDDEAVKEILPKISRPKITYGFSKEADFRIMNYRQTNTR

SEQ ID NO: 195134 - protein, 228 aa, Unknown
  Bacterial polypetide isolated from the Sargasso Sea
MKGLPLDIGTIHFVGIGGIGMSGIAEVLYSLGYTIQGSDLNHSQNVKRLEEIGITVFIGHKSENIKDAEVVVVSSAVGKENPEVEFARQNLIPVVRRAEMLAELMRLKWSVAVGGTHGKTTTTSLIASLFDRAKLDPTVINGGILNAWGSNARLGGGEWMVVEADESDGTFVKLPATIAVVTNINAEHMDHYGSFSALQTAFEKFVKRVPFYGFAVLCIDDPAVKLYT

SEQ ID NO: 195135 - protein, 103 aa, Unknown
  Bacterial polypetide isolated from the Sargasso Sea
MNPSKFSLNNIHFVGIGGSGMSGIAEVLFNLGYTVTGSDKKESDVTNRLTDKGIEIAYDHSASNLKKVEMVVVSSAISESNPEIIEAKKRSIPILARAEMLSS

SEQ ID NO: 195136 - protein, 255 aa, Unknown
  Bacterial polypetide isolated from the Sargasso Sea
MGGIINSLSKNNKFGKGKWMVVEADESDGSFLKLPHEISIITNLDVEHLDYYKTVKNLYSAFDKFIMNLPFYGISIVNEDDKNLKKIIQKNDTRKIITYSIKNRKSNVFIEKIYFDNRFSYFTLNFNIPINNLYGHYSYKIKAIGLHNVYNGTASIIAGHLAGVKNSFIKNALKNYKGVKRRFTHLGKVNLANIYEDYAHHPTEIAATLSGAKQLNQNIVVVFQPHRYSRTKFLFNDFVNVLSKIKKLYLLDTYS

SEQ ID NO: 195137 - protein, 210 aa, Unknown
  Bacterial polypetide isolated from the Sargasso Sea
MRRVKNIFFIGIGGAGMGGIAEVLLNEGYAIAGSDIQEGPMTQRLSELGADVKIGHRAENVEGMDVIVVSSAINEQNPEIIVAREKRIPIIRRAEMLAELMRFRHGIAVAGTHGKTTTTSLISTIFAEAEYDPTFVIGGLLNSAGTNARLGKSRYLIAEADESDASFLHLQPMVSVVTNIEADHMDTYGGDFSKVKDTFVDFLSNLPFYG

SEQ ID NO: 195138 - protein, 199 aa, Unknown
  Bacterial polypetide isolated from the Sargasso Sea
WLNIELNLPGKHNVLNALASIAVAHELGVSDENIISALRNFQGISRRFHVRGEIKISSFNLTLIDDYAHHPTEISSTFEAIRSGWPARRLIVIYQPHRYTRMRDLFEDFSEILSCTDRLIVLDVYPAGEDFIPGADGRSLCRAIRSRGKVDPIFLENKESIFEVLPDVVEDNDLLLTLGAGDIGSLSSQLYKNYSTVVH

SEQ ID NO: 195139 - protein, 274 aa, Unknown
  Bacterial polypetide isolated from the Sargasso Sea
MGGIINSFNTNAQLGEGRYLIAEADESDQSFLLLQPSMSIITNIEPDHLVNYENSFENLKIAFLDFVKKLPFNGMAIVCGDDPIVRELIPKFSRPYITYGFDEGNDYILSNYSSSDFQSSFNLRSESESIDLSFNMLGRHNALNAAAATILCIQEGISTKVINNSLKNFMGINRRMQVLGKLSINGSSCILVDDYGHHPSEIKSTIDSIRESFPNKELNMVFQPHRYTRTNDLFSEFVDVLTKIDNLILLDIYSAGESPINGVSSEELMKKLID

SEQ ID NO: 195140 - protein, 247 aa, Unknown
  Bacterial polypetide isolated from the Sargasso Sea
RLRWSVAVAGTHGKTTTTSLVATLLDAADIDPTVVNGGIITGWGSNARLGHGQWMVVEADESDGSFAKLNPTVAVVTNIDPEHLDHHGSYEALEQAFVNFVASIPFYGFATLCIDHPAVQRLMAGIKDRRVITYGLAANADVRAVNLRHDAASMVFDVVLSDRTAGGYGRMPEMRFPMLGEHNVQNCLAAVAVAMEMGVTLDRIAAAMAGFGGVGRRFETKGVSGGVTVIDDYGHHPVEIRAALQAG

SEQ ID NO: 195141 - protein, 266 aa, Unknown
  Bacterial polypetide isolated from the Sargasso Sea
RKNLINAFEKFINLLPFYGTTIMCYDDKNLKLLINKIKTRNILTYSIKNKKADVLIFDIIQNKLRTSFKLKINNKITHSSNYKFTINAIGNHNILNATASIVAAKLNGIKNKDINNALINYVGVKRRFTFIGKKNKSFVYDDYAHHPTEISATLSAAKSLKNKVIVVFQPHRYTRTKILIREFINVLSKVDYLFLLETYSAGEKIIKGATSKDIFSKILKKNKNTTYLKNIRDLNKLMKPHTMNQNTIVFMGAGSISSIAKKYLNN

SEQ ID NO: 195142 - protein, 218 aa, Unknown
  Bacterial polypetide isolated from the Sargasso Sea
MSNLPLSIGLIHFIGIGGIGMSGIAEVLNELGYEVSGSDIAENSNTKRLEDLGIEVFIGHEKTNVSGAQIIVVSTAISKDNSELIEAKSKKIPIVHRAEMLCELMRLKWSIAIAGTHGKTTTTSLVASLLDGADFDPTVINGGIINNWKSNAKIGKGEWMVVEADESDGSFSKLTPTVAVVTNIDSEHLDYHGSFENLENAFNKFVSSIPFYGFKVLC

SEQ ID NO: 195143 - protein, 223 aa, Unknown
  Bacterial polypetide isolated from the Sargasso Sea
MSNLPLSIGLIHFIGIGGIGMSGIAEVLNELGYKVSGSDIAENSNTKRLKDLGIEVFIGHKKTNVSGAQIIVVSTAISKDNSELIEAKSKKIPIVHRAEMLCELMRLKWSIAIAGTHGKTTTTSLVASLLDGADFDPTVINGGIINNWKSNAKIGKGEWMVVEADESDGSFSKLTPTVAVVTNIDSEHLDYHGSFENLENAFNKFVSSIPFYGFKVLCIDHPS

SEQ ID NO: 195144 - protein, 174 aa, Unknown
  Bacterial polypetide isolated from the Sargasso Sea
MPQDIGSIHFVGLGGIGMSGIAEVMLNHGYKVQGSDLKDGPILERLRSKGATTFIGQSEDNLTNAEVVVISTAIKRGNPELDGARKRGLPIVRRAEMLAELMRLKSNVAVAGTHGKTTTTSLVSAILDAGGVDPTVINGGIIHAYGSNARMGASDWMVVEADESDGTFLKLPAT

SEQ ID NO: 195145 - protein, 410 aa, Unknown
  Bacterial polypetide isolated from the Sargasso Sea
MKFSELALNKVHIIGINGIGMSALAIYLKKNSINVTGSDIAHNANTVILEKYKIPVFIGHKSSNIKDRDIIFYSSAIKDNPEIKEAKKNKIPCYNRSKLLQLICRDKFTIVVSGSHGKTSTTSILGHLLVRAGLNPTIISGGIMQNFGQNIYLTDSNYVVVEADESDGTVFKLSPRYLLFLNVDREHIDFYKSYSNFKSKIKNYILSQIKKDVKIFINNDDNFLFSLKKYSKNLKTFGSNKKANYSYKLIKLSDKKSSFQIYKGKKIISNKLTTNLLGEHNVQNLTAVLSIIDDLGYEIKKSHILDFKGTKRRMNILGKLKKTTFIDDYAHHPTEIDKLINIISLYKKKTVLLIIEPHRYSRLNDLYKEYLHVLRNTNNLIILKTYEAGESYKQGMKNSKNLVNDLNVSN

SEQ ID NO: 195146 - protein, 471 aa, Unknown
  Bacterial polypetide isolated from the Sargasso Sea
MRRVERIHFVGIGGAGMGGIAEVLVNEGYKVSGSDIAPNPVVDRLASLGACIVIGHKAENIQGASVVVVSSAIKTDNPEVAAAIEQRIPVVRRAEMLAELMRFRHGIAIAGTHGKTTTTSLIASIFAEAGTDPTFVIGGLLNSAGTNARLGAGRYLIAEADESDASFLHLQPMASVITNIEPDHMETYQGDFEKMKATYLEFCHNLPFYGVAVMCIDDAVVRELIPQIGRFVITYGFSEDADYVISDFGQTGTQSHFVITDKNGVASQIELNLAGRHNALNATAAFAVAKDEGIEPPAILAALKKFEGIGRRFEQYGEFDTGRGKVLLVDDYGHHPSEVAATLAAARNAWPERRIVMAYQPHRYTRTRDLYEDFAKVLSSVDLLLLLEVYAAGEAAIPGADSRSLCRSIRARGQLDPIYVATPADLPAALADVLQDGDVLLTQGAGNIGALAKQLAASKLAISALKPNEGA

SEQ ID NO: 195147 - protein, 385 aa, Unknown
  Bacterial polypetide isolated from the Sargasso Sea
MKINIGQKEVIHFIGVGGIGMSGLAQIMKIMGFKVQGSDTNMNKNIENCKKLGIKFFLGQKKKNIREATILVKSSAIRDNNPEIREANKKKLPIYERVEMLSNIVSLKKNIIISGSHGKTTTTSLVSKILLESKLDPTIINGGVINSLKNNAKLGKGDWAVLEADESDGSFLKLPINYSIVTNIDKEHIDFYKNYKKLENCFIKFINKTPPIGKCIICIDDKNIKKIKRKIKTKNILTYGFSSLSDYQIIKPKYNINNCKFDLVVKNFLGKRKIIKNIVLNLIGKHNILNSVAAISVCLNLGIKIKIIKRALLKFTGVQRRMTKIFEKNNNEFYDDYAHHPTEIYSVLESIKNVANKKKITSVFQPHRYSRVNFLKEEFSKSFKF

SEQ ID NO: 195148 - protein, 348 aa, Unknown
  Bacterial polypetide isolated from the Sargasso Sea
MIINLAKTEIIHFVGIGGIGMSGLAIIMKGLGFNVQGSDLNPNKNIERLKKNKIKVFIGHKKENISNTTILVVSSAINKNNVELILARKKKLPIYQRGDMLAHIVSLIKKNVVVSGSHGKTTTTSLVSGIFSKAKLDPTVINGGVINSFKNSAKLGKSNWCLIESDESDGSFLKVSPTYSIVTNIDKEHMDHYKNLNSLKKSFIEFIEKTPSFGKSIICIDDKNNNEIIKKINVKNYLTYGTNKKSNFRINNIIQNKEFSSFDLDINLPGKRSFSIKKIKIPLLGLHNIRNAAASAAICKIIGISSVLIKKGLNEFAGVERRFNKIKFYRGSLIFDDYAHHPTEIKEV

SEQ ID NO: 195149 - protein, 455 aa, Unknown
  Bacterial polypetide isolated from the Sargasso Sea
MLYSIKKVHLIGIGGIGMSGIAELLKNKEFVVSGSDIADSPNVQRLIDLGINVSIGHNKENISDAELVIYSDAIPKDNAELIEALAKNIIVYSRARMISEIAKLNNSTVAIAGTHGKTTTTSMVGTILKSMNLDPTIIVGGVVKSLESNSVLGGGDTFVVEADEYNKSLLHLSPTVAVINNIDFEHIECYNDIDDLKDTFLQFANSVPFYGTVCACKDSNNVASILSKIDKPIITYGIESQNVDIKAENLHQENGTISFDVKIKDQIFSVNLSVPGKYNAYNALAALSVCETMGIDLESACKALSNFSGVKRRFDVKANKDIMIIDDYAHHPVEVQNVIETVKSNWNKNLNIIFQPHLFSRTKEFYKDFAKALMIADNVMITEIFGSREKEDSSTTSDLIINEMLKLNHKNVSYVSSKDIVEEVKSRGVKGDIFLMMGAGNIWRYAEELGKHYND

SEQ ID NO: 195150 - protein, 382 aa, Unknown
  Bacterial polypetide isolated from the Sargasso Sea
CYDFTKRGFKVTGSDLVITDELKELKKLGAKVQIGHEPRLIKNADLVVASSAISKGNSELSYAKKSGLTIIPRAEMLGTLMKPYRSIAIAGSHGKTTTTSIVASIFNAANLSPTYVIGGQVLSVGRSSELGEGDYIIVEADESDGSFLHLQPDIAVITNIDNDHLDFYESNQEKLNQSFLSFAENLPFYGYILINLDDSNIRKISKDIHRRQITFGFSAKNRFQITDIKLKNGVQKFQIIDHSNKKNYKFSTYLSGKHNLCNLTAAICVAIEENISTKNISKGLNNFKGVGRRFEISNLTFYDQPRILIDDYGHHPVEISATIQAIRQKFPRKKICMIFEPHRFTRTHQLFDDFVKVLSQVDSLLLLDIYPASEKPIKGISS

SEQ ID NO: 195151 - protein, 428 aa, Unknown
  Bacterial polypetide isolated from the Sargasso Sea
MGSIHRVHFVGIGGVGMGGIAEVLINLGYAVQGSDVNQNPITERLANLGAKIFIGHDSGHIATADVVVVSSAIAPDNPEIVKATRQRIPVIQRAEMLAELMRFRSGIAVAGTHGKTTTTSLIASMLAEGGLDPTFVIGGRLASANANAQLGEGEYLVAEADESDASFLHLQPVIAIVTNIDADHLESYEGDFGRLKQGFADFLHNLPFYGLAVICNDDLNARTLIPEVGRRALTYGVSDGSDIRAEEVKSAGLASSFIIHREGHEPLEVKLNLPGFHNILNSLAAVSVATELGVSDEAIKKALLEFSGIDRRFQVLGTVTTRNGLVTFVDDYAHHPTEIAATIEAARESWPGNRLVVAFQPHRYTRTHALIDDFSEVLSGADVLLLTDIYSAGEEPITGADGRALARAVRSRGLVEPVFVEDLKELPN

SEQ ID NO: 195152 - protein, 462 aa, Unknown
  Bacterial polypetide isolated from the Sargasso Sea
MNTSQYKLNNIHFIGIGGSGMSGIAEVLNNLGYKVSGSDSISSSNTDRLERLGISISYDHNPNNLTNVEMVVISSAISDDNPELVYAKEHLIPVLARAEMLSSLMNNKRGIAIAGTHGKTTTTSLVASIMTDANLDPTFINGGIINSFNSNAQLGEGDYLIAEADESDKSFLLLQPSVSIVTNIEPDHLVNYDGSFDNLKKAFLEFIKKLPFNGVSIVCGDDTVVKELKINFQRPHISYGFEPSNDYVLSNYSTDGRNSYFKLSSDTNSFDFRLNMLGKHNVLNAAAAIVLCLQEGIAVEVIQDSLSNFMGIDRRMQILGERKIGNSTCVYIDDYGHHPTEIRKTIQAIRNSFPDFELKMVFQPHRFTRTKDLYEEFIEVLSHVDELFLLDIYSAGENSIEGINSSNIQSSLIRSGFDNVKLLNKKEVAKEFDKDLTKDTIFVFQGAGDISSISRSIVEEFK

SEQ ID NO: 195153 - protein, 312 aa, Unknown
  Bacterial polypetide isolated from the Sargasso Sea
MKIELAKKETVHFVGIGGIGMSGLSLIMKRKGFKVQGSDISNNKNVERLKKEKIKIFLGHSKQNLKNATIVVVSSAIKKNNPEFIEAKKKKIPIIKRGKMLASIVSLLKNIVVVGSHGKTTTTSLITSIFQETKLDPTIINGGVINSIKNTAKLGKSDWSILEADESDGSFAHILPTYSIITNTDREHMDFYKSIDDLKKYFLEFIKKTPSFGKSFICIDDKINRELIKKIKNKNYFTYGVRSNSNFRIKNIKQFKSFSEFDIQISLPNKKTLNIKNIKIPLLGIHNIRNSVGALGVALSVGIPIQKIKKGL

SEQ ID NO: 195154 - protein, 464 aa, Unknown
  Bacterial polypetide isolated from the Sargasso Sea
MKIELAKKEIIHFIGIGGIGMSGLALIMKAKGFQIQGSDINKNKNIEKLKKQSVRIFIGHKKQNIKDVTIVVTSSAIKKSNPELLEAKRKKLPVIKRGKMLANLVSLMKNIVVVGSHGKTTTTSLVSSIFENTKLDPTIINGGIINSIKSTAKLGKSDWSILEADESDGSFTHISPTYSIITNIDREHMDFYKSMKDLKNHFLHFVKKVPSFGKSFICIDDKINNELIKDIKNKNFFTYGVKSNANFLIKNIIQDKLFSKFDLSINLPNKKKNILKNFQIPLLGIHNIRNSTAAIAVALTVGIPVSNIKKGLKNFKGVQRRFNKIFTFNGVDFYDDYAHHPTEIKSVLEGVKKVFDKFERVCIFQPHRISRLKDLRNEFAHCFRDADTIILCPVFTAGEKIKLGFNYSDFAKEIIKNSKVKLFMIKNNIDLAKFLKQNIYGNKIVIGMGAGSISNWMKKLPELM

SEQ ID NO: 195155 - protein, 488 aa, Unknown
  Bacterial polypetide isolated from the Sargasso Sea
MTKTERYLQLRSMIPEMRRIKRIHFVGIGGAGMGGIAEVLVNEGYVVSGSDIAQNAVTDRLCLLGAKIHIGHGADNVQQADVVVVSTAINPENPEIIAAKELRIPIVRRAEMLAELMRYRHGVAIAGTHGKTTTTSLIASLYGQAGRDPTFVIGGLLNSAGTNARLGTSRYLIAEADESDASFLHLQPMVSVVTNIEADHMDTYGGDFEKLKSTFVDFLHNLPFYGVAVVCIDDAVVREIMPRIGRHMITYGFSDDADVQALNFHQQGHQCRFTVRRKGKEDLDLLLNLPGQHNVLNALAAIAVATEDEIDDSAIIQALAEFQGIGRRFQHLGKFATPKGEVMLVDDYGHHPSEVAATIKAARAGWPDKRLVMAYQPHRYTRTRDLYEDFIEVLSQVDCLLLLEVYSAGEAPIPGADGRALCRSIRLRGQLDPIFIASPDQLAEVLPDVLQEGDLLLTQGAGNIGALSRQLAASELGFSTTATTEVKP

SEQ ID NO: 195156 - protein, 468 aa, Unknown
  Bacterial polypetide isolated from the Sargasso Sea
MKKYFNKKIGKKEKIHFIGIGGSGMSGIASVLCDLGYDVSGSDIIDSSTVKNLEDKGITVKIGHHKKNILGKDILVISSAIDKKNVELKEGLKANIPVIQRAQMLAELMRFNYGVAIAGTHGKTTTTSILVHILCYANFDPTYIIGGKILNSKSSSLGSSEYLIAEADESDASFLNLTPNIAVITNIDNDHLINHDNSFDKLKDNFIKFSNNIPFYGKCIINKSDKNISKIEKKILRKKISFSINTKANYMVTKIKNNFLSSEFTVKEKKKKYAVTLNIPGFHNVENALAAIATAREMGVNIKDIQNSIPSFLGIKRRFELLGEFKIDQNSFYWIDDYGHHPTEILAVYNSVKEIWPKRKILVVFQPHRYSRTKDLSKEFKKIFRKIDKLVILDIYAASEKNKDKIDINKIFKENLSKKNALHIKGFNNLEKYLLKSIQNEYVLITMGAGDISKFVLSFKDHKKVSKI

SEQ ID NO: 195157 - protein, 464 aa, Unknown
  Bacterial polypetide isolated from the Sargasso Sea
MNKKIKIFLVGIGGIGMSGIAEILYNLGYEVSGSDKKEGSNVSRLKKLGIKIKIGHRSSNIKDSSLVVYSSAIKNDNPEIKKAIKEKIPVIGRAEMLAELMRMKKTITVAGSHGKTSTISIISEIFVKSRLDPTVVNGGIINSLGSNTRLGSGDWMIVETDESDGSFINLPSFCGLITSVDDEHLDYYKNMKNLEHAFKKYIKNISVFGFSVICSDDKKAYKIAKKQKRSDHIFYGTDSKAHYKAMNLRRDHTGQTFDIEISNRNRITTKYKNIQFPMHGRHNLLNALGAITISHKIGINFKFIRKALKGFKGVKRRMTLINEIAGVKYFDDYAHHPTEITASLRAIKELTNKRVIAVVQPHRFSRINQTYNKFVNSFRNSDMVIVLPIYAAGEKGIKKINAKSLALGIQKNSRTNTYSFNHFRKVQEFLNKEIKEGETVVFMGAGNISELAYNYVNELSKANV

SEQ ID NO: 195158 - protein, 462 aa, Unknown
  Bacterial polypetide isolated from the Sargasso Sea
MKLSKIKNIHFIGIGGVGMVGIAEMLLNQGFAVSGSDLVENKNTERLKYLGAKIFIGHNEKNVRDSDVVVYSTAVTESNPEMRCARSLNKTIIARAEMLSSLMRGFQSIAVAGSHGKTTTTSLIANIFIKAKLDPTYIIGGRILGQEDKSILGSSEYLIVEADESDASFLHLSPEISVITNVDNDHLDFYENNIEKLNETFHQFLENLPFYGTAIICTDEERSEKLFNNLARPKISYGFSRSADYYLKDLKQVSNFQEFTLVRNSVGKEVRLKLKIAGRHNALNATAAYIVAKEAGITTKTIKDSLKSFGGVSRRLEFKGDLKINNKKVKLLDDYGHHPTEISATVAAIKSSHKNKKVNMIFQPHRYSRSSILFDDFIECLGAVDKVIILDIYSAGEQNSERISSYDFVNSLIKRGKKAFFAKNLKEISKILEAEVMNNEILVTQGAGNIVDISNSLLAMYK

SEQ ID NO: 195159 - protein, 440 aa, Unknown
  Bacterial polypetide isolated from the Sargasso Sea
MKLFKKAKNIHFVGIGGAGMIGIARVLLQKGYKISGSDISDSNELKKLRKDGAKVYIGHSKENILGADLLVMSSAIDKKNPEIIKANKESITIIPRAEMLGSIMIGYDSIAVAGSHGKTTTTSMIAKILSVANLSPTYVVGGKVLSTDENSDLGDGNYLVAEADESDGTFTHLQPDVAVLTNIDDDHLVHYNNIFENLLDSFVMFLENIPFYGYMVMNGDDKNIKKISKRISRKQITFGESKNCDYQIINIKASKGIQNFEIFNNKNNKTHKFRLNIPGKHNVFNASASIALSLEEGVPVGAIKKGIAEFSGVGRRYEKHNIEIDSKKMILIDDYGHHPLEIISNIQAYKEEYPNKKVCMIFQPHRFTRTAQLFDDFIKVLNQTDSLILLDIYSASEKPIKGIHSRTITETIKQLGHKDVTYIKHHDDVIKLVNDKKDSF

SEQ ID NO: 195160 - protein, 443 aa, Unknown
  Bacterial polypetide isolated from the Sargasso Sea
MSYNKYFFIGVGGIGMSSIANYLIDTKNIVFGYDRSSNKLVDKLIDNGLQFTDKLDIGLIPQEFLDDNVIVVYTPAIKNDNIYLDFFSNKKRNKIFKRSEILGQISTNSKCIAVAGTHGKTSTTAILSHLLYSKQVKFRSFVGGIMKGFDSNYLSTGDEYVIIEADEYDRSFLALDPDYTLITSIEKDHLDVYGDLESILTSFGIFCDKTKEFVIAEKGINIKKDFSFSVDEDADYSVNIIKNDLNGIHFDFKTPNNLISNIHARVIGKHNLKNVISALSLIDQIEDFNLEEFIPHLSEFKGIERRMDIYKYEDKVIIDDYAHHPTEIKSIIDTIDYNFQDKPKAVIFQPHLYSRTRDLMDDFGKVLSYFQEVYLLNIYPAREKPINGITSEALLNKIDTSKKQIIKKVDINDIINKTKCKIISILGAGDLTLNLNKKIFTNE

SEQ ID NO: 195161 - protein, 439 aa, Unknown
  Bacterial polypetide isolated from the Sargasso Sea
EVLFNLGYTVTGSDKKESDITNRLTDMGIEITYDHSALNLKRVEMVVVSSAISESNPEIKEAKKRSIPVLARAEMLSSLMNTKRGIAIAGTHGKTSTTSIIASIMTEAGLDPTFINGGIINSFNSNAQLGKGKYLIAEADESDQSFLLLQPSMSIITNIEPDHLVNYENSFENLKIAFLEFVKKLPFNGMAIVCGDDPIIRQLIPEFSRPYITYGFDEENDYVLSNYSSSDFQSSFNLRSESESLDLSFNMLGRHNALNAAAAAVLCIQEGVSTKVINNSLKNFMGINRRMQVLGELPINGSNCILVDDYGHHPSEIKSTIDSIRESFPNKELNMVFQPHRYTRTNDLFYEFVDVLTKVDNLILLDIYSAGESPIKGIDSEELMKKISDQGFSKVKLLNSGKEIIRSLEDHVDNESVLIMQGAGNISDVSSEIKKKYLD

SEQ ID NO: 195162 - protein, 461 aa, Unknown
  Bacterial polypetide isolated from the Sargasso Sea
MFRKVNKVHFVGIGGIGMSGIAELLINQGFEVSGSDLKNSEIINKLEKNGAKINIGHNSDNVADCEVLVYSSAVPKNNSELVFAQNKKIPVIKRAEMLAELIALKNTSIAVSGTHGKTSTSSMIGSLLSHSNLDPTLIVGGLVKNINSNSKLGSSELFVVEADEYDKSFLQLKPTIAVITNIEKEHMDCYDNMNDLFDSFLKFANSVPFYGAVIACNDSEGINKIKDEIKRPITTYGLSPDADIYANNLSFDKMNSTYSLNYKNENIGKVNLNAPGKHNILNSLAAIAIGFELGLNKQTIIEGINSYQGVRRRFEIKGEVDDVIVVDDYAHHPTEVLATIETASISWNRRIIAIFQPHLYSRTKEFYKDFAKALIKSDVAIITDIYPAREKPIDGITGQLVYEELKKNGHVDVIYEPNLEKLTHLVDGIVKQNDLVITLGAGTIWRYSELIVQNLKKRLKN

SEQ ID NO: 195163 - protein, 464 aa, Unknown
  Bacterial polypetide isolated from the Sargasso Sea
MDHLNKKGRIFLVGIGGIGMSGIAEILHNLGYEVTGSDQKEGSNVIRLKKLGIKIKIGHNASNIKGSSLIVYSSAIKKQNVEIKEALKIKIPLISRAEMLAELMRMKKTITVAGSHGKTTTISIISEIFVKSELDPTVINGGIINSLGSNTRLGFGDWMIVETDESDGSFTKLPSFSGLITSIDDEHIDFYNNMRSLENAFEQYINNISVFGFSVICSDDNKLYKIATQQKRSDHFFYGTNARANYKAKNIRINKQGQTFDIEIKNINEKRKIYKNIQFPMHGRHNLLNALGAIAISHRIGISFKFIRQALRGFEGVKRRMTLIKTLDKRKYFDDYAHHPTEIKASLKALRDLSNRRIITVVQPHRFSRIKQTFDKFSKSFKNSDFVIILPVYAAGEKKIKNINASSLAKSIQKNSKTKTLAFNDFKKVEDFLNHEVKKGETVIFMGAGNISNLANNYVNTLGK

SEQ ID NO: 195164 - protein, 465 aa, Unknown
  Bacterial polypetide isolated from the Sargasso Sea
MKHIVKHIHFVGIGGAGMSGIAEVLVNLGYEVSGSDLSRNAVTDRLQALGARIAIGHDAANIEGANAVVVSTAVRSDNPEVLAARAQRVPIVQRAVMLAELMRLKQGIAIAGTHGKTTTTSLVASVLAAGGLDPTFVIGGRLISAGANARLGTGDFIVAEADESDASFLNLYPVIEVITNIDADHMDTYGHDFARLKQAFIEFTQRLPFYGSAVVCVDDPNVRQIIPFISKPVVRYGLSPDAQVRAEDIDARDGRMHFTVIREGRAPLAVVLNMPGLHNVQNALAAIAIATDLGVSDDAIQLALAEFNGVGRRFQRYGEVPTADGGHYTLIDDYGHHPVEMAATIAAARGAFPGRRLVLAFQPHRYTRTRDCFDDFVNVLSTVDALVLTEVYAAGEAAISTANGDALSRALRAVGKVDPVFVATVDDVPDALAKVAQNGDVVITMGAGSIGGVPAKVAQHTQQKA

SEQ ID NO: 195165 - protein, 166 aa, Unknown
  Bacterial polypetide isolated from the Sargasso Sea
AIALAYLNGIKIEDSLEAIKTFPGVKRRTEYLGSIKGIKLYDDYGHHPTEITATISALKENTLGKLYVIFQPHRYTRTKNGFEDFKTSLSKADETIVVDIYPAGEEPIPGVSSKNFEQKNIKYLKSMRMVPSYLSTRVKKNDIILTLGAGDITLLGPQILKYLDEI

SEQ ID NO: 195166 - protein, 463 aa, Unknown
  Bacterial polypetide isolated from the Sargasso Sea
MKLNKNKLIHIVGVGGIGMSGIAEILSEMGYQVQGSDIKINANTVRLNKKKIKTFNSHKQSNLKNVSLVVYSSAISKNNIELEHSKKIKIPSISRAEILSQIVKLKKTIAISGSHGKTTTTSLISAVLNGARMKPTVINGGIINQFGTNTKLGSGDWLVVEADESDGTFVKLPASISVVTNIDKEHLDYYSNFQNLKNYFKRFITQVPFYGFAVICIDDNELRKLAANISTTKIIRTGFHRESDIKCIKLRHKANETIFDVFVKEKNQTIKNIKLPLHGAYNVNNALAAIAVGLQLNVKPEIIKKSLNSFKGVQRRLTELWSNNNIRVVDDYAHHPTEINNVLKGLVDADKKNRIITIFQPHRFSRVLDLKSKFTTCFKNSEYVFVSDVYGAGEKKPKNFDLNKFISNIAKNSKVKAEYFVKNDQLFELTKKNRSKIIFLFLGAGTVTDWAQNFAKELKKIYE

SEQ ID NO: 195167 - protein, 462 aa, Unknown
  Bacterial polypetide isolated from the Sargasso Sea
MKLSNIKKIHFIGIGGVGMVGIAEMLINQGFYVSGSDLVKNKNTTRLNSLGAKIFIGHNEKNVRNSDVVVYSSAVNISNPEMKAAKSLNITLIPRAEMLSSLMRGFQSIAVAGSHGKTTTTSLIADIFVRAKLDPTFIIGGKILGHENKSILGTGEYLIVEADESDASFLHLNPEISVVTNIDNDHLDYYENNLEKLDSTFLQFLENLPFFGSAIICTDSERSKKVFENLSRPKISYGFDKKADYFIKDLKQQAKFQKFKIIRNSTGKEISLELTLSGKHNALNATAAFIVAQKAGINTKVIKDSFKNFGGVSRRLEFKADLKIGGKSVTLIDDYGHHPTELKATIEALKSTNPNKKICMIFQPHRYSRSTLFFKEFIECLRDVDTSIILDIYSAGEQNLQKISSYDFVNALIEKKKNAFFAKNLKEICKILESEIKGNEIIVTQGAGNIVDISNSIKAIYK

SEQ ID NO: 195168 - protein, 466 aa, Unknown
  Bacterial polypetide isolated from the Sargasso Sea
MTFRKIKNVFFVGIGGIGMSGIAELLLNLGFNVSGSDINENDNVKRLRNLNIDVKIGHSPSNINQDTDVLVYSSAVPIENPEIIRARQKGIPIIRRAEMLGELISVKETSIAVSGTHGKTTTSSMIGTILAYAKKDPTMVVGGLVHNIDTNSKLGNGDMIIVEADEFDRSFLALKPTIGIITNIELEHTDCYDDLKDLQDAFIQFCRSVPFYGEVILCADSPAVQEIIPKIERPMTTYGRSRDAAYRAKNIRFQENKSTYSIFRAEECLGEIKLNVPGEHNVLNSLAAVVLGIEMGLSFNDIQKGIYNYKGVRRRFDIKGIFNDIMVLDDYAHHPTEVKATIEAAKAGWDRRIIAVFQPHLFTRTREFFREFSNSLELADVVLITDIYPAREKPIPGVTSKLIYDILFQKMKDYCFLVPDLDDLESMLDKIIEPGDMIITMGAGNIWRYCESYSKHLNSTFEEIEG

SEQ ID NO: 195169 - protein, 425 aa, Unknown
  Bacterial polypetide isolated from the Sargasso Sea
SINRNGELKYILGQRAENIKNVSIIVISSAIPEDNVELVAGALNKIPIVRRADMLAELMRFKKSISVGGSHGKTTTTSFISSLLEGAKLDPTVVNGGIIEAYGTNARLGKSDWMIVEADESDGTFIKLPSTYVVITNIDREHIDFYKTFDNLNRAFRNFVENIPFYGVAFVCIDSPDTENLCKDIKYRKLITYGFNRKSDLMISNVKVKNYLTYFDITINKSNLSKKKFIKNIAIPIPGDHNIRNACASIAVALELDIKEKTIKDVLLNFRGVERRFSFVGSVNNIKIIDDYAHHPTEIKNTLKAARLLCNGKLIVVFQPHRYSRIIDLYDEFINSFFDADILFVTKIYSAGEKQITDINEKIIAKSIQKMGHKNVKCFKDEKCMEVELSEVSSSNDFIIFLGAGSISKKARSMEESMLKIIRKN

SEQ ID NO: 195170 - protein, 451 aa, Unknown
  Bacterial polypetide isolated from the Sargasso Sea
MNVSTKFPVEIGPIHFIGIGGIGMSGIAEILINQGYSVQGSDLKETEITLRLERMGASIKIGHDKNNLKRAAVVVISSAINKKNPELNYARSAGLPVVRRAEMLAELMRMKSNVAIAGTHGKTTTTTLVATLLDEGDFDPTVINGGIIHAYGSNARAGDGEWMVVEADESDGTFTRLPATIAVVTNIDPEHLEHWGNFDSLRKGFLDFISNIPFYGIAICCSDHPEVQKLIGKISDRRIKTFGLNAQSDVRAINLNYKNGRAYFDIRFQQEKFTINDCVLPMPGDHNVSNALGAVAVAHHLGIENAKIREALAKFKGVNRRFTKVGEVNGVTIIDDYGHHPVEISAVLRAARQISSGRVIAVHQPHRYTRLNALFKDFCSCFNDADIVAIADVYSAGEKAIPGASRDDLVTGLVSHGHRHAVAVSNLQDLSQLMAKNAKSGDIVICLGAGT

SEQ ID NO: 195171 - protein, 464 aa, Unknown
  Bacterial polypetide isolated from the Sargasso Sea
MKKFEKVKNIHFVGIGGAGMIGIARVLLKKGYKVSGSDIDYSNDLKKLKNDGAIVYEGHHENNIKDKDLLVVSSAIDSENVELLQAKKDSITIIPRAEMLGSLMIGYESIAVAGSHGKTTTTSMVAKILSVADLSPTYVVGGKVLSTDENSDLGEGKYLVAEADESDGSFIHLQPDVAVITNIDDDHLAHFNNIFENLLDSFIAFCENVPFWGYLVINGDDKNFQKISSKISRKKITYGTSQNCDYKIVDILSIDGCQKFKIEDSFRKKSHSFQINLPGRHNVFNAAASIVVAIQEGLDIEAIKKGVLDFSGVGRRYEKHVINFDKEKKFLIDDYGHHPLEIRCNLDAIREEFQDKKILMIFQPHRYTRTAQLYDEFVDVLNRVDSLILLDIYSASEEPIKGITSSALAETIKKQGHKNVLHVKNHDDLFDIIKEKKDLFDVIVTQGAGSISKVCESIIRRWKI

SEQ ID NO: 195172 - protein, 464 aa, Unknown
  Bacterial polypetide isolated from the Sargasso Sea
MKIKLAKTELIHFVGIGGIGMSGLALIMKGKGFRVQGSDISINKNIERLKKEKIKVLIGHKKQNINKATILVISSAIKKNNPEMLEAIKKQLPIYKRGEMLANIVSLTKNIVVVGSHGKTTTTSLIASIFQETKIDPTVINGGVINSINNSAKLGKSEWSILEADESDGSFVHTPPTYAIITNIDREHMDYYGSMDKLNKYFVNFVNKVPSFGKSFICLDNKNNKNLLKRLKNKNFYTYGIDNKSNYIVKNIKQFREYSEYDLKIRLPNKKIVIIRKIKIPLLGLHNIKNSVAATAVALNVGLSISNIKKGLKNFKGVQRRFNKIFTFNKVDFFDDYAHHPTEIKEVLNGVKKVYSNYEKICIFQPHRISRLKDLKSEFASAFKDADKVILFPIYTAGEKIKLGFSYYSFAKEIIKKSKVELFLLNDKYQLAKYIKYNIYGDKIVIGMGAGSISSWMREMPKFL

SEQ ID NO: 195173 - protein, 453 aa, Unknown
  Bacterial polypetide isolated from the Sargasso Sea
GGAGMGGIAEVLKNLDYEISGSDVKETSITKRLRSLGIKISIGHDIENILNTDVVVYTSAIKENNKELVAARKNRIPVVRRAEMLAELMRFSQGIAIAGTHGKTTTTSLVTSVLAEGGLDPTYVIGGLLNSSGTHAHLGKGKYIVAEADESDASFLHLHPIIAIVTNIDADHLENYSGDFSSLRYNFVEFLHQLPFYGLAVLCIDDEGVRKILPEVTKPIVTYGLDFDADYNAQIINQETTKTWFKVSSKEKKDWLEIELNLPGKHNVLNALATIALSHELGVSDNDIIKALCNFQGISRRFQIRGEIDINGINLLLIDDYAHHPTEIKSIFEAIRSGWPSRRLVVIYQPHRFTRMRDLFEDFTEILSQTDRLLVFDVYPAGEEIIPGSDSRSLCRAIRSRGMVDPIFLEDKDSVFEILPNVVEENDLLLTLGAGDIGSLSAKLYKNYSATFH

SEQ ID NO: 195174 - protein, 464 aa, Unknown
  Bacterial polypetide isolated from the Sargasso Sea
MKIKLAKTELIHFIGIGGIGMSGLALIMKGKGFRVQGSDISINKNIERLKKEKIKVLIGHKKQNINKATILVISSAIKKSNPEMLEAIKKQLPIYKRGEMLANIVSLTKNIVVVGSHGKTTTTSLIASIFQETKIDPTIINGGVINSINNSAKLGKSEWSILEADESDGSFVYTPPTYAIITNIDREHMDYYGSMDKLNKYFVNFVNKVPSFGKSFICLDNKNNKNLLKKLKNKNFYTYGIDYKSNYSVKNIKQFREYSEYDLKIRLPNKKITIIRKIKIPLLGLHNIKNSVAATAVALNVGLSISNIKKGLKNFKGVQRRFNKIFTFNKVDFFDDYAHHPTEIKEVLNGVKKVYSNYEKICIFQPHRISRLKDLKSEFASAFKGADKVILFPIYTAGEKIKLGFSYYNFAKQIIKKSRVELFLVNDKYQLAKYIKHNIYGDKIVIGMGAGSISSWMREMPKFL

SEQ ID NO: 195175 - protein, 455 aa, Unknown
  Bacterial polypetide isolated from the Sargasso Sea
MLYSVKKVHLIGIGGIGMSGIAELLSNKDFIVTGSDISDSPNVQRLKSLGIKITIGHDKNNISDSELIIYSDAIPDDNIELKEAISKNLLIYSRAKMISEIAKLNNSTVAIAGTHGKTTTTSMVGSILKNLNLDPTIIVGGVVKSLDSNSVLGSGDTFVVEADEYNKSLLHLNPTIAVINNIDFEHIECYKDLNDLKKTFIQFANSVPFYGKVSVCLDSENIKSIIKKIDKPLITYGVENSDVDIKAENIQQKDGKTTFNIIINNQVFKVNLSVPGKYNVYNALAAISVCFIMGIDISSACKALSGFSGVKRRFDIKSKNNVMIVDDYAHHPVEVLSVINAVKDNWNKKLTVIFQPHLFSRTKEFYKDFAKSLMKADNVMITEIFASREKNDNSITSQLIVDEMIKLKHPNVSFVPQADIVDKVKSIATNEDIFLTVGAGNIWRYSEELGKYFND

SEQ ID NO: 195176 - protein, 432 aa, Unknown
  Bacterial polypetide isolated from the Sargasso Sea
MNSNQKYFFIGIGGIGMSSIAKYFLDKGNEIMGYDRVESEIVENLSKEGVKVLDKTDVNLLPDNFKSNDVIVIYSSAISEENSYLNYYLTNKNKIYKRSEILGEITEKTFCISIAGTHGKTTTSAILTHLFYKCEESFQSFVGGILNGYETNFISTGKKYSIVEADEYDRSFLQLKPKIGIITSIEKDHLDIYGDFKSLKESFHLFSDRVSDKIFYSDQVEGFEGLSYSINLKTDYYARNISLIEKGYKFDIITPYNEFTNVEFNQIGGHNLLNAIGAFSVAHYLGLEGNKLIKALADFKGVYRRMDIFRLANKIVIDDYAHHPSEINAVLNSIKDKYNNVKAGVIFQPHLFSRTKDLLDDFAKVLSKFDEVYLLDIYPAREEPIEGVSSDVLLEKIICDKKSVLKIESINEKIESIDCEIIAVLGAGNVAN

SEQ ID NO: 195177 - protein, 488 aa, Unknown
  Bacterial polypetide isolated from the Sargasso Sea
MTKTERYLQLRSMIPEMRRIKRIHFVGIGGAGMGGIAEVLVNEGYVVSGSDIAQNAVTDRLCLLGAKIHIGHGADNVQQADVVVVSTAINPENPEIIAAKELRIPIVRRAEMLAELMRYRHGVAIAGTHGKTTTTSLIASLYGQAGRDPTFVIGGLLNSAGTNARLGTSRYLIAEADESDASFLHLQPMVSVVTNIEADHMDTYGGDFEKLKSTFVDFLHNLPFYGVAVVCIDDPVVREIMPRIGRHMITYGFSDDADVQALNFHQQGHQCRFTVRRKGKEDLDLLLNLPGQHNVLNALAAIAVATEDEIDDSAIIQALAEFQGIGRRFQHLGKFATPKGEVMLVDDYGHHPSEVAATIKAARAGWPDKRLVMAYQPHRYTRTRDLYEDFIEVLSQVDCLLLLDVYSAGEAPIPGADGRALCRSIRLRGQLDPIFIASPDQLAEVLPDVLQEGDLLLTQGAGNIGALSRQLAATELGFSTAVTTEVKP

SEQ ID NO: 195178 - protein, 381 aa, Unknown
  Bacterial polypetide isolated from the Sargasso Sea
MNCLEYTNYYFIGIGGIGMSSLAEYMLHLNKKVEGYDREKSFQSNRLNKLGIRIIFSENEQIINSNFKNSKNTLIVFTPAIDKKNKILNYFKSNNFKIVKRADLLADIVNSSFCIAIAGTHGKTTTTSILSHILYNSELKFTSFIGGVLNKYESNIMIKGSKIFIVEADEYDKTFLKIKPNIASILNIDGDHYDIYNDIDDISNSFKKFANNLKKNGILFHNSTLNYNGISFGEDSFADAKIINKKNYNDKLIFDIQYQNNVYKNIVLNMLGDHNASNAMAAFIIAISLDIESEIIIKALKTFPGIKRRFSVELKNPKIFIDDYAHHPSEIESIYNSVKSLYPNKKKLVIFQPHLFSRTRDFLREFAEALEKFDKIALIRY

SEQ ID NO: 195179 - protein, 415 aa, Unknown
  Bacterial polypetide isolated from the Sargasso Sea
KYLVQQNIDVSGYDQRKSFITNQLNQDGIKVDFNLSNLKYSKKILYIYSSAIAINETTLKNYLDSENVLSRPEFLNMLSRENTIIGVTGTHGKTSTTALLAHIFHYNERNVSYIFGGSTSFHGIGGHYGDQDQPIILETDEAFNTFKDINIDDLLVTNIDIDHIDYFKNFENLLNAFKHVIQNVKGNLVLNFDDKNLRELKTNINCISYSSKETADIQIKYPNKIIKENKEYVISTKLIGNHFISNIAGAIAVAYLNGIKIDDSLEAIKSFPGVKRRIEYLGSINGIKLYDDYGHHPTEITATITALKESTLGKLYVIFQPHRYTRTKNSFEDFKNSLSKADEAIVVDIYPAGEEPIPGVSSKNFENKNIKYLKSMRMVPSYLSTRVKKNDIILTLGAGDITLLGPQILKYLDEI

SEQ ID NO: 195180 - protein, 465 aa, Unknown
  Bacterial polypetide isolated from the Sargasso Sea
MKIKLGNKETIHFVGIGGIGMSGLAIIMKGLGFKIQGSDLSFSKNIERLKNNRIKVFLGHREKNIFNSTILVISSAIKKNNPELIKAKKKKLPIYKRGEMLGHIVSLMKNIVVAGSHGKTTTTSLISSIFSFSKIDPTVINGGVLNSYGNSAKLGKSNWCILESDESDGSFLDIPVTYSIVTNIDAEHLDYHKSLDKLKESFVKFLNKTPSFGKSFICIDDPEIKSISNKIKNKNFLTYGLDKSANFRIENVINNKNYSQFNLSINLPGQKKDYIKKLKLPIIGLHNIRNAAASAAVCYLIGISNRMIKSGLKNFQGVQRRFNNLFSYRNISFIDDYAHHPSEISCVLTSLREVYREKEIVCIFQPHRVSRLNSLKDEFTKCFRHSDYLILCPVFKAGENIKLNFNYKNFAKQIIKNSKVNLVIVNEEKDILKYVKQNIFGNKIVIGMGAGSISNWMRSLEHKLK

SEQ ID NO: 195181 - protein, 471 aa, Unknown
  Bacterial polypetide isolated from the Sargasso Sea
MRRVERIHFVGIGGAGMGGIAEVLVNEGYKVSGSDIAPNPVVDRLAALGACIVIGHKAENIEGASVVVVSSAIKTDNPEVAAAIEHRIPVVRRAEMLAELMRFRHGIAIAGTHGKTTTTSLIASIFAEAGTDPTFVIGGLLNSAGTNARLGAGRYLIAEADESDASFLHLQPMASVITNIEPDHMETYQGDFDKMKATYLEFCHNLPFYGVAVMCIDDAVVRELIPQIGRFVITYGFSEDADYVISDFGQTGTQSHFVITDKNGVASQIELNLAGRHNALNATAAFAVAKDEGIATDSILAALKKFEGIGRRFEQYGEFETGRGKVLLVDDYGHHPSEVAATLAAARNAWPERRIVMAYQPHRYTRTRDLYEDFAKVLSSVDLLLLLEVYAAGEAAIPGADSRSLCRSIRARGQLDPIYVASLADLPAALADVLQDGDVLLTQGAGNIGALAKQLAAAKLAISALKPNEGA

SEQ ID NO: 195182 - protein, 371 aa, Unknown
  Bacterial polypetide isolated from the Sargasso Sea
MNLKIKTKLPLDLGKMHFIGIGGIGMSGIAEIIYNLGYKVSGSDLKYTPIINRLIKMGIDVKIGHDSKNIDAAEIIVISSAISSENLELKEARRKKIPVIRRSEILAELMRLKSNIAIAGTHGKTTTTSMVAAVLESGMFDPTVVNGGIIQDYGSNARLGDGDWMIVEADESDGTLIEIPSTISIITNLDPEHLDHYGTFSALKKTFLEFLNSIPFYGVAICFIDHPEVKNLISKVKDRNVLTYGYSSEADFQIKNLEYKKNKAFFQIFKKQNEENIEFELPMYGDHNVANAAAAITVALYLKIPIENIKKGLKNFKGVKRRFTKVCNWNGIDIIDDYAHHPVEILAVLSAARKYTSGRVIAIHQPHRYTR

SEQ ID NO: 195183 - protein, 464 aa, Unknown
  Bacterial polypetide isolated from the Sargasso Sea
MKFFKKVKHIHFVGIGGAGMIGIAKVLLKKGYKISGSDISDSRELRKLEKHGAKVFIGHSSKNIKGADLLVISSAISSRNPELVQAKKDFITSIPRAEMLGSIMIGYESIAVAGSHGKTTTTSMIAKILSVANLSPTYVVGGKVLSTDENSDLGEGKYIVAEADESDGSFVHLQPDVAVLTNIDDDHLAHFNNIFENLLDSFVLFSENVPFYGYLIINGDDKNIKKISKRISRSQVTFGESKDCDYKIIKIISKNGKQDFQIFDKKTRKVHKFKINLPGKHNVFNATAAIAVALEEGISISSIRNGIKEFTGVGRRYEKHDIKIDDKSLTLIDDYGHHPLEIESNIKAYKEEYKNKKVCMIFQPHRFSRTAQLFDDFIKVLKQTDSLIMLDIYSASEKPIKGINSRRIVETLKQNGHKDVTYLKKHDDVIDLIKKKKDDFDILVTQGAGSVSNICQIIKNQWEK

SEQ ID NO: 195184 - protein, 416 aa, Unknown
  Bacterial polypetide isolated from the Sargasso Sea
MKLFKKVKKIHFVGIGGAGMIGIARVLLKKGYKISGSDVVDSSDLEKLRKDGAKVFIGHKKENIKDSNLLVVSSAIDKNNPELVHAKRQSITTIPRAEMLGSIMIGYESIAIAGSHGKTTTTSMIAKIISKAGLSPTYVVGGKVLSTDENSDLGEGKYIVVEADESDGTFTHLQPDVAVLTNIDDDHLVHYNNIFDNLLDSFVMFAENVPFYGYLAINGDDVNIKKISKKISRAQVKFGESKGCHYQITKISSNKGKQSFEIFDAKNNKNHKFKLNLPGKHNVFNAAAAIAVSMEEGISLGAIKSGIQEFSGVRRRYEKHDLIINQKELTLIDDYGHHPLEIESNINAYKEEYPNKKVCMIFQPHRFSRTAQLFDDFVRVLSKTDLLILLDIYSASEKPIRGIHSRTISETIKQKG

SEQ ID NO: 195185 - protein, 287 aa, Unknown
  Bacterial polypetide isolated from the Sargasso Sea
MNKLNKIKIHFVGIGGIGMSGIAELMFDLGYNVQGSDISLNTNIKRLKKRGIKIYNTHKKNNIHNMSAIVISSAIKINNPELQECRRLSIPVITRADMLGELMKLKRSIAIAGSHGKTTTTSLVGSIFDNAKFDPTIVNGGIINSYSNNNRYGKSDWMIVEADESDGSFLRLPHEINIITNIDIEHLDYYKSSQNLFLAFEKFINNLPFYGYSVICTENINTQKIYKKIKTRKIISYSQNENSDVRIIKIEKDKKGSNFTLLFKKGIIKGINGKYNFKTNLWEITIY

SEQ ID NO: 195186 - protein, 378 aa, Unknown
  Bacterial polypetide isolated from the Sargasso Sea
MQINSKIHFIGISGIGMSGIAELMLDKGYSIQGSDISENDNTKRLKKKGIKFFLGHNKKNIKNAHAIVYSSAIKKNNPEIREAYIKKIPVLSRADMLSELMKNKKSIAIAGSHGKTTTTSLVGNIFNEAGLDPTIVNGGIINSFSNNNRYGKGEWMIVEADESDGTFLKLPHQISIITNLDIEHMDFYKSKKNLINAFEKFINLLPFYGTTIMCYDDKNLKLLINKIKTRNILTYSIKNKKADVLIFDIIQNKLKTSFKLKIKNKIIHSSNYKFTINAIGSHNILNATASIIAAKLNGIKNKDINNALINYVGVKRRFSFIGKKNKSFVYDDYAHHPTEIAATLSAAKSLKNKVIVVFQPHRYTRTKILIKRVYKSFI

SEQ ID NO: 195187 - protein, 353 aa, Unknown
  Bacterial polypetide isolated from the Sargasso Sea
ITLIPRAEMLATIMRGFQSIAVAGSHGKTTTTSLIAHIFTKAELDPTYIIGGRILGMEDKSILGSSDYIVVEADESDASFLHLNPEISVLTNIDNDHLDFYENNPKKISDTFLKFLEKLPFFGVGIICTDDPKSKKLYQKLSRRKISFGFERTSDFSIKNYKQTKTHQEFILKDNIKKFEFDIKLKIPGKHNALNATAAFIVAQQAGIQTNVIKNSLKNFSGVSRRFEEKGTVKINGKEVLVVDDYGHHPTEIKSTIQAAKSKYKGKPINMIFQPHRYSRSSILFKEFISVLSDTDSVQLMDIYAAGEANTSGISSYDFVDSLLRRNIDAKYAKNLNQIRKNLNESIKKDSIL

SEQ ID NO: 195188 - protein, 467 aa, Unknown
  Bacterial polypetide isolated from the Sargasso Sea
MSRPLERQHPVHFIGVGGIGMSALAKILVDRGHPVSGSDPRVTPTSHQLMQLGVTVVHEQTAATIETLLSDGRRPIVVVSTAIPTSNPELRRAGDAGLEIWHRSDLLAALIDQQASIAVAGSHGKTTTSTLITTLLMEAEEDPTAIIGGIVPCLGSNGHAGQGRLLVAEADESDGSLVKFRPQLGLITNLELDHTDHYDGLDDLISTMRRFADGCDQVLANHDCLILREHIQPDAWWSVTTANGVDFAALPLQLDGDRCHARFYENGAPVGDFMLPLPGLHNLSNAAGALAACRMEGVPFERLVKGLTALKPPGRRFDLRGTWEGRHIVDDYAHHPSEVKATLAMAQLMVSSGRSPLPSPPQRLLAVFQPHRFSRTQEFLESFASALQNCDSLLLAPVYSAGEEPLKGVCSQTLADRIQELKPDLEIAVADNLDHLTQLVRTRSQREDLVLAMGAGDVNGLWPRLSA

SEQ ID NO: 195189 - protein, 436 aa, Unknown
  Bacterial polypetide isolated from the Sargasso Sea
MNKYKEVYILGIGGSGMSSIAKYLVQQNIDVAGYDQRKSFITNQLNQDGIKVDFNLSNLKYSKKILYIYSSAISINETTLKDYLDSDNVLSRPEFLNILSKENKIIGITGTHGKTSTTALLAHIFHYNERNVSYIFGGITSFHGIGGHYGDQDQPIILETDEAFNTFKDINIDDLLVTNIDVDHLDYFKNFKNLLNAFKHVIENVKGNLVLNFDDQNLRELKTSNNCISYSSSEIADIQIQYPNKIIIENEEYVVTTKLIGNHFISNIAGAIALAYLNGIKIEDSIEAVETFPGVKRRTEYLGSIKGIKLYDDYGHHPTEIAATISALKENTIGKLYVIFQPHRYTRTKNGFEDFRASLSKADETIVVDIYPAGEQPIPGISSKNFENKKIKYLKSMRMVPRYLSTRVTENDIVLTLGAGDITLLGPQILKYLDEI

SEQ ID NO: 195190 - protein, 213 aa, Unknown
  Bacterial polypetide isolated from the Sargasso Sea
YHLKDLKSSFNLKSESENLDLSLNMLGRHNALNAAAASVLCIQEGIPTEVINSSLKNFMGINRRMQVLGELSINQSNCILVDDYGHHPTEIKLTIDSIRESFPEREINMIFQPHRYTRTKDLFTEFANVLTQVDNLFLLDIYSAGENPIEGVSSEELMNKILDLGFNKVRIFKTGNEIIKSVKNLISNDSVLIMQGAGNISEITSEIKENYLD

SEQ ID NO: 195191 - protein, 140 aa, Unknown
  Bacterial polypetide isolated from the Sargasso Sea
MNHSKYKLNNIHFVGIGGSGMSGIAEVLNNLGYKVSGSDSATSSNTQRLEGKGIKIYYEHKSSNLEGVEMLVKSTAVPEDNVEIKEARDRFIPVLARAEMLSSLMNNKKGIAVAGTHGKTTTTSLVASIMSDAGLDPTLS

SEQ ID NO: 195192 - protein, 107 aa, Unknown
  Bacterial polypetide isolated from the Sargasso Sea
MRRIRRIHFVGIGGVGMCGIAEVLLNLGYEVSGSDLKASAVTERLESFGAKIFIGHAAENAEQADVLVVSSAVNTSNPEVATALERRIPVVPRAEMLAELMRYRHGI

SEQ ID NO: 195193 - protein, 464 aa, Unknown
  Bacterial polypetide isolated from the Sargasso Sea
MQQFKKIRNIHFIGIGGSGMIGIATILHKKGYNISGSDISKTKDLDELAKSGVDVTYSHKSKNINNKDLIVLSSAIDSSNVEVSSAKKKNIPIIPRAEMLSGISRGYQGIAVAGSHGKTTTTSLIAHIFNQALLSPTYVIGGKILSSDGNSRLGDGNFFIFEADESDKSFLSFYPDSAVITNIDDDHLEAYEGNINNLKESFLDFSDNIPFFGYVIANYDDKNTRDILKKIKRRVITFGLNKKSDITVSEINYFFDYVDFKIYIKDTNKKHKFRLSLQGKYNIYNAVAAIAVAIEEGISIQTIRAALKSFSGVERRLERFKLIIKNKQVTHIDDYGHHPKEIEQVIVSLRRHFKKKKVLMIFQPHRFSRTKMLFKDFISTLSKVDKVFLLPIYSASEKEIKGVSSKNMAQKLNTINGKDFCSLVKHENVNDMVEQCIDKYDVVITQGAGNVSMVSKGLIKKWKI

SEQ ID NO: 195194 - protein, 468 aa, Unknown
  Bacterial polypetide isolated from the Sargasso Sea
MDKKLLLKSHFHFIGIGGIGMSALAIGLLKKGCSVSGSDLVKNDETKKLEKLGAVIFTSQIRQNIDFVISKFTNKLINFVVSSAIKPENEEFLYCREKNLSIKHRSEILAMLMRTYTTLAVAGSHGKTSTSTFLSTILELCTRNSSSITGGIIPIYNSNCHLENTKFLVAEVDESDGTINKYNSDIGIINNIDYDHCDHFSNLSEVISSFKSFAKNSKKLLLNFDCEFSRNNFYSNCNWSNTTAKNVAYAIIPTEINSKYTIGKYYENENFISSLNIPIPGLHNLSNITAAIAASRMIGVDFLEIKKNIKYLKLPKKRFEFRGQIDARSLYDDYAHHPNEIKETIKLGRLFLQQKHNNICQKSRLIAIFQPHRYSRVKQFHEEFAEELSKADVIYVTSIYGAGEGNEDKITSKIITDLIYKKNKNVSYINNYYEVTKNFFELTQKGDLILNMGAGDCHNLWSILKEKN

SEQ ID NO: 195195 - protein, 465 aa, Unknown
  Bacterial polypetide isolated from the Sargasso Sea
MKIKLAKSELIHFVGIGGIGMSGLAIIMKELGFKVQGSDISTNKNIDRVKQKNIKIYIGHKKQNINKSTILVISSAIKKNNPEVLFAKKKKIPIYTRGEMLANVVSLMKNVVVAGSHGKTTTTSLISNIFSHAKIDPTVINGGVLNSFSGSARLGKSDWCILESDESDGSFTKIPPTYSIVTNIDKEHLDYYKSLEILKKNFVKFIEKIPSFGKVFICLDDKINKQVIKKIRNLNYSTYGTNKLSNFKILNISQNENYSKFNIKISLPGSKEKLIKNIKVPLIGLHNIRNSTAAAAVAFSIGIPIKIIKNGLEKFSGVQRRFTKIFSFQNVPFFDDYAHHPTEITEVLDGVREVYKNKEIICIFQPHRISRLKNLHEEFSKSFKKADTVILCPIFKAGENIKLPFSYNYFAKKIIKKSNVKLILINNNLDLVKYVKQNVYGNKIVIGMGAGSISNWIRDLPNYIK

SEQ ID NO: 195196 - protein, 462 aa, Unknown
  Bacterial polypetide isolated from the Sargasso Sea
MKLSKIKNIHFIGIGGVGMVGIAEMLLNQGFSVSGSDLVENKNTERLKYLGAKIFIGHNEKNVRDSDVVVYSTAVTESNPEMRSARSLNKTIIARAEMLSSLMRGFQSIAVAGSHGKTTTTSLIANIFIKANLDPTYIIGGRILGQEDKSILGSSEYLIVEADESDASFLHLSPEISVITNVDNDHLDFYENNIEKLNETFHQFLENLPFYGTAIICIDEKKGEKLFNDLSRPKISYGFNKSADYYLKDLKQTSSFQEFTLVRNSVGKEVRLQLKIAGRHNALNATAAYIVAKEAGIATKIIRDSLKSFGGVSRRLEFKGDLKINDKKIKLLDDYGHHPTEISATVEAIKSSYKNKKINMIFQPHRYSRSSILFNDFVDCLGSLDRIIILDIYSAGEQNTEGISSYDFVNSLIKKGNKAFFAKNLKEISKILESEVKNNEILITQGAGNIVDISNSLLAMYK

SEQ ID NO: 195197 - protein, 383 aa, Unknown
  Bacterial polypetide isolated from the Sargasso Sea
MKIKLAKSEIIHFVGIGGIGMSGLSLIMKGKGFKVQGSDISSNKNIDRLKKEKIKIYIGHKKQNINEATILVISSAIKKNNPELLEAKKRQLPIYKRGEMLANIVSLTKNIVVVGSHGKTTTTSLIASIFQETKLDPTIINGGVINSINNSAKLGKSEWSILEADESDGSFVYIPPTYSIITNIDREHMDYYTTMDKLNKYFIKFVNKVPSFGKSFICLDDKNNKNLIKSINNKNFYTYGLDINSNFCIKNIKQLRQSAEFDLKIKLPNKKNQLIKTLKIPLIGKHNIKNSVAAAALALTVGLPIKNIKKGLKNFKGVQRRFNKIFSFNNVDFFDDYAHHPTEIREVLDGVNNVYERYEKICIFQPHRISRLKELKKRVYVCI

SEQ ID NO: 195198 - protein, 254 aa, Unknown
  Bacterial polypetide isolated from the Sargasso Sea
MNPSKFALNNIHFVGIGGSGMSGIAEVLFNLGYKITGSDKTESDITNRLSNMGIDIAYKHTSSNLKNAEMLVVSSAISENNPEIQEAKRNSIPILARAEMLSSLMNTKRGIAIAGTHGKTSTTSMIASIMSEANLDPTFINGGIINSFNSNAQLGKGEYLIAEADESDQSFLLLQPSMSIITNIESDHLVNYQNSFENLKLAFLDFIKKLPFNGMAIVCGDDPVIKELIPEFSRPYITYGFNQYNDYVLSKLSF

SEQ ID NO: 195199 - protein, 467 aa, Unknown
  Bacterial polypetide isolated from the Sargasso Sea
MKHIVKHIHFVGIGGVGMSGIAEVLVNLGYQVSGSDLSSNAITDRLAALGARIAIGHAAENIEGANAVVVSTAVRSDNPEVLAARHRRIPIVPRAVMLAELMRLKQGIAIAGTHGKTTTTSLVASVLAAGGLDPTFVIGGRLISAGANARLGTGDFIVAEADESDASFLNLFPVIEVITNIDADHMDTYGHDFARLKQAFIEFTHRLPFYGIAVLCVDDPNVKEILPFVSKPIIRYGFAPDAQVRAVNVEARGGKMHFTAMREDAAPLDIVLNLPGEHNVQNALAAIAIATELEVKDADIQRALADFNGVGRRFQRYGEVPVVSEGKAAGTYTLVDDYGHHPVEMAATVAAARGAFPGRRLVLAFQPHRFTRTRDCFEDFVKVLSTVDALVLTEVYSAGEAPIVAADGRALARALRVTGKVEPVFVDTVDEVPDALSAVVRDGDVVITMGAGSIGGVPGRLAQETKV

SEQ ID NO: 195200 - protein, 377 aa, Unknown
  Bacterial polypetide isolated from the Sargasso Sea
EFIKAKNLNIPIYSRAQILAEVMQKKKSICISGTHGKTSCTSMISWILSYDTKKPTTLIGGIDYSFNSNLQIGDSDWMVVEADESDKTFLALPSDISVVTNIDDDHMENYGTMKNVEQSFLNFANNINEGGYFLYFKDNPIASKVFSHSKSNNIISYGTDKHSDVVIKNIEKLPFGHNFELSGFINGKKYNLKLQINRPGIYNVWNSTAAVVIGLLHGIAEEKIIYQLAKYRGVYRRFSSIIEKSGIRYYDDYAHHPTEINQLLMSAKEQAENKVIMIFQPHRYSRTLSLYDSLCNSFKYADCLGILPIYAAGEEFENMFDYWKFAEDIKKKSNTDTYILSRSEISKFLKNITKEGDIVLFVGAGDINEISKVIVKK

SEQ ID NO: 195201 - protein, 333 aa, Unknown
  Bacterial polypetide isolated from the Sargasso Sea
GLASVKALINSGAVVWAWDDNPAGREQIEPLGLAPINLAECDWTEPDMLVISPGIPSTFPTPHPAAEKARRAGKPIICDVELLCTAQPDVPTLAITGTNGKSTTTALTAHIISQAGIKTQAGGNLGNAALGLEPSTADDCLVLELSSYQLDLLEHAAFDACALLNITPDHLDRHGGMDGYIGAKRQIFARNKGPKWAIISVDDEPCAKMAVELAREGGRHIIEVSVKSPVDHGIYVDEKGWLIDDLTGAKTPILDLATVTHMPGKHNWQNIAFAYGLCRARGVDATRIIDGIMTFPGLAHRQERLGTIDNVIFVNDSKATNAEASAKALSAYQ

SEQ ID NO: 195202 - protein, 318 aa, Unknown
  Bacterial polypetide isolated from the Sargasso Sea
RDRGCRVVGEVELAWEAMSGIPWIGITGTNGKTTVTSLVAHLLQQGGLDAPACGNIGASAAELALACLEGERPERVVVELSSYQIEAAPSVRPSIGVWTTLTPDHLDRHGTLERYRSIKAGLLHQCQRQFLNADDSDLHAHAAEWPQALWVSGGDKSSFIGGMRPHLWVSEGHLCSTQGPLFPCAALAMPGAHNRQNLALATAVALECGLNAAQIEAGCRSFPGVPHRLERIRELGGIAYYNDSKATNYDASLVALQSLERPLVVLAGGRAKRGEPGAWLEALSQKAAAVVLFGEARPTFQELLGSTGYPGVIEQQEH

SEQ ID NO: 195203 - protein, 264 aa, Unknown
  Bacterial polypetide isolated from the Sargasso Sea
RWCARHGCRLRVADTREVPPNLSALEAHSVDAEFVGGPFSLSLLEGVELVAISPGLSPLAADLLPLISAAREQDIPVWGELEFFAQALKTLGESGYAPKVIAITGTNGKTTTTSLTGLLCERAGKKVAVAGNISPAALDKLSEAIDNTALPDVWVLELSSFQLETAHTFSPDAAVVLNITQDHLDWHGGLDAYAAAKGRIFGPQTVRVLNRDDSRVMALAPAADSDAAMITFGVTEPKNDGDYGLLRENGMIWLVEAHDLDASD

SEQ ID NO: 195204 - protein, 172 aa, Unknown
  Bacterial polypetide isolated from the Sargasso Sea
MADDVELYVLELSSFQLETTDQLNAEVATCLNISEDHMDRYSGLPAYHLAKHRIFRGARQVVINRDDALSRPLIADQVSCWEFGLGKPDFKRFGLLDENGEKSLAFRFEALLPVSELKIRGAHNQSNALAALALGHAVGLPMDAMLATLRQFAGLPHRCQWVGERAGVSYYD

SEQ ID NO: 195205 - protein, 164 aa, Unknown
  Bacterial polypetide isolated from the Sargasso Sea
MALAVDIDLDVIRSALTDFSGLPHRCQWVRDISGIGFYNDSKGTNVGATMAAIEGLGQRITGHVVLIAGGVAKGADFSSLVPVLNRWAKGLVLIGQDAEAVASSFHRDISTNFAIDMQDAVAIAKKKASPGDVVLLSPACASFDMFRDFQHRGQEFIDSVENLS

SEQ ID NO: 195206 - protein, 284 aa, Unknown
  Bacterial polypetide isolated from the Sargasso Sea
DAVIVGLGKTGLSCFRYLFNQGLNIAITDSRLEPPELSKLKKEFKTASIYLGEISEKVLLASDQIILSPGVSLNNKSIRLPIKKSIPVIGDIELFCQKAQAPIIAVTGSNGKSTVTTIVAEMTRLAGLKTLIGGNIGVPALDLLSKNIPDLYVLELSSFQLETTFSLDAHASVLLNISPDHMDRYSSLKEYVNIKKRIYSGQGLMILNKDDEYINSMIDKKRKNIFFTLGSPDGDNFGLVNYENEIWLSRGSEKIIERNELGIKGEHNISNALAAMALAHTVNV

SEQ ID NO: 195207 - protein, 264 aa, Unknown
  Bacterial polypetide isolated from the Sargasso Sea
FQIGITGTNGKSTCCYHLHQLLEESQLVGNIGAPVLDNINSCRYSIVELSSFQLEKMKEIQLDLGVLLNISPDHIDHHASFEEYKKVKNRIKESKKTTEESNPKKLWSMITGRPRRLVQDIELKDLPHRHQLIPTNDHMVFINDSKATNLNALQFALNKMSNPYVLILCGDPDKERYESYEIEGPTRVYIFGNHAEEISKKIFHPKKILFHNQGLSSVMRSILKEKYDFQTHILFSPGHPSGQDYKNFEERGDHFIKLAMSSND

SEQ ID NO: 195208 - protein, 267 aa, Unknown
  Bacterial polypetide isolated from the Sargasso Sea
DHLDRYNNKLENYVDAKFKIISNQKSSDYFIYSGDCSITTNKINNINSIASAISLHTSNNKNQQNNYLIHNKNKIKSSINNNENMIDITKSSLLGLHNVKNSMAAIAVSEILNISNKKIIESLKTFQNVEHRLEHFLTINKVKYVNDSKATNVNATFYALNSFKKPIVWIVGGVDKGNDYSQLVPLVKSNVTAIICLGSDNDKIISTFSKHCSLIVSTNKMVDAVKSAYDISKQGDIVLLSPACASFDLFENFEQRGNLFKDQVRKL

SEQ ID NO: 195209 - protein, 496 aa, Unknown
  Bacterial polypetide isolated from the Sargasso Sea
MVLVLGLGESGLAIARWCARHGCRLRIADTREAPPNLAALQAEGIDAEFVGGAFTPALLDGGVELVGLSPGLSPLEPALAALVAAANERGIAVWGELEFFAQALRALGTSGYQPKVLAITGTNGKTTTTSLTGLLCQRSGKKVAVAGNISPAMLDRLAGAIDETALPDVWVLELSSFQLETARTFAPDAAAILNITQDHLDWHGSFDAYAQAKGRIFGATTTRVLNRDDAAVMKFAPAAGAADAPRTVTFGLNEPVQDGDYGLSRDNGIAWLVEAVDRDAPDETATTTRRRKRDAAHTPDIAQKRLMPADALRIRGLHNAANALAAFALARAIDLPAAPLLHALREYRGEAHRVEVIATIDDVDYVDDSKGTNVGATVAALDGLAQKIVLIAGGDGKGQDFAPLVAPVARWCRAVMLIGRDAPAIRDTLAETGVPLADHATLEGAVHAAAELAEPGDAVLLSPACASLDMFRNYAHRADVFRAAVDEIAIDKGATP

SEQ ID NO: 195210 - protein, 190 aa, Unknown
  Bacterial polypetide isolated from the Sargasso Sea
MPADALRIRGLHNAANALAAYALARAIGLPGAPLLHGLREYRGEPHRVELIASIEGIDYVDDSKGTNVGATVAALDGLAQRAVLIAGGDGKGQDFEPLAAPVMRWCRAVMLIGRDAPQIRAALEDTGIAMTDHATLEEATRAATALAQPGDAVLLSPACASFDMFKGYAHRAAVFRSTVEEIAAERGTMI

SEQ ID NO: 195211 - protein, 439 aa, Unknown
  Bacterial polypetide isolated from the Sargasso Sea
MQSQYSHIVLGLGATGLSVVRYLCGKGITPLVMDSRRQPPGADTLASAFPEVQLIAGGFDCRYLVQATQIIISPGIAIDTPEVRAALDMGIEVIGDVELFAREIADRKPCVIGITGSNGKSTVTTLVGEMLREAGMAVAVGGNIGIPALDLLTENADIFVLELSSFQLETTHSLNCVASTCLNVTEDHMDRYSDMDAYRKAKLRLYHQSRSIIFNRDDALTIPTEPMNQNSFGLAPPEGDEWGICDSKIYHGHSEIMPITEVSLIGSHNHANLLAAMALVYAVGVDKQVMAKVARTFTGLSHRCEVVGVKAGVTYVNDSKATNVGATVAALDGLSDHLGDIILIAGGDGKGADFSPLVEPLTKVTHLITLGRDGNKIAALKEGAIKVDSMAAAVAKAAELATSGDIVLLSPACASLDMYSNFMARGDDFRSQVEQLDGE

SEQ ID NO: 195212 - protein, 443 aa, Unknown
  Bacterial polypetide isolated from the Sargasso Sea
MIKNVTILGAGESGFGAAMLASKKGFNVFVSDFNYIDDNIKLLFEDHSIKYEENKHSIDKIQSSDLIIKSPGIPNSSDIIIKIKSLEIPIISEIEFASSNSNSFKICITGTNGKTTTTNLIYNILEAAGLSVGIAGNVGDSFSKMLLSGDKDIYVLEISSFQLDDIKDFKPNISVITNVLEDHLDRYDFDFSKYIDAKMKIISNQDNSDYLIYNSDDKQLVEALDRDNSTVKRISYGIQNQNKNVISNKKNILSNKKKTIMINTEELALKGRHNLLNAMAALTVSDLLKIENEIIRESLMSFSGLPHRLENFLKIQGVNYINDSKATNVNAAYFALDSMTSPTVWIAGGVDKGNDYSELLPIVREKVKAIICLGIDNTKLLETFKPISEIIVETESIDEAVKIASKIAEKKDNVLLSPACASFDLFENYEDRGNQFKQAVRNL

SEQ ID NO: 195213 - protein, 345 aa, Unknown
  Bacterial polypetide isolated from the Sargasso Sea
TKAVTIGITGSNGKTTTTMLTYHLLKQGGLNVGLAGNIGKSFAWQVAEDKVDVYVLELSSFQLDGIQTFKPHIAVITNISPDHLDRYNYDYGLYIEAKFRITMNQNEDDYLIYDNEDEAISFWLKNNKTKAKKIPFSLTTKLEEGSYLENKTLINITNNKQINMPTSNLSLDGMHNVKNAMAATTVAQLMNIRKQTIRESLSNFQGVEHRLEKVLKIENVQYINDSKATNVNATFFALESMETPTVWIVGGVDKGNDYTELMSLVNEKVKAIVCLGVDNKKIIDSFNNIVDIMVETSSMEQAVKVAQKLAEKGDTVLLSPACASFDLFENYEDRGNKFKSAVRGL

SEQ ID NO: 195214 - protein, 344 aa, Unknown
  Bacterial polypetide isolated from the Sargasso Sea
MKSLIYGYGKTGKSFARFLESKKYKFDIYDDNLPKYSKKIDLKKYNQILCSPGVPKNIFEKIRNINKNVLTDLDIFFQEDTSIKIGITGTNRKSTTAFHLYQLFEKFEPANLIGNIGNPMLDCINTKKYSIIELSSFQLDKMITNKLDFGILLNIQTDHLDYHGSFESYKIAKERILDAKKSISFEDNPYDLFEWITGQKSSEINLKNLPYRLQHISKNIINDSKSTNYHSLYYAVKRANEIFLNNGYVLIVCGSPKKEEFRKINIKGPDQIYIFGKHAKEINKCIKNNNKKVFIELSDVVNHLNKHNQKNILFSPGYPSGDDFSNFEERGVAFNKIIGNLNEN

SEQ ID NO: 195215 - protein, 439 aa, Unknown
  Bacterial polypetide isolated from the Sargasso Sea
MQSHYSHIVLGLGATGLSVVRYLCGKGITPLVMDSRRQPPGAETLASSFPEVQLIAGGFDCRYLVQATQIIISPGIAIDTPEVRAALDMGIEVIGDIELFAREIADRKPCVIGITGSNGKTTVTTLVGEMLREAGIAVAVGGNIGTPALDLLQENADIFVLELSSFQLETTHSLNCVASTCLNVTEDHMDRYSDMDAYRKAKLRLYHQSRSIIFNRDDALTIPTEPMNQNSFGLAPPEGDEWGICDSKIYHGHSEIMPITEVSLIGSHNHANLLAAMALVYAVGVDKQVMAKVARTFTGLSHRCEVVGVKGGVTYVNDSKATNVGATVAALDGLSDHLGDIILIAGGDGKGADFSPLAEPLTKVTHLITLGRDGNKIAALKEGAIKVDSMAAAVAKAAQLATSGDIVLLSPACASLDMYSNFMARGDDFRSQVEQLDGE

SEQ ID NO: 195216 - protein, 249 aa, Unknown
  Bacterial polypetide isolated from the Sargasso Sea
RWGFAVSRRQLRVYENARACIVNADDALTMPVRGADDRCISFGVDVGDYHLNRQQGETWLRVKGEKVLNVKEMKISGQHNYSNALAALALADAAGLPRASSLKALTTFTGLAHRFQLVLEHNGVRWINDSKATNVGSTEAALNGLHLDGTLYLLLGGDGKSADFTPLSRYLTGDNVRLYCFGRDGAQLAALRPDVAVQTETMEQAMRQIAPQVVAGDMVLLSPACASLDQFKNFEQRGDIFARLAKELG

SEQ ID NO: 195217 - protein, 441 aa, Unknown
  Bacterial polypetide isolated from the Sargasso Sea
MNAKLFQGKRVAVIGLGLSGLATVRFLLKQGVKPVLMDTRLKVSELEQIPVDKVDGIYLGELDANRLAHMDVLVVSPGLDPKHPAIRFALAQGAHLIGDVELFALQNQKPVLAITGANGKSTVTSLTAHMLQCSGLHAIAAGNIGLPILDALQSDADVFVLELSSFQLDTTHSLKSKAACILNVTEDHMDRYGTMAAYAASKQRVYQGTDLAIYNKADGLTTPKTPVPALALDLAGSDYGVVQYQGESWLLVQGEPLMPVRDMTIVGLHNQFNALASCALALAAGASREGLVKALQTFTSLPHRCQLVLDHKAVRWVNDSKATNVGATLAAIAGLRPEVSGKLILIAGGDGKGADFSELATVLNNDVDHLITLGQDGPAIAALKAGSFEVKDLMAAVKTAAQLATANDLVLLSPACASLDMFKNYEDRGQQFAAAVQKVWL

SEQ ID NO: 195218 - protein, 353 aa, Unknown
  Bacterial polypetide isolated from the Sargasso Sea
MKALIFGYGVTGQSIERYLKKKGKAYEIYDQNVKGPNIFNKLPNQKKLDSYETVYLSPGINIKKIYANGEFNKIPYLTDIDIFFKEDNSYKIGITGTNGKSTCCYHLHQLLEESQLVGNIGAPVLDNINSCRYSIIELSSFQLEKIKEIHLDFGVLLNISPDHIDHHVNFEEYKKVKNKIKESKKTTEESDPRKLWSMITGRPQRLVQDIQLKDLPHRHQYIVTRDQMVFINDSKATNLSALKFALNKMSNPYVLILCGDPYKEQYESYEIDGPTKVYIFGNHAEEISRKIFHPEKILFHNQGLSSVMRSIFKEHYDSQTHILFSPGHPSGQDYQNFEERGDHFIKLAMSSND

SEQ ID NO: 195219 - protein, 176 aa, Unknown
  Bacterial polypetide isolated from the Sargasso Sea
MVIIIGLGKTGLSCVDYFLGRGVTPLVMDTRANPPGRDQLPAEVELIHGLDGELLKQAHMIVASPGIALATPELQAAAEFGVRIVGDIELFVRETQVPVIAITGSNGKSTVTTLVGEMIAEAGLKVGVGGNIGTPALELLKQPMDLCVLELSSFQLETTHSLRAAASVVLNLSEDH

SEQ ID NO: 195220 - protein, 431 aa, Unknown
  Bacterial polypetide isolated from the Sargasso Sea
MNKIPAIIGLGKTGISLAKYLSKSNNTLFIYESSLNSQSLKELKGIDIDFVLNPELSDNIFNSISVIYPSPGISKDHEIFKYAKDFNIPVQTDMDIYLNSSSSFKILITGTNGKTTTACMLEHLLKEHLKDMSVEVMGNIGKPVLDFLDKKIDVAIIEISSFQIESCSKLNSDIGILLNIEEDHMDRHKSFKIYRSIKRRVLAESNINISYKEQQIKGNKFYDFEDFFSEFDFSNNSALKNWPTHDISNLKAALLASALTIKHIEENEVPDLNNFLSKSLERMSSFNKKAHRFEMIEDEEGVLHINDSKATNFSATVQSIESSSNLNKEGDIYLLCGGDFKSQSIDKVKATIFNDIKKCFIFGKDKKILEELLSDFTDCICCDSLDDGYFLAKQESTNGDIILLSPACASIDMFKDYQDRGNRFKELMKLN

SEQ ID NO: 195221 - protein, 188 aa, Unknown
  Bacterial polypetide isolated from the Sargasso Sea
MKKLSYSGSGVSINKGNQFVSQIKKFIKKDKYLKKSNIGGFSGQFVLDPKIKKPILVGAADGVGTKIEIANMMNNHRTIGIDLVAMCVNDLIVDQAKPLFFLDYISTGRLDLKKGSQIIKGIIEGCKKSNCSLLGGETAEHPGIESNDRYDLAGFCVGVKSGLKNFNSKLKQNDIIIGIKSSGLHSMG

SEQ ID NO: 195222 - protein, 278 aa, Unknown
  Bacterial polypetide isolated from the Sargasso Sea
TDGVGTKIEIANQLNKFNTIGIDLVAMCVNDLIVQGAKPLLFLDYISVERINSIKLKNIIKGIIKGCKLADCELVGGETAEMPGTYSKGKFDIAGFSLGLVEKDKILINKIKEKDLVVAVPSSGLHSNGFSLIRHIIKKNKINLKKNSFLKKELLVPTKIYVMHILELINRKYLNACANITGGGLEDNIKRIIPNKLCAEINLEKIKILNIFRWLKNEGIKEKEMLKTFNCGVGFCLIIKPNQYNKIIKFFPQKYKPYVIGKIIKNSKKVKFNGRISW

SEQ ID NO: 195223 - protein, 268 aa, Unknown
  Bacterial polypetide isolated from the Sargasso Sea
MPNENFGKQGGISYRDAGVDINAGSKLVDRIGPIVKATQNTDLQLSSIGGFAALTQLPAHYKQPVLVSGTDGVGTKLELAEKFGRHETIGQDLVAMCVNDVLVCGGEPLIFLDYFATGKLDIDLAAEVIKGIAKGCQMALCSLVGGETAEMPGFYQGSQYDLAGFCVGIVEKDKIINGAEITKGDKIIGLPSSGPHSNGFSLIRKILELKEIESSDLIDEMMNPTKIYVRSVLALLQKIKVKGMVHITGGGFYENIRRILPSPHLSAN

SEQ ID NO: 195224 - protein, 222 aa, Unknown
  Bacterial polypetide isolated from the Sargasso Sea
MASNKLTYSKSGVNISKADSFVKFISSLTRKSVKSGDFKNIGGFGAISPIPRNLRDPQIVTSTDGVGTKIEIANDLNKFDTIGIDLVAMCVNDLVVQGAKPYLFLDYISISKINLNKLKNLVKGIIKGCEIADCKLVGGETAEMPGTYSKDKFDIAGFAVGLVEKKKILNKKIRNNDLILAVPSNGLHSNGFSLVRYLLKKKKINLKGSKFLKDELIRPTKI

SEQ ID NO: 195225 - protein, 158 aa, Unknown
  Bacterial polypetide isolated from the Sargasso Sea
MTKNKNKYKDIGVDIEEGQKFIEDIKDLTKEPITSYSLSNIGSFSGYIETPSEFSDPVYALACDGVGTKIKIGLKLNNLKTIGIDLVAMCVNDLISSGAKPTAFLDYYGCSKLDRSKGKEIISGILEGCKLAGCELIGGETAEMPNHYTDNNFDLVGF

SEQ ID NO: 195226 - protein, 327 aa, Unknown
  Bacterial polypetide isolated from the Sargasso Sea
AGNEAVDLIKDSVKSTFSKNVLIGLGGFGALYDLKSIIKKYEHPVLVQSIDGVGTKTIIARKLNKYDTIGIDLLSAAANDIIVMGARPVTFLDYIANDKLKPSVIKEIISGMVMACKNSNVSLIGGETAEMPDTYLPGEHDLVGVITGLVEKDKIISGGLISAGDVLLGLPSSGLHTNGYSLARKVFFDIGGYRVNDCLDGLNSSIGLTLLEPHINYTNDVFKLLDRDINIKGMAHITGGGLVENIPRILPKNCMAIINKDAWSVLPVFNAIQSIGSIDESEMFRTFNMGIGMICIVSSDDVSSIKQLISVREVGEIVSGAGGVKVV

SEQ ID NO: 195227 - protein, 141 aa, Unknown
  Bacterial polypetide isolated from the Sargasso Sea
MEKTKNSYKKSGVNIALANKFVKHIAKISTKNVRKKNKINNRDNIGAFGSVFDLTKIKIKDPLIVSCTDGVGTKIELANKFNKFDTIGIDLVAMCVNDLIVQGAKPLFFLDYIAVGKLNLKKIKLILKGILKGCKQSNCEL

SEQ ID NO: 195228 - protein, 202 aa, Unknown
  Bacterial polypetide isolated from the Sargasso Sea
MNKGKFTYKKSGVNIAAADNFIKFISKISKKNKENKKFNNIGSFGSISNIPSKFKNPRIVASTDGVGTKIEIANILNKYDTIGIDLVAMCVNDLIVQGAKPLLFLDYISINKIDSKKLKAIIKGILKGCNISDCELVGGETAEMPGTYEKGKFDVAGFSVGIVDQKKILNKKKIKKNNLVLAIPSSGVHSNGYSLIRHILNK

SEQ ID NO: 195229 - protein, 296 aa, Unknown
  Bacterial polypetide isolated from the Sargasso Sea
MKKNKVYYKFAGVDISAGNEAVNLIKDSVKSTFSKNVLTGLGSFGALYDLKAIAKEYKHPVLVQSIDGVGTKTIIARKLNKFDTIGIDLLSATANDIIVMGARPITFLDYIANDKLNPTIIKEIVSGMVKACNDNNVSLVGGETAEMPDTYLQGEHDLVGVITGVVEKNKIINGELISPGDVVLGLPSSGLHTNGYSLARKIFFDIGNYDVKDRPNGLASSVGLTLLEPHINYTNDIFTLLDQGVNVKGLAHITGGGLLENIPRILPKNCEAKIKLGTWDILPVFHAMQSIGNIEQ

SEQ ID NO: 195230 - protein, 113 aa, Unknown
  Bacterial polypetide isolated from the Sargasso Sea
MQNSYKKSGVNISLANKFVQHINRLSKKVGKKTKNSIYKDNIGGFGSLFDISNIKIKDPVIVSCTDGVGTKLDLANKYKKYDTIGIDLVAMCVNDLIVQGAKPLFFLDYIATG

SEQ ID NO: 195231 - protein, 227 aa, Unknown
  Bacterial polypetide isolated from the Sargasso Sea
MKKIQNNYKKSGVNISLANKFVNHIAKVSKKNDQKTNKLFDLGNIGAFGSVFDISNIKIKDPVIVSCTDGVGTKLDLANKFKKFDTIGIDLVAMCVNDLIVQGAKPLFFLDYMALGKLELKKTKSILKGILHGCKISNCKLIGGETAEMPGIYSKDKFDLAGFSVGIVSKKKILSKNNVKKNNLIFAIPSSGIHSNGYSLVRSILKNYKINKNLKKELLKPTKIYTN

SEQ ID NO: 195232 - protein, 216 aa, Unknown
  Bacterial polypetide isolated from the Sargasso Sea
MKKIQNSYKKSGVNISLANKLVRYISNLSKKNVKKTKSYYEKEVIGGFGSLFDLSKYKIKEPVLVSCTDGVGTKIDLANKFKKFDTIGIDLVAMCINDLIVQGAKPLFFLDYIAVGKLNLNKSKNIIKGIFKGCEIANCKLIGGETAEMPGIYSKDNFDLAGFSVGIVSKRKILSKNKVKKDNVILAIPSSGLHSNGFSLVRTIIKNKKISNNLKK

SEQ ID NO: 195233 - protein, 219 aa, Unknown
  Bacterial polypetide isolated from the Sargasso Sea
MQRTKNSYKKSGVNIDLANSLVKHIAKISKKNVRKKNNTGNSNNIGAFGSLFDISKINIKDPLIVSSTDGVGTKLDLANRFHKFDTIGIDLVAMCVNDLIVQGAKPLFFLDYIAIGKLDLKKVKQILKGIIKGCKLADCDLVGGETAEMPGIYKKNKFDLAGFSVGIVSKKKLIDKKNVKNNDIILAIPSSGIHSNGYSLVRSILNKKKISKKLKLELL

SEQ ID NO: 195234 - protein, 261 aa, Unknown
  Bacterial polypetide isolated from the Sargasso Sea
MDLLSACANDILVMGAKPLTFLDYIANEKLHPNIVEEIVSGMVKGCRETGVSLVGGETAEMPDTYLKGEHDLVGIITGVVEKDKIITGEKIQPGNIVLGLPSNGLHTNGYSLARKVFFDIGNYNVNDEIPGLNKSIGLTLLEPHINYTKHVFELLNSKIPIKGIAHITGGGLLENIPRVLPDGLSISIKKRSWPSLPVFSCIQSIGEIEQKEMFRTFNMGIGMVFILDKEHADMAKTALGKHSKVYEIGHVQFGDKTVRLR

SEQ ID NO: 195235 - protein, 196 aa, Unknown
  Bacterial polypetide isolated from the Sargasso Sea
YQSGEFDLAGFSVGIVDYKKIIDGSKISEGDSIIGLASSGPHSNGYSLIRKLIEDNSVDLDEMINGEKIGAQIIKPTIIYSRSVLSCIEKYEVNSMAHITGGGFQENIIRAIPEGYQAIIDKNSWSLPPVFQWIQDQAGIDSNEMLRTFNCGIGYVLIVKADVKNSVIKHFQDEELEAYEIGSITSGEKSVIINHG

SEQ ID NO: 195236 - protein, 237 aa, Unknown
  Bacterial polypetide isolated from the Sargasso Sea
MKKIKNSYKKSGVDISLANKLVKHISKISKKNVQKTNALFDKDLIGGFGSFYDISKIKIKDPVIVSCTDGVGTKIELANKFKKFDTIGIDLVAMCVNDLIVQGAKPLFFLDYIAVGKLNLVKVKKIINGIFNGCRLSDCKLVGGETAEMPGVYSKEKFDLAGFSVGIVSKKKILKKENVEKGDIILAIPSSGIHSNGYSLIRSIIKDIKLTKELKSELIKPTKIYVKEILELTNKRL

SEQ ID NO: 195237 - protein, 126 aa, Unknown
  Bacterial polypetide isolated from the Sargasso Sea
MKKIQNSYKKSGVNISIANKFVNHIAKISKKNVKKTDMSFNADNIGAFGSAFDISNIKIKDPVIVSCTDGVGTKIDLANKFKKFDTIGIDLVAMCVNDLIVQGAKPLFFLDYIAVGKLNLNRTKNI

SEQ ID NO: 195238 - protein, 169 aa, Unknown
  Bacterial polypetide isolated from the Sargasso Sea
MTKNKNKYKDIGVDIDEGQKFIEDIKNLTKKPITSYSLSDIGGFSGYVETPSEFSDPVYALACDGVGTKIKIGLMLDNLKTIGIDLVAMCVNDLISSGAKPVAFLDYYGCSKLDRSKGKEIISGIVEGCKLAGCELIGGETAEMPNHYNENNFDLVGFSMGVNNRNKII

SEQ ID NO: 195239 - protein, 287 aa, Unknown
  Bacterial polypetide isolated from the Sargasso Sea
FCYFISKISPKKNGNKKFKNIGGFGSITNLPKNIKRPKIVACTDGVGTKVEIANILNKYDTIGIDLVAMSVNDLIVQGAKPIIFLDYISINKINLKKMKSILKGIVKGCNIAKCDLVGGETAEMPGTYEKGKFDIAGFAVGIVDEKKILYKNKIKNGNLILAVPSSGIHSNGYSLIRNILDKKKINIKKNSFLKKELIKPTKIYVREILKLINKDLLNGCSNITGGGLVDNIKRIIPDKLCAEINLDKIKVLKIFSWLKQNSISNKEMLKTFNCGVGFCLIVNYKDV

SEQ ID NO: 195240 - protein, 273 aa, Unknown
  Bacterial polypetide isolated from the Sargasso Sea
ETDILEGLGHDLVGMCLNDILCHGAEPLFFLDYYASSKVDKNSFLKIIKSITEACKINSCSLLGGETAEMPGLYKENDFDFAGFCVGAVERNKILPKKELMKEGDLLYGLKSSGFHSNGYSLIRKVIKDSKLDLSKPTEFQSSFKTISEALMTPTLLYYPMLKNILKKNYITGISHITGGGLIGNVPRMLPDNLSATIDKKFVCCDEIFKWFQELANMSNEEMLKTFNCGLGLVITISKKDYKNFEDLIKTENLDIFEIGRLEVNENSRCSIS

SEQ ID NO: 195241 - protein, 253 aa, Unknown
  Bacterial polypetide isolated from the Sargasso Sea
AMCVNDLFVQGAKPYLFLDYISISEINLKKLKHIVRGIVKGCDIAGCKLVGGETAEMPGTYTKGKFDIAGFAVGLVEKKKILNKKIRNNDLILSVPSNGLHSNGYSLVRYLLKKKKINLKTSKFLKNELIRPTKIYVKELSLINEKNLINGCANITGGGLVDNIQRIIPKNLCAEIDLNRVKTLKIFRWLYKMGVSEKEMLKTFNCGIGFCLVTNPKNLNSVSKYFGKKFKPYIIGKIVKNSKKIKLSGKISW

SEQ ID NO: 195242 - protein, 262 aa, Unknown
  Bacterial polypetide isolated from the Sargasso Sea
FNTIGIDLVAMCVNDLIVQGAKPFLFLDYISIDKINLKKMKEIIRGIVKGCELSSCNLVGGETAEMPGTYSPGKFDLAGFSVGLVEEKNILINKIKENDLILAIPSNGIHSNGFSLVRAILKTNKININRNKYLKKELIKPTKIYVKEIINLINKNLINGCANITGGGLESNIKRIIPKNLCANIDLNKIKIQKIFKWLKNSGITDIEMLKTFNCGVGFCIIINKKNLNKVKLKFEKKYKPYVIGKISKNKKKVNLSGKINW

SEQ ID NO: 195243 - protein, 260 aa, Unknown
  Bacterial polypetide isolated from the Sargasso Sea
MIYIVQGAEPLYFLDYFATGQLSNSIAKKIIKSISDGCIESNCALIGGETAEMPGLYEKGHFDLAGFSVGVVERNKLLPKQNIKKGDLLIGLPSNGLHSNGYSLVRNIINQKNINVSLPMSDKSGETIVENLLRPTKIYVKLILELLKNSNGIKAISNITGGGITENLPRIFPNSNIGARINLSSWKRPSIFNWLQELGNIDEQEMLKTLNCGIGMILIANRNSGEEIFEILEKKNEAFYIIGEIIETDSDNSKIIFHRD

SEQ ID NO: 195244 - protein, 132 aa, Unknown
  Bacterial polypetide isolated from the Sargasso Sea
MSNNQDSKHNNVSDELNYRTAGVDIEAGNSLVSDIAKITKGTSRPEVLSNLGGFGALCEIPKNYKHPVLVSATDGVGTKLKLATTLNKHDSIGIDLVAMCVNDLIVCGAEPLFFLDYYASGKLDIVVAKRCD

SEQ ID NO: 195245 - protein, 269 aa, Unknown
  Bacterial polypetide isolated from the Sargasso Sea
MQKHNTIGIDLVAMCVNDILAEGAQPLFFLDYYATGKLDLKISKEILKGIVKGCIQAEISLIGGETAEMPGIYQQNIYDLAGFCVGAIEKKKYYSREFIKKGDIAIALSSSGIHSNGFSMVRSILKDNNISLYDADPFEKSKTIGETLLEPTKIYTKFLNKLNTFNLIKRSVNVTGGGLIKNPPRVFDDNLTLKINVNNWHLPKEFKWLKKKGNLSTFEMLKVFNCGIGMILFVEKDYVNEVIQYANNANENCFVIGKMVEKCESSVFF

SEQ ID NO: 195246 - protein, 128 aa, Unknown
  Bacterial polypetide isolated from the Sargasso Sea
MVNKKKINTSKNITYKDAGVDIETGNKFVKEIIPLVKDTNRPGVMGSIGGFGGLFDPNKSGYNKPILVSATDGVGTKLLVADAVNKHDTIGIDLVAMSVNDIVVQGAEPLFFLDYFDTGKLKIKTAKQ

SEQ ID NO: 195247 - protein, 263 aa, Unknown
  Bacterial polypetide isolated from the Sargasso Sea
MNKSLFTYKKSGVDISEADKFIKFISNISTKKKGKKKFNNIGGFGSISNFPKNLKDPKIVACTDGVGTKIEIANLLQKYNTIGIDLVAMSVNDLIVQGAKPWLFLDYISINKINLPKLKSILRGIIKGCKISNCELVGGETAEMPGTYEKGKFDIAGFAVGIVENKNILNKKKIKKNDLILSIPSNGLHSNGYSLIRFLLNKKKINLKKNKFLSKELIRPTKIYVQEILKLIDRKLIHGCANITGGGLEENISRIIPDNLCAN

SEQ ID NO: 195248 - protein, 294 aa, Unknown
  Bacterial polypetide isolated from the Sargasso Sea
MKNNKLTYEKSGVNIKAADKFVKFISLKSNNSKNSGKFKNIGGFGSITQIPKTYKNPQIVSATDGVGTKIEIANILNKFDTIGIDLVAMCVNDLIVQGAKPIIFLDYISINKVDLNKLKLIIKGILKGCKISGCELVGGETAEMPDTYEKNKFDIAGFSIGLVEKNKILNKKIFKGDLILAVPSNGLHSNGFSLIRYILKKKKIDLKKNKYLKKELIRPTKIYTKEILKLVSKNLIKGCANITGGGIPDNLKRILPNNMSAEINLNNIKYKKIFKWIKSQGVSDKEMLKHLIAV

SEQ ID NO: 195249 - protein, 235 aa, Unknown
  Bacterial polypetide isolated from the Sargasso Sea
MKKIKNSYKKSGVNISIANKFISHIAKVTKDSDKKTKRSLNGENIGAFGSTFDISKIKIKDPLIVSCTDGVGTKIDLANKFKKFNTIGIDLVAMCVNDLIVQGARPLFFLDYIAVGKLNLIKTKKILSGIIKGCKLSNCKLIGGETAEMPGIYTKDKFDLAGFSVGIVSKKKLLGKNKVKINNIILAIPSNGVHSNGYSLVRSILKKNKITKKLKEELLKPKKIYTNEILKLADR

SEQ ID NO: 195250 - protein, 151 aa, Unknown
  Bacterial polypetide isolated from the Sargasso Sea
MDYKTSGVDIEAGREFVSEIKQAVEGTHTSNVIEGIGGFGGLFRIPIDSFKKPVLVSGTDGVGTKLELAQSKNFHFEVGIDLVAMCMNDIITSGAKPLFFLDYIATGKLDKKQLLRVVQGIAKGCGENNCSLLGGETAEMPGFYSKNKYDL

SEQ ID NO: 195251 - protein, 250 aa, Unknown
  Bacterial polypetide isolated from the Sargasso Sea
MKEKINKFSYSSSGVDIDNAEKLLSKLHPLIKETYNEAVLQNVGGFSSVLDIKKLGYKDPILMSTTDGVGTKLQLAINTDKLFNIGIDLVAMCVNDIVAQGGKPHFFMDYIATGKLNNNQILEILKGIIYGCKLADCALVGGETAEMPGHYTKDNFDLAGFCIGASEREKVFSKKNVKENNSVIAIESSGLHSNGYSLIRNLIKIKSIDINDQAPFDKTKSLLEILLEPTMIYSEMFEKIRSKVKINSIT

SEQ ID NO: 195252 - protein, 287 aa, Unknown
  Bacterial polypetide isolated from the Sargasso Sea
VWTDGIGTKILLGIETDILDGLGHDLVGMCLNDILCHGAEPLFFLDYYASSKIDKNSFLKIMKSITEACKINNCSLIGGETAEMPGLYKKDDFDFAGFCVGAVERKKLLPKRNVMKEDDLLYGIRSSGFHSNGYSLIRKVLKDKNIDLNKKTEFKSSYETNAAAFMAPTKLYFPFLKKILTTNFVNGISHITGGGVIGNTPRMLSENFSARIDKKFICDEEIFQWFQSLANISDEEMLRTFNCGLGLIMTISKNNYKEFEQLIKDENLDIFEIGKIEINKSSRCTIS

SEQ ID NO: 195253 - protein, 283 aa, Unknown
  Bacterial polypetide isolated from the Sargasso Sea
QGINQPKIVACTDGVGTKIEIANTLNKYDTIGIDLVAMSVNDLIVQGAKPLLFLDYISINKIDLKKLKSIIKGILKGCRLSGCELVGGETAEMPGTYEKGKFDIAGFAVGVVSKNKILNKNRIKNNNLILAVPSSGLHSNGFSLVRYLINQKKINIKNNKFLKSELLRPTKIYVDEVLKLIDQNLINGCANITGGGLSDNIKRIIPDEMIADINLDQIKTLNIFKWLKKNGISEKEMIKTFNCGVGFCLIINPKDLKKVTKYFSKDYRPYVIGKISIGNNKVK

SEQ ID NO: 195254 - protein, 190 aa, Unknown
  Bacterial polypetide isolated from the Sargasso Sea
KNKFDLAGFCTGIVSKKKLLTKKNVKEHDIILAIPSSGIHSNGYSLVRHIIKKNKLPNYLKSEILKPTKIYVEDFLTLSKKKLVNSAANITGGGLVDNVIRAVPNGLTVNLDLSKIKILKIFSWIKSKNISDFEMLRTFNCGVGFCLIVKKNNVKKIENILKGKFKPYEIGFVSKGKERLKFLNKLKWQK

SEQ ID NO: 195255 - protein, 263 aa, Unknown
  Bacterial polypetide isolated from the Sargasso Sea
DLVGMCLNDILCHGAEPLFFLDYYASSKIDKNSFLKIMKSITEACKINNCSLIGGETAEMPGLYKKDDFDFAGFCVGAVERKKILPKRNVMKEDDLLYGIRSSGFHSNGYSLIRKVLRDKNIDLHKKTEFKSFYETNAAALMAPTKLYFPFLKKILTKNLINGISHITGGGVIDNVPRMLSENLSARIDKKFICDEEIFQWFQSLANISDKEMLNTFNCGLGLIMTISKNNYKEFEQLIKNESLDIFEIGKIEVNESSRCIIS

SEQ ID NO: 195256 - protein, 210 aa, Unknown
  Bacterial polypetide isolated from the Sargasso Sea
MKQKISYKDAGVDIEKADQAIDSSKKVIKETFSGDVLSSIGGFGSMYSLKNLLKDYDEPIMVQSIDGVGTKMSVAQKCGDFRFIGTDLVSACCNDVAATGARPLTFLDYIASDSLNPKTVSEIIKSVAVECKKLGVSLVGGETAEMPGTYRKTEYDLVGVATGIIDKKNIIDGSKIKNGDAVLGLPSNGLHTNGYSLARKLMFDTLKMKV

SEQ ID NO: 195257 - protein, 211 aa, Unknown
  Bacterial polypetide isolated from the Sargasso Sea
QNIPEVTKDIVAGMAKACKETGSAIIGGEMAEMSDMYQAGDFDLAGFSVGIVEKDDIIDGSKIAEGQHIYALSSSGIHSNGYSLVRKILSSYPNETKDISIDDLLEPTKLYVNEVLELIDAHTITGVAHITGGGLTENVERILPSSLSLDINRDNMPIPKIFNDLQNAAGISDEEMERVFNMGIGMVIISPDKISETESRKHIGSVIKKSQ

SEQ ID NO: 195258 - protein, 129 aa, Unknown
  Bacterial polypetide isolated from the Sargasso Sea
MKSTAYQQAGVSLDAADEVVDKVKPLAQRTFRPGVIGGLGGFGGLFHLDPNKWKNPVLVSGTDGVGTKLKLAFELEKHDTIGIDLVAMCVNDILVQGAEPLYFLDYLACGKLHPDKVATIVSGISEGCR

SEQ ID NO: 195259 - protein, 263 aa, Unknown
  Bacterial polypetide isolated from the Sargasso Sea
KFKIFDTIGIDLVAMCVNDLIVQGAKPLFFLDYIAVGKLNLNKTKKILKGIFKGCEISNCKLIGGETAEMPGVYSKNKFDLAGFSVGIVSKEKILDKSNVKNGDIVLAIPSSGIHSNGFSLVRSILKKIHVSSRLRKEILRPTKIYTEEILMLTKKNLINSAAHITGGGLIENLLRSVPENLTLNIDLSKIRIIKIFKWLKSKNISDKEMLKTFNCGVGFCIIVSKKNINKIKKIFPKNYTPYEIGYISKNKKKINLSNSLKW

SEQ ID NO: 195260 - protein, 292 aa, Unknown
  Bacterial polypetide isolated from the Sargasso Sea
MNKKKFTYKKSGVNIKAADKFVDFISTVSAKKRGKKKFSNIGGFGSITNIPNNIKQPKIVACTDGVGTKIEIANTLNKFDTIGIDLVAMSVNDLIVQGAKPLLFLDYISINKIDLKKLKAIIKGINKGCNQSECELVGGETAEMPGTYEKGKFDIAGFAVGVVGKNRILNKNKIKKNNLIVAIPSSGLHSNGYSLVRYLLKLKKINIKKNKFLKSELLKPTKIYVKEIMNLINNNLISGCANITGGGLSDNIKRIIPDKLSAHISLDKIKTSKIFNWLKNNGISDKEMLKTF

SEQ ID NO: 195261 - protein, 206 aa, Unknown
  Bacterial polypetide isolated from the Sargasso Sea
MKKTKNSYKKSGVNIETADKFTKYIGKYSQQAFKKKLNKFNRTNIGSFASAFDIKPLKIKDPILVASTDGVGTKLEIANRFNKFDTIGIDLVAMCVNDLIVQGAKPLFFLDYIATGKINLKKMKKIVRGIITGCKISNCILVGGETAEMPGTYEKNKFDLAGFSVGIVSRKKILSKNKVKNKDIILAVPSSGLHSKGFSLVREILK

SEQ ID NO: 195262 - protein, 269 aa, Unknown
  Bacterial polypetide isolated from the Sargasso Sea
LLNKYDTIGIDLVAMSVNDLVVQGAKPLFFLDYISINKINLKKMKSLIKGIIKGCNISQCSLVGGETAEMPDTYDKGKFDMAGFAVGIVDGKKLLTKKRIKKNDLILAVPSSGLHSNGFSLIRYLIKKKKIDVKKNYFLKKELIKPTKIYVKEILNLSKRNLLKSCANITGGGLVDNISRIIPDKLSAEISLNKIKTLKIFKWLKKNNISDKEMLKTFNCGVGFCLIVNSKNIKKIQKYFSKEHKPYVIGKITTGKNKVKLNGYIDWLK

SEQ ID NO: 195263 - protein, 252 aa, Unknown
  Bacterial polypetide isolated from the Sargasso Sea
CVNDLVVQGAEPLFFLDYLSVGALQPEVATSILKGIANGCHIAGATLLGGETAEMPGLYTKGHYDLAGFAVGVVEKRKIIDGKDITKGDVVLGLASSGIHSNGFSLFRKVRELNLDAKSKPSNEEALRPTKIYVKSILAAIKEYQVNGISHITGGGLTNNIPRIMPKGLCAKINLDSWLVPEIFTWLAEAGPIKEAEMLRTFNCGIGMVLIVPPDEAQGISKKLTYEGEKVFQIGEIISESKAIVYSGRAFS

SEQ ID NO: 195264 - protein, 232 aa, Unknown
  Bacterial polypetide isolated from the Sargasso Sea
MASNKLTYSKSGVNISKADSFVKFISSLTRKSAKSGDFKNIGGFGAISPIPKMFKNPHIVTSTDGVGTKIEIANDLNKFDSIGIDLVAMCVNDLVVQGAKPYLFLDYISICKINLKKLKHLVRGIVKGCDIAGCKLVGGETAEMPGTYTKGKFDIAGFAVGLVEKKKILNKKIRNNDLILAVPSNGLHSNGYSLVRYLLKKKKINFKTSKFLKDELIRPTKIYVKELSLINE

SEQ ID NO: 195265 - protein, 214 aa, Unknown
  Bacterial polypetide isolated from the Sargasso Sea
KNFRKEIILNPGGFCSIFDLKKLKYKDPILLSSTDGVGTKLKLALEQKNLKFLGFDLVAMSVNDILANGGEPLFFLDYISTSKIKDDIFLDLIKSINQACSEAGCSLVGGETAEMPGMYKNEEFDIAGFAVGAVERKNQIGKEKVKKNSLILGLESSGFHSNGFSLIRKIISEKKISLNTKPPFKSDFKLLGEDLIQPTKIYVKSLLPLIKKKK

SEQ ID NO: 195266 - protein, 285 aa, Unknown
  Bacterial polypetide isolated from the Sargasso Sea
KIKDPVLVSCTDGVGTKIDLANKFNKFDTIGIDLVAMCVNDLIVQGAKPLFFLDYIAVGKLDLKKTKKIINGIIKGCKFSQCSLIGGETAEMPGIYSKDKFDLAGFSVGLVSKKKILNKKKVKNNDLILAIPSSGIHSNGYSLVRSLIKKRHISKKIQKELIMPTKIYSKEILKLVDKGLINSAAHITGGGLIENLSRSIPDKFSINIDLSKIKIKSIFKWLKNKNISQSEMMKTFNCGVGFCIIAPKKNFKKIKRVFNKKYSPYSIGFISKSSKKINLKNSLKW

SEQ ID NO: 195267 - protein, 272 aa, Unknown
  Bacterial polypetide isolated from the Sargasso Sea
VGTKIEVANQLNRFDTIGIDLVAMCVNDLIVQGAKPLFFLDYIAIGKINLKKMKKIIKGIINGCKISDCVLVGGETAEMPGTYGKNKFDLAGFTVGIVSKEKVISQNKVKKNNIILAIPSSGLHSNGFSLVRKVIKNIKLNNRLKKELLKPTKIYTKEILNLVKNNLVNSAANITGGGITENIIRSVPNNLTVNIDLSKIKIPFIFKWLKNKNINDIEMLKTFNCGVGFCLIVNKKNIKKIKTFFNRKFMPYEIGYISQSEKRLNFTKNLKW

SEQ ID NO: 195268 - protein, 290 aa, Unknown
  Bacterial polypetide isolated from the Sargasso Sea
KKKGKKKFSNIGGFGSISDIPKNIRQPKIVACTDGVGTKIEIANILNKYDKIGIDLVAMSVNDLIVQGARPLIFLDYISINKIDLIKLKSIIKGIVKGCRLSGCELVGGETAEMPGTYEKGKLDIAGFAVGIVSKNKILNKNKIKENDLVLAIPSNGLHSNGYSLVRYLIKIKKINIKKNKFLKNELLKPTKIYVKEVLNLIENNLINGCANITGGGLADNIKRIIPDNLIAEINLDKIKTSKIFKWLKKNKIHDKEMLKTFNCGVGFCLIISPKNLNKIKKYFSKDYKP

SEQ ID NO: 195269 - protein, 258 aa, Unknown
  Bacterial polypetide isolated from the Sargasso Sea
MASNKLTYSKSGVNIPKADSFVKFISSLSRKSNKSGDFKNIGGFGAISPIPAKLKEPQIVTSTDGVGTKIEIANDLNKFDTIGIDLVAMCVNDLVVQGAKPYLFLDYISVSKINLKKLKDLVKGILKGCKIANCKLVGGETAEMPGTYSKGKFDIAGFAVGLVEKRKILNKKIKNKDLILAIPSNGLHSNGFSLVRYLIKKKKINFKSSKFLKKELIRPTKIYVKELLDVNEKNLINGCANITGGGLIDNIQRIIPNN

SEQ ID NO: 195270 - protein, 239 aa, Unknown
  Bacterial polypetide isolated from the Sargasso Sea
MKNDPYKKAGVDIKAGNDLVDKIRKDVASTFDKNVLGGIGSFSGFYSLPKGFKNPVLVACTDGVGTKVALAQKNSSLGTIGQDLVAMCVNDMVTSGAYPLFFLDYFASSKLNVTETATVIKGIAKACKKTNCSLIGGETAEMPNHYIGKNFDLAGFSVGIVEKKLIIDSSKVRKNNIIIGIESSGAHSNGYSLINKLIKESKLSKSEKEKLIKLALKPTHLYTNVILDLVKKVKVKSIA

SEQ ID NO: 195271 - protein, 225 aa, Unknown
  Bacterial polypetide isolated from the Sargasso Sea
LNLSKTKKILKGIFKGCKLSGCKLIGGETAEMPGIYSKDKFDLAGFSVGIVSKRKILDKKNVKEKNIVMAIPSNGIHSNGYSLVRSILKKNKISNNLKKEILKPTKIYTEEILKLTNKNFVNAAAHITGGGLIENLLRSVPDNLTLNINLSNIKTTKIFKWLKTKNISDQEMIRTFNCGIGFCVIVNKKNVKKIKKIFTKKFKPYEIGFISKSKNKVNIFGSLKW

SEQ ID NO: 195272 - protein, 166 aa, Unknown
  Bacterial polypetide isolated from the Sargasso Sea
MYRRCVVPKLEIANTINKFDTIGIDLVAMSVNDLIVQGARPLIFLDYISINKINLPKLKSIIKGIVKGCKISECSLVGGETAEMPGTYERNKFDIAGFAVGVVDKKKILNKKKIKKNDLILAVPSSGLHSNGYSLVRDIINKRKINIKKNSFLKNELIKPTKIYVK

SEQ ID NO: 195273 - protein, 152 aa, Unknown
  Bacterial polypetide isolated from the Sargasso Sea
MTKKTNNYKDSGVNVQEGQDFINDIKDELNDLQNNFAIGSIGGFSGYIDPPKNYKDPVYALACDGVGTKLRIASSLENYESIGIDLVAMCVNDLIVSGAKPIAFLDYYGVSKLDRQIGRQVISGILKGCQLSGCDLIGGETAEMPNHYTNEI

SEQ ID NO: 195274 - protein, 239 aa, Unknown
  Bacterial polypetide isolated from the Sargasso Sea
PLFFLDYFASSKLNVTETATVIKGIAKACKKTNCSLIGGETAEMPNHYIGKNFDLAGFSVGIVEKKLIINSSKVRKNNIIIGIESNGAHSNGYSLINKLIKESKLSKSEKMKLIKLALKPTHLYTNVILDLVKKVKVKSIANITGGGLTENIPRSIPNNLSSEIYLNNWKMPVLFSTLQELGKIQIRDMLRIFNCGIGMTLVIEPKDFDTTMKVLSKHKFKGFMIGKVVNKSSSEITFL

SEQ ID NO: 195275 - protein, 197 aa, Unknown
  Bacterial polypetide isolated from the Sargasso Sea
MPGFYQGSQYDLAGFCVGIVEKDKIINGAEITKGDKIVGLPSSGPHSNGFSLIRKILELKEIESSDLIDEMMNPTRIYVRSVLALLEKIKVKGMVHITGGGFYENIRRILPNQHLSANIDLSAWERPQIFKWLQDTGRVDEREMLTTFNCGIGYLIIVSSEDAEKTTEILTLEQEEPLLVGEIVSSDSPANSNQILI

SEQ ID NO: 195276 - protein, 260 aa, Unknown
  Bacterial polypetide isolated from the Sargasso Sea
TIGIDLVAMCVNDLIVQGAKPYLFLDYISISKIDLSKLKNLLKGIVKGCNIADCKLVGGETAEMPGTYTKNKFDIAGFAVGIVDKEKILHKKIKNNDLILAVPSNGLHSNGFSLVRHVLKKKRLNFKQNNFLRKELIRPTKIYVKEVSLLVERKLINACANITGGGLVDNIKRVIPKDLGLEINLNNIKILKIFNWLHNMGIDEKEMLKTFNCGVGFCLIVNPKNLKMVSKYFNIKYKPYVIGKITNNSKKVKLSGKINW

SEQ ID NO: 195277 - protein, 273 aa, Unknown
  Bacterial polypetide isolated from the Sargasso Sea
MKNKTKNTSTESLSYKKAGVDIKAGNKLVQKINPLAISTQRSGTFAGLGGFGALFDLKAAGFHDPILVAATDGVGTKLRIAIETANLKTIGIDLVAMCVNDLICQGAEPLFFLDYYATAKLNIEEAAAVIEGIATGCRLSNTALIGGETAEMPDMYHNSDFDLAGFAVGALNRGEILPKGISAGDVLVGLKSSGVHSNGFSLVRMIVKNLGLNWESPIPFSDKDLGTELLEPTKIYVHPILSLKQKKLLSGVAHITGGGLTENLPRILEPFYG

SEQ ID NO: 195278 - protein, 273 aa, Unknown
  Bacterial polypetide isolated from the Sargasso Sea
GSITNIPKNIKNPQLVASTDGVGTKIEIANELNKFDTIGIDLVAMCVNDLIVQGAKPLIFLDYISINEVRQNKLKNIIKGIIKGCEISNCELVGGETAEMPGTYSKGKFDIAGFSVGIVDKKKILDKSKIKVNDLIVGIPSNGIHSNGYSLIRYILKKKKIKFKKNKFLKKELIKPTKIYVKEILNLVNKKLINGCVNITGGGLKDNISRVLPQNLSAKIDLGKIKPNKIFKWIYSKGVSEKEMIKTFNCGVGFCIIINQKKYEKVKKYFSNN

SEQ ID NO: 195279 - protein, 273 aa, Unknown
  Bacterial polypetide isolated from the Sargasso Sea
MSDAGKNGITYADAGVDIDAGNALVERIKPAAKRTNRPGVASGLGGFGALFDLKAAGFDDPVLVAATDGVGTKLRIAIDTGHVGSVGIDLVAMCVNDLVCQGAEPLFFLDYFATGKLDTETAAQVVEGIAAGCEGSGCALIGGETAEMPGMYPPGDFDLAGFAVGAMERGHALPAGVQPGDVLLGLASDGVHSNGYSLVRRLVERSGLAWDAPNPFGGGSLGAALLTPTRLYVRPVLSAIRSGGVHALAHITGGGLTENLPRVLPEGLGAGYR

SEQ ID NO: 195280 - protein, 161 aa, Unknown
  Bacterial polypetide isolated from the Sargasso Sea
MKNDPYKKAGVDIKAGNDLVDKIRKDVASTFDKNVLGGIGSFSGFYSLPKGFKNPVLVACTDGVGTKVALAQKNSSLGTIGQDLVAMCVNDMVTSGAYPLFFLDYFASSKLNVTETATVIKGIAKACKKTNCSLIGGETAEMPNHYIGKNFDLAGFSVGIV

SEQ ID NO: 195281 - protein, 284 aa, Unknown
  Bacterial polypetide isolated from the Sargasso Sea
VLVSGTDGVGTKLKLAITLDCHDTIGIDLVAMCVNDILVVGAEPLYFLDYFATAALSPSQAESVISGIATGCELAGAALIGGETAEMPGMYQSGDYDLAGFCVGVVEKKDIIDGRDIRAGDQVIGLASTGLHSNGYSLARAIVDRSNASLDTPIGTSTLGQTLLTPTRIYVRSILDLLKACPVKGIAHITGGGLPGNIPRVLPDTLECHIDPNAWHRPEIFQWLQSEGQVADDEMWRTFNCGIGLIIIVSPENAAKAKASLERCGETAFHIGQIQAGRAGVVFK

SEQ ID NO: 195282 - protein, 282 aa, Unknown
  Bacterial polypetide isolated from the Sargasso Sea
MNNKKFTYEKSGVNITAADKFVEFLSNKAKQRRNKSKFKNIGGFGSISEIPKKFKNPKIVASTDGVGTKIEIANELDKFDTIGIDLVAMCVNDLIVQGAKPLIFLDYISTNKIELKKLKSIVKGIIAGCKISDCELVGGETAEMPGTYGKKKFDLAGFSVGVVDDKSFLSKDKIKKDNLILAVPSSGIHSNGYSLLRYILKRKKINFKKNNFLKKELIKPTKIYTKEILLLNEKNLINGCANITGGGIIDNIKRVIPNGLCASIDLSKIKVPKIFKWIKNKM

SEQ ID NO: 195283 - protein, 149 aa, Unknown
  Bacterial polypetide isolated from the Sargasso Sea
MKNDPYKKAGVDIKAGNDLVDKIRKDVASTFDKNVLGGIGSFSGFYSLPKGFKNPVLVACTDGVGTKVALAQKNSSLGTIGQDLVAMCVNDMVTSGAHPLFFLDYFASSKLNVTETATVIKSIAKACKKTNCSLIGGETAEMPNHYIGK

SEQ ID NO: 195284 - protein, 120 aa, Unknown
  Bacterial polypetide isolated from the Sargasso Sea
MKKVENSYKKSGVNISLANKLVKHISKLSRKDVKKRNGVSKPDVIGGFGSLFDISNLKIKEPVIVSCTDGVGTKIDLANKYKKFDTIGIDLVAMCVNDLIVQGAKPLFFLDYIAVGKLDL

SEQ ID NO: 195285 - protein, 217 aa, Unknown
  Bacterial polypetide isolated from the Sargasso Sea
ILKGILKGCELSNCKLIGGETAEMPGIYSEDKFDLAGFSVGIVSKKKILNKKNVKKNNLILAVPSSGIHSNGYSLVRSILKKNKISKKLKKELLRPTKIYTKEILKLVSKNLINSAAHITGGGLIENITRSIPNNLSINIDLSKIKTKKIFKWLKSKNISNYEMLRTFNCGVGFCIIMDKKNIKKIKRYFSKDYMPYEIGYISSNGKKLNLYNSIKW

SEQ ID NO: 195286 - protein, 199 aa, Unknown
  Bacterial polypetide isolated from the Sargasso Sea
MSNHTNEKINYRDAGVDVEKGNELVQRLKRIVNDTNQKGVIGGLGGFGGLFDLSSLNYKEPVLVSGTDGVGTKIKLAIENNLHNTIGIDLVAMCVNDVIVQGAKPLFFLDYFACSRLDIDIAETVISGINVGCSQAGCSLIGGETAEMPGMYGEQDYDLAGFCVGVVEKDQLITGENVKAGDALIALASSGCHANGYSL

SEQ ID NO: 195287 - protein, 274 aa, Unknown
  Bacterial polypetide isolated from the Sargasso Sea
IIARKMKKYNTIGIDLLSACANDILVMGAKPLTFLDYIANDSLNPMIVDEIVKGMTKACKETGVSLVGGETAEMPDTYLPGEHDLVGVITGIVDKDKIINGKNISPGDVLIGLPSNGLHTNGYSLARKIFFKDMGYDVDTYLESLKNSVGAALLEPHINYTNHVFILLNEKININGIAHITGGGLTENIPRILPNGCSVKIQKENWPTLPIFDTLKDLGNIKEDEMYHAFNMGIGMVFVVDSDYVDAIEKALNGITNIYTIGEVIEGENIVHYN

SEQ ID NO: 195288 - protein, 281 aa, Unknown
  Bacterial polypetide isolated from the Sargasso Sea
KKKKNKNIGGFGSISNIPKYFKEPKIVASTDGVGTKVEIANSLNKFNTIGIDLVAMCVNDLIVQGARPLIFLDYISINKINLKKLKSLLVGINKGCNISNCALVGGETAEMPGTYSKNKFDIAGFAVGIVDKKKIIKKNKIKKNDLILAVPASGVHSNGFSLIRYILKKKKINLKKNKYLKKELIRPTKIYVKEVLNLFRLNLIKSCANITGGGLEDNIKRVIPEGVTAHIDLSKIKPNKIFSWIKAQNVSDDEMLKTFNCGVGFCLIAKSNNILKIQKVI

SEQ ID NO: 195289 - protein, 293 aa, Unknown
  Bacterial polypetide isolated from the Sargasso Sea
MSNIPNNLKNPLIVTSTDGVGTKIEIANELKKFNTIGIDLVAMCVNDLIVQGAKPYLFLDYISINKIDLRKLKNIIKGIIKGCRLANCKLVGGETAEMPGTYAKGKFDIAGFSVGLVEKHKVLNLNIKKNDIILAIPSNGLHSNGYSLVREVLKKKKINLSKNKFLKKELIKPTKIYVNEVLNLVKKNILNGCANITGGGLEDNIERVIPNNLCAEINLDNIRIQKIFTWLKNSGIAENEMLKTFNCGVGFCLIIKKKNLEIVKKYFSKKFKPYIIGKITKNSTKVKLSGKIK

SEQ ID NO: 195290 - protein, 261 aa, Unknown
  Bacterial polypetide isolated from the Sargasso Sea
MPNKSPKKNTSLDYKSSGVDVEAGYKLVNSIKPFVEKTKRKEIMSGLGSFSAMSKLPSNIKDPVLVTCTDGVGTKIEIARKMNNFGSVGKDLVAMCVNDLVTCGAEPFLFLDYYVTDSLKVKTAASVIEGIAKGCEEANCSLVGGETAEHPNSFPENSFDLAGFAVGAVDEKKIIGKNGCIAGDYLIGIESSGVHSNGFSLIRKLIEDKNIPLSASLGNMSLGEVLLIPTKIYVKQILELAKKIEIQSISHITGGGFLRIS

SEQ ID NO: 195291 - protein, 299 aa, Unknown
  Bacterial polypetide isolated from the Sargasso Sea
MNNKNFTYKKSGVNIKAADKFVNFISSVSSKKRGKKKFSNIGGFGSISNIPSNIKQPQIVACTDGVGTKIEIANSLNKFDTIGIDLVAMSVNDLIVQGAKPLLFLDYISINKINLIKLKSIIKGIVKGCKLSDCELVGGETAEMPGTYSKGKFDIAGFAVGVVGKNKILNKNKIKKNNIILAIPSSGLHSNGFSLIRYLINKKKININKNKFLKSELLKPTKIYVKEIINLISKNLINGCANITGGGLADNIKRIIPDNMVADIDLNEIKTLKIYNWLRKNGISETEMLKHLTVVLVFA

SEQ ID NO: 195292 - protein, 204 aa, Unknown
  Bacterial polypetide isolated from the Sargasso Sea
MGFYPVGRYDLAGFCVAVVEESELIDGQQVQPGDAVIGVASSGVHSNGFSLVRRVLAQAKANRSTKYGPDQRPLIDDLLKPTQLYASLVQHLLSGSIPIHAMAHITGGGLPENLPRCLPAGCRAQVSPTSWARPPLFDWLQSAGGIPGRDLWHTFNLGIGFCVVVPQDHTDLTVAVCRAQQLQAWPIGSIVEGNPEEGVIGLPD

SEQ ID NO: 195293 - protein, 178 aa, Unknown
  Bacterial polypetide isolated from the Sargasso Sea
GRYNLGLASNGLHSNGFSLVRKIIEQLDIKYEDPCPFIEKWDLGAALMEPTRIYVEPCLSALREGGIRGLAHITGGGLLENPPRSFNDTLSARIDVLKWSLPPVYEWLMETRLISPKELANTFNCGIGMILITDPNLTHKVAEKLSKFGETVYELGFLEKRTETMSAVTIENIESWVR

SEQ ID NO: 195294 - protein, 273 aa, Unknown
  Bacterial polypetide isolated from the Sargasso Sea
EIDRKTKNPQLVASTDGVGTKIEIANELNKFDTIGIDLVAMCVNDLIVQGAKPVIFLDYISINKIDLKKLKQIIKGIVKGCKLSNCELVGGETAEMPGTYSKGKFDLAGFSVGIVEKKKILDKSKIKLNNLILAIPSSGVHSNGYSLIRYLLKKKKINLKKNKFLKKELIKPTKIYVKEILNLINKKLVNGCANITGGGLRDNIKRILPENFTAKINLKKVKTKNIFKWLHANGIDNNEMLKTFNCGIGFCIIINPKNLKKIKKYFPKKFEPY

SEQ ID NO: 195295 - protein, 323 aa, Unknown
  Bacterial polypetide isolated from the Sargasso Sea
KKKGNKKFNNIGGFGSISNLPKNIKRPKIVACTDGVGTKIEIANLLNKFDTIGIDLVAMSVNDLIVQGAKPILFLDYISINKIDLKKLKSILKGIVRGCEIAECELVGGETAEMPGTYEKGKFDIAGFAMGVVDEKKILNKKKIKKGNLILAVPSSGIHSNGYSLVRHILDKKKIDIKKNYFLKKNLIKPTKIYVREILNLNQNNLLNGCANITGGGLADNIKRIIPDKLCASIELNKIKTLKIFNWLKKNNISDKEMLRTFNCGVGFCLIINSKNLKKIKGYFSKEFEPYVIGKIIKSKDKVKLNAKIDGNKKINVAVFISG

SEQ ID NO: 195296 - protein, 280 aa, Unknown
  Bacterial polypetide isolated from the Sargasso Sea
AATDGVGTKLKIAIETKQLSTIGIDLVAMCVNDLICQGAEPLFFLDYFATGNLILEDAEQIIGGIATGCEEAGCALIGGETAEMPGMYSGEDFDLAGFSVGAVERGNEFPRATNDGDIIIGLSSDGIHSNGYSLVRKIVETSGLKWADKAPFDDLPLGKALLKPTKLYVKQCLILMNVSGIKAFAHITGGGLTENIVRTLTNGQGLEINLSSWQLAPIFKWLSDTGGVDKLEMLKTFNCGIGMTIICSPSSKDNVFSLLEKIGEQPIIIGRVTNSGTVKY

SEQ ID NO: 195297 - protein, 170 aa, Unknown
  Bacterial polypetide isolated from the Sargasso Sea
IITKDKVKNKNIVLAVPSSGLHSNGYSLVRKILKNTKIDKFLKKELLIPTKIYTKEILSLVNKGLINSSAHITGGGLIENITRSVPNNLTVNIDLSKIKVHSIFKWLKNKNISDTEMLRTFNCGVGFCLITDKNKVPKLKKYFNKKFQPYKIGFISKSSKRINLLKNIKW

SEQ ID NO: 195298 - protein, 195 aa, Unknown
  Bacterial polypetide isolated from the Sargasso Sea
MHAKDEYDLAGFCVGIVEADRLLDGSSISAGDRIIGIASSGPHSNGFSLIRKVLEQSPLGADTLINGQPIIDQLLAPTRIYSKSILHLLESIEVKGLAHITGGGLTENIPRVLPMGLGAQLKRSAWPTLPVFQWIEDMGVETKEMLRTFNCGIGMVVIVKPEITENAVSILNSCGEEAWIVGEIVEDKNNQAKVI

SEQ ID NO: 195299 - protein, 162 aa, Unknown
  Bacterial polypetide isolated from the Sargasso Sea
MKKGSLIKSTAYQQAGVSLGAADEVVDKVKPLAQRTFRPGVIGGLGGFGGLFHLDPNKWKNPVLVSGTDGVGTKLKLAFELEKHDTIGIDLVAMCVNDILVQGAEPLYFLDYLACGKLHPDKVATIVSGISEGCRQSNCALIGGETAEMPGMYSGEDYDLAG

SEQ ID NO: 195300 - protein, 291 aa, Unknown
  Bacterial polypetide isolated from the Sargasso Sea
SGQFVLDSKIKKPILVGATDGVGTKIEIARMMRNHKTIGIDLVAMCVNDLIVDQAKPLFFLDYISTGKLDISKGKEIIRGIIKGCKMSNCSLLGGETAEHPEVDSNDKYDLAGFCVGVKSGEVRASPKLKENDLIVGISSSGLHSNGYSLVRKIIKENKIKLNKKIEKNKTIGELLLKPTEIYVSPILEMYTKKIIKTCAHITGGGITENLPRSLNKNVSAKINLETFNLPTIFKWIQSFGVTQNEMLKTFNCGYGMIVILDRTKLSQFEKSIKDHKLKYSIIGSLVNSKK

SEQ ID NO: 195301 - protein, 146 aa, Unknown
  Bacterial polypetide isolated from the Sargasso Sea
MDYKSAGVNIDAGNEAVDRIKPLVKKTFNANVLNSLGGFAGMYEIPTGYKEPVLVSCTDGVGTKIKYAIEAQKYDSIGIDLVAMCVNDLICCGAKPLYFLDYIACHQLNPDQMESLIKGMTEGCLQSDCALIGGEMAEMNDLYNPN

SEQ ID NO: 195302 - protein, 260 aa, Unknown
  Bacterial polypetide isolated from the Sargasso Sea
DELKKPYVVTSTDGVGTKIELANELRKFDTIGIDLVAMCVNDIIVQGAKPYYFLDYISINKVNLKKLKSIMKGILEGCKISQCELVGGETAEMPGTYSKEKFDLAGFAVGFVEKNKILKKEKIKKNNIVLAVPSSGLHSNGFSLARYILKKKRINIKKNLYLKKELLTPTKIYVNEVTKLLKKNLINGCANITGGGLKDNLSRVLPENLDAEINLNNIKITKIFKFFNNLGINEKEMLKTFNCGVGFCLIVNSKNLKKIK

SEQ ID NO: 195303 - protein, 219 aa, Unknown
  Bacterial polypetide isolated from the Sargasso Sea
KGIVKGCKISDCELVGGETAEMPGTYSKGKFDIAGFAVGVVDKNKILDKSKIKVNDLIMAIPSSGIHSNGYSLVRYLLKKKKIKLKKNKFLKKKLIKPTKIYVREILNLVNKKLINGCANITGGGIKDNIKRILPSHLSANIDLYKIRPISIFKWIHNQGVIEKEMIKTFNCGVGFCIIVNPKNLIKVKKYFTKDFQPYLIGKIIKGKKNINLNGKIKW

SEQ ID NO: 195304 - protein, 242 aa, Unknown
  Bacterial polypetide isolated from the Sargasso Sea
QGAKPLFFLDYIALGKLELKKTKNILKGILKGCKISDCKLIGGETAEMPGIYTKNKFDLAGFSVGIVSKRKILNKKNVKKNDLILAIPSSGIHSNGYSLVRSILKKSKITKNLKKELLKPTKIYTKEILQLVNKDLINAAAHITGGGLIENIIRSIPNNLSVNIDLSKIKTKKIFKWLKSKRISDLEMLRTFNCGVGFCIIVNKKNINKIKKYFSREFMPYEIGYVSRSGIKKINFSNSISW

SEQ ID NO: 195305 - protein, 262 aa, Unknown
  Bacterial polypetide isolated from the Sargasso Sea
GTKLDLANKYKKFDTIGIDLVAMCVNDLIVQGAKPLFFLDYIALGKLELKKTKNILKGILKGCKISNCRLIGGETAEMPGIYSKNKFDLAGFSVGIVSKKKILNKKNVKKDDLIFAIPSSGIHSNGYSLVRSILKNNKITKNLKKELLRPTKIYAKEILQLVNKDLINAAAHITGGGLIENITRSVPNHLSINIDLSKIKTKKIFKWLKSKNISDLEMLRTFNCGVGFCIMINKKNVKKIKKYFSRGFMPYEIGYMSSSSKK

SEQ ID NO: 195306 - protein, 234 aa, Unknown
  Bacterial polypetide isolated from the Sargasso Sea
KGKEIIMGIIEGCKKSNCSLLGGETAEHPGIDSHDKYDLAGFCVGVKSGVTKTSLKLKENDLVVGISSSGPHSNGYSLIRKIIRENKIKLNKKIEKNKTIGELLLKPTEIYVSPILEMYSKKIIKTCAHITGGGITENLPRSLNDNISAKINLETFNLPTIFKWIKSFGVTQNEMLKTFNCGYGMIVILDRTKLNQFEKSIKRHKIKYSIIGNLVNSKKINKKVSYIGKLNFND

SEQ ID NO: 195307 - protein, 301 aa, Unknown
  Bacterial polypetide isolated from the Sargasso Sea
YEDPLFVSGTDGIGTKILLGIETDILDGLGHDLVGMCLNDILCHGAEPLFFLDYYASSKIDKNSFLKIMKSITEACKINNCSLIGGETAEMPGLYKKDDFDFAGFCVGAVERKKILPKRDVMKEDDLLYGIRSSGFHSNGYSLIRKVLKDKNIDLHRKTDFKSSYETNAAALMAPTKLYFPFLKKILTTNLINGISHITGGGIVGNAPRMLSENLSARIDKKFICDEEIFQWFQSLANISDDEMLKTFNCGLGLIMTISKNNYKEFDQLIKDENLDIFEIGKIEVNKSSRCTISEKITSCY

SEQ ID NO: 195308 - protein, 160 aa, Unknown
  Bacterial polypetide isolated from the Sargasso Sea
VRKIFEINKLDYSGSAPFDPNKRLDHILLAPTRIYVKSCLAAAQYGGVHALAHITGGGLIENIPRILPLDLGVVIDLTAWQLPPIFKWLAEIGRIPANEMLRTFNCGIGMAVIVDPTKAKALREIMEKKGETVFEIGSVVKASRINSQIKIKNIESQWKN

SEQ ID NO: 195309 - protein, 128 aa, Unknown
  Bacterial polypetide isolated from the Sargasso Sea
MDYKSAGVDVEAGRHFVERIRTSVEATHRPEVLGGLGGFGGLCRLPAGLEKPLLVAGTDGVGTKLELAQECGRHHGVGIDLVAMCANDVITCGAEPLFFLDYIATGKLSPAAMAEVVEGIASGCSQSG

SEQ ID NO: 195310 - protein, 260 aa, Unknown
  Bacterial polypetide isolated from the Sargasso Sea
IGIDLVAMCVNDILVLGAKPLFFLDYISIDKINLTKLKNIIKGIHQGCKMSECQLVGGETAEMPGTYSKNKFDLAGFSVGLVKKNNVLTKEKIKEKNLILAIPSSGLHSNGYSLLREVLKKKKINIKKNKFLRNEILKPTKIYVKEITNLLNRKLVNGCANITGGGIGDNIERVIPKNLCARIDLDKIKTYKIFRWINKNGVSQKEMLKTFNCGVGFCLIIKKNNFHKILKFFPKQYRPYIIGEIIKNKSKVKYTNNIRW

SEQ ID NO: 195311 - protein, 153 aa, Unknown
  Bacterial polypetide isolated from the Sargasso Sea
SSGPHSNGYSLIRKLFFEKRSKFIQDKRFINSVMKPTRIYVDIISSILTKIKVKGMAHITGGGLVENIPRILPKGMGIEIYHSRIPKNKLFKNIQDYSGLNFEEMIKVFNMGIGFVICINEKDLGALSKILNSKNEKFYVLGNVVKGNEFKIT

SEQ ID NO: 195312 - protein, 267 aa, Unknown
  Bacterial polypetide isolated from the Sargasso Sea
IANKYKKFETIGIDLVAMCVNDLIVQGAKPLFFLDYIAIGKLKLNKIKKILKGILKGCKISESSLIGGETAEMPGVYSYDKFDLAGFSVGIVSKKKILKKSNVKNKNVILAFPSNGLHSNGFSLVRLILKKNKIPNNLKKELLKPTKIYVKDVLKLYKKDLINSAAHITGGGILENIIRSVPKKLTVNLDLSKIKVNKIFSWIKSKNISDHEMLKTFNCGVGFCIIVNKKNVKKIIKIFKKKESQPYEIGYISNGNKRINLLNKIKW

SEQ ID NO: 195313 - protein, 193 aa, Unknown
  Bacterial polypetide isolated from the Sargasso Sea
SSRKNNILPKDNIKDGDYIIGLKSSGIHSNGFSLVRKILKDNNINMNEKISDFPEKSIGLNLLTPTKIYVKPIINEHKLNNIKACAHITGGGLIDNLPRVIPHNLTSVIYGDKIKPNEIFKWLKNMGNIKSSEMLKTFNCGIGMCVIVDPSKADQIVKNFNTQGEEASIIGKLEKNLKNKNIIIEDKNKIWHN

SEQ ID NO: 195314 - protein, 221 aa, Unknown
  Bacterial polypetide isolated from the Sargasso Sea
MNKNIFTYKKSGVNIDASDKFVNFISKISAKKRGKKKFSNIGGFGSISNIPNNIKEPKIVACTDGVGTKIEIANLIKKYDTIGIDLVAMSVNDLIVQGAKPIIFLDYISINKIDLKKLKSILKGIVKGCKISNCELVGGETAEMPGTYEKGKFDIAGFAVGIVAQKNILNINKIKKNDLILAIPSSGIHSNGYSLIRHILKKKKIDIKKNTFLKKELIKPT

SEQ ID NO: 195315 - protein, 99 aa, Unknown
  Bacterial polypetide isolated from the Sargasso Sea
MDYKSAGVDVEAGRAFVQRIKSSVEATHRQEVVGGLGGFGGMMRLPADLRQPLLVSGTDGVGTKLELAQDHQAHHNVGIDLVAMCVNDVITSGAQPLFF

SEQ ID NO: 195316 - protein, 188 aa, Unknown
  Bacterial polypetide isolated from the Sargasso Sea
MIATEDIIKEKQPLPTLSYKGSGVDIETGNQLIELIKPITRSTARPGADGNIGGFGGIFDLKAAHFRDPILVAANDGVGTKLKLAIDTNNHNQVGIDLVAMCVNDIVVQGAEPLFFLDYYATGKLSLSSAKEVINGIAEGCLTAGCALIGGETAEMPGMYNGNDYDLAGFAVGAVERQDLLTNANAKE

SEQ ID NO: 195317 - protein, 265 aa, Unknown
  Bacterial polypetide isolated from the Sargasso Sea
NEIKRFNTIGIDLVAMCVNDLIVQGAKPFLFLDYISIDKINLNKMKEIIKGIVKGCELSNCNLVGGETAEMPGTYSPGKFDLAGFSVGLVEKKKILINKIKNNDLILAIPSNGIHSNGFSLVRRVLKVKKIKINKNKYLKKELIKPTKIYVKEIMKLIDKNLINGCANITGGGIGDNIKRVIPNNLCANIDLNKIKTQKIFRWLKYSGVSNSEMLKTFNCGVGFCLIINKKNLNKVKLNFDTNFKPYVIGKISKNKKKVNLSGKI

SEQ ID NO: 195318 - protein, 232 aa, Unknown
  Bacterial polypetide isolated from the Sargasso Sea
MKKYKFTYQKSGVNINASNQFIKYISKLTKKGNSKNKFKNIGSFGSINEIPKKFSNPLLVSSTDGVGTKLEIANILNKFDTIGIDLVAMCVNDILVLGAKPLFFLDYISIDKINLKKLKNIIKGIHEGCKISDCQLVGGETAEMPGTYSENKFDLAGFSVGVVNRNNVLKKEKIKEGNLILAVPSSGLHSNGYSLLREVLKKKRINIRKNKFLRNEILKPTRIYVKENYEFA

SEQ ID NO: 195319 - protein, 169 aa, Unknown
  Bacterial polypetide isolated from the Sargasso Sea
MKKIKNSYKNSGVDISLANKLVKHISQVSNKNVKKTKNSFQKDAIGGFGSLYDISKYKIKDPVIVSCTDGVGTKIELANKFKKYDTIGIDLVAMCVNDLIVQGAKPLFFLDYIAVGKLDLTKTKKILKGIFSGCVQSNCKLIGGETAEMPGVYSKDKFDLAGFSVGIVS

SEQ ID NO: 195320 - protein, 288 aa, Unknown
  Bacterial polypetide isolated from the Sargasso Sea
TDGVGTKLKLALKTNNLYGIGIDLVAMCVNDIIAQGGLPHFFMDYIATGKIETKQLTQIIKGIVKGCQLADCALVGGETAEMPGHYSGGSLDLAGFCIGASERENVFNINNVVEKNIVIAVESSGLHSNGYSLIRRLMTKKLINLEDKTPFDQSLKFKEILLKPTFIYSALFKKIKSKIKINGITHITGGGLIENPPRTFSKNLKIIIDLETFQISDIYKWIKEEANLNWIELLKTFNCGIGLLIYLDKNDGQKMINLINQFGFKAWVIGEIKKNKNKENVEFLGLKD

SEQ ID NO: 195321 - protein, 264 aa, Unknown
  Bacterial polypetide isolated from the Sargasso Sea
MRKVYNTYKKSGVNMATADKFVNYISRISRKTYHKNTELKYFKNIGSFGSIFDLSQSKMKKPIIVSSTDGVGTKIEIANKFKKYNTIGIDLVAMSVNDLIVQGAKPIFFLDYIATNKIESNKFKKILDGIVKGCKNSGCALLGGETAEMPKTYEKGKFDLAGFAVGLVEKKNLLTKNKIKKNDIILAIPSSGLHSNGYSLIHHLLKRKKNYNIPNKIKQELIRPTKIYVNELNKINSKKLINGCANITGGGLLNNLIRVIPKKL

SEQ ID NO: 195322 - protein, 114 aa, Unknown
  Bacterial polypetide isolated from the Sargasso Sea
MKSTAYQQAGVSLDAADEVVDKVKPLAQRTFRPGVIGGLGGFGGLFHLDPKKWKNPVLVSGTDGVGTKLKLAFELEKHDTIGIDLVAMCVNDILVQGAEPLYFLDYLACGKLHP

SEQ ID NO: 195323 - protein, 184 aa, Unknown
  Bacterial polypetide isolated from the Sargasso Sea
MDYKTSGVDIEAGREFVSEIKQAVEETHTSNVIEGIGGFGGLFRIPIDSFKKPVLVSGTDGVGTKLELAQSKNFHFEVGIDLVAMCMNDIITSGAKPLFFLDYIATGKLDKKQLLKVVQGISFGCGENNCSLLGGETAEMPGFYSKNKYDLAGFCVGIVDEDKLINGKKVSENDLIIALKSNGF

SEQ ID NO: 195324 - protein, 266 aa, Unknown
  Bacterial polypetide isolated from the Sargasso Sea
VAKRTARPEVMGGLGAFGALCEIPAGYKQPVLVSGTDGVGTKLRLALNLNKHDSIGQDLVAMCVNDLVVCGAEPLFFLDYYATGKLNVDVAATVVTGIGAGCELAGCSLVGGETAEMPGMYEGEDYDLAGFCVGVVEKAEIIDGSKVATGDALIALLSSGPHSNGYSLIRKIIEVSGTEIETTQVDGKPLTDLLMAPTRIYVKPLLKLIKDTGAVKAMAHITGGGLLDNIPRVLPKGAQAVVDVASWTRPAVFDWLQEKGNGMSTR

SEQ ID NO: 195325 - protein, 290 aa, Unknown
  Bacterial polypetide isolated from the Sargasso Sea
MKKVDYKSAGVNIDAGNKAVDLIKDGVKSTFTKNVLTGIGSFGSLYDLKPILDKYQNPVMVQSIDGVGTKTIIARKLNKFDTVGVDLLSACANDILVMGARPLTFLDYIANDKLKPDVVKEIVSGMVRACKETGVSLVGGETAEMPDTYLPGEHDLVGVITGVVEKEKIITGERIAIGDSIVGLPSSGLHTNGYSLARKVFFDIGGYSVKDKISELESSIGSTLLEPHINYTNHLFSTLDAGVDIHGIAHITGGGIIENLPRILPDGCAASIQKGTWPVLDVFNAIQSIG

SEQ ID NO: 195326 - protein, 285 aa, Unknown
  Bacterial polypetide isolated from the Sargasso Sea
LYDLKSILNGYKNPVMVQSIDGVGTKIIIARKLGKFDTIGIDLLSACANDILVMGARPLTFLDYIANDKLNPTIIEEIVSGMVKACQDTGVSLVGGETAEMPDTYLPGEHDLVGVITGVVEKDNIINGKKIVPGHSVLGLPSNGLHTNGYSFARKLFFEIGGYDVNDPIPGLDKSVGLTLLEPHINYTKHVFATLDAGVDIKGVAHITGGGLVENMPRILPDGCGVEIQKRSWPILPVFDVMQTIGNVNEDEMFRTFNMGIGMVFIVDANDVKLVKDALKELTHI

SEQ ID NO: 195327 - protein, 233 aa, Unknown
  Bacterial polypetide isolated from the Sargasso Sea
MSKKPNKLINHSITYIDSGVNIDEGNKLISEISHITKSTSIEGATGELGGFGGLFDLKKTGLKDPILVSSTDGVGTKLKLAIQTKSYFNIGIDLVAMCANDVLAQGAKPLFFMDYYATGKLNKDVAIEVIRGIAEGCKQSGCALIGGETAEMPGHYENDNFDLAGFCVGAVERKNLFKKCSVKSGDYVIGLSSSGIHSNGYSLVRKVLETHSINIFQKAPFDNTKILAEILME

SEQ ID NO: 195328 - protein, 225 aa, Unknown
  Bacterial polypetide isolated from the Sargasso Sea
MNKRTFTYKKSGVDINSSDKFVKYISNISSKKKGKKKFNNIGGFGSITNLPNNLINPKIVACTDGVGTKIEIANTLNKFDTIGIDLVAMSVNDLIVQGAKPLIFLDYISINKIDLNKLKLIIKGILKGCKQSGCELVGGETAEMPGTYEKGKFDIAGFAVGSVDKNKILSKNKIKKNDLIISIPSSGLHSNGYSLVRYLLNKKKINLKKNKFLKRELLKPTKIYV

SEQ ID NO: 195329 - protein, 283 aa, Unknown
  Bacterial polypetide isolated from the Sargasso Sea
KSGVNINAADRFVKFISNISTRNKGNKKFKNIGGFGSISNIPKNIRQPKIVASTDGVGTKIEIANMLGKYNTIGIDLVAMCVNDLIVQGAKPILFLDYISINKIDLKKLKSIIKGIVKGCKISDCELVGGETAEMPGTYEKGKFDIAGFSVGVVEEKKIIHKKKIKNGNLIIAIPSSGIHSNGYSLVRYILKKKKINLKKNKFIKNELLKPTKIYVKEILNLINKNFINGCANITGGGLKENIKRVIPEGLVANIDLSKIKVQKIFKWLKQNNIEDQEMLRTF

SEQ ID NO: 195330 - protein, 199 aa, Unknown
  Bacterial polypetide isolated from the Sargasso Sea
MDYKTAGVDVTAGRAFVDRIKSCVEKTHKSEVIGGLGGFGGCIRIPKGYESPVLVSGTDGVGTKLELAQQYGCHFGVGIDLVAMCVNDVITSGARPLFFLDYIASGNLTPDALAEVIEGIAAGCGQSDCSLLGGETAEMPGFYPSGRYDLAGFCVGIVENHQLIDGTKINDEDQIIGIKSNGVHSNGFSLVRKVLSMAN

SEQ ID NO: 195331 - protein, 243 aa, Unknown
  Bacterial polypetide isolated from the Sargasso Sea
PLFFLDYISINKINFTKLKSIIKGIVKGCLISNCNLVGGETAEMPGTYEKDKFDIAGFAVGIVGKKNILNKKKIKKNNLILAIPSSGLHSNGYSLVRYLIKKKKINLKKNIFLKKQLLEPTKIYVKEVLKLIDKNLLNGCANITGGGLADNIKRIIPKNLCAEINLKQIRTLEIFRWLKNEGISDKEMLKTFNCGVGFCLIINSKNLKKINKYFSKGFKPYIIGKIISGENKVKLDGKINWFR

SEQ ID NO: 195332 - protein, 255 aa, Unknown
  Bacterial polypetide isolated from the Sargasso Sea
MNSKQKAKISYKDSGVNIDRAEKLIASLKIPNSKRDKNVLSTIGGFSSLYKVSNDIKDPVIVSGTDGVGTKLRIAKKLKNHKYIGQDLVAMCVNDVITSGAKPIFFLDYLATSKIKQAVHADVLKSIQNACFKSGMSLIGGETAEMPGMYKADDYDLAGFCVGIVSQKKIICPSRVKNGNIILGISSNGFHSNGYSLINKLIERKRLNLQTKIGTTSIGQILIKPTKLYTDIVAMLLKKVKVHGLAHITGGGLQI

SEQ ID NO: 195333 - protein, 291 aa, Unknown
  Bacterial polypetide isolated from the Sargasso Sea
NYKYPHLVASTDGVGTNLEIANQLKKFDTIGIDLVAMCVNDLIVQGAKPFIFLDYISIDKINLYKLKNIIKGIAKGCKISECTLVGGETAEMPGTYTKNKFDIAGFAVGLVDKKQILTNKKIKNNNLILGIPASGIHSNGYSLVRNIIKKNKININKNKFLKKNLIEPTKIYTKEFLKAHNKNLINGCANITGGGLCENIKRVIPNNLTAIINLSKINTLDIFKWIKKKGVSDKEMLKTFNCGVGFCLIVDKKKVESIKKNFSKRYKPYVIGKIVKGKKRVKLNGKINWEK

SEQ ID NO: 195334 - protein, 251 aa, Unknown
  Bacterial polypetide isolated from the Sargasso Sea
QGAEPLFFLDYLGLSSMDTHRTVEIIKSIAKGCEIAGCSLIGGECAEMPDIYREGDFDVAGFAVGVVELKRATDPTRMAKGDVILGLASSGVHSNGYTLVRKIIESRKLDLNGVYTELDDERTLGEALLEPTRIYARSITQLLSGYTVKKVVTGMAHITGGGLPGNLNRALPEDLDAKIDLGAWEVPPIFRFLQSRGGVDEEEMYRVFNMGIGYCLVVRPTFAKAVERKLTRLGETVYRLGTIVKGKGRVR

SEQ ID NO: 195335 - protein, 246 aa, Unknown
  Bacterial polypetide isolated from the Sargasso Sea
AKPLTFLDYIANDKLKPKIVAEIVGGMAHACRDTGVSLVGGETAEMPDTYLPGEHDLVGIITGIVDKEKIITGKNILPGDILVGLPSNGLHTNGYSLARKIFFESEKYNVDTYIDSLKSTVGEALLKPHINYTNHVFKVLEKNIEIKGVAHITGGGLTENIPRILPDNCSVKIKKDTWPKLGLFSVLQNLGNVDEDEMYRAFNMGIGMVFIVDKNSIKNIRDTLENITQVYEIGEVIEGKNVVFYD

SEQ ID NO: 195336 - protein, 259 aa, Unknown
  Bacterial polypetide isolated from the Sargasso Sea
GIDLVAMSVNDILVQGAKPLIFLDYISINKINHKKLKEIVKGINYGCKISNCKLVGGETAEMPGTYSKGKFDIAGFCVGLVEKKNILKNQNIKQNDVVLAIPSSGLHSNGFSLVRYVLKKNKINYKKNKKIKKWLLEPTKIYVNEISKLIDKKLINGCAHITGGGIKDNLSRIIPKGKCAKINLNKIKTNSVFSWLKKNKIRESEMLKTFNCGVGFIIIINRKNLNKIKKHFKSKYAPYIIGNIINGKSKVLLNGKINW

SEQ ID NO: 195337 - protein, 252 aa, Unknown
  Bacterial polypetide isolated from the Sargasso Sea
MDYKTSGVDIEAGRDFVSEIKQAVEGTHTSNVIEGIGGFGGLFRIPIDSFKKPVLVSGTDGVGTKLELAQSKNFHFEVGIDLVAMCMNDIITSGAKPLFFLDYIATGKLDKKQLLQVVQGISYSCGENNCSLLGGETAEMPGFYSKNKYDLAGFCVGIVDEDKLISGKRVSENDLIIALKSNGVHSNGFSLVRKIIQNNNQIDKEFEKVSHLNFYDELLKPTKIYNNVINKILSENIDIKAMSHITGGGIPE

SEQ ID NO: 195338 - protein, 221 aa, Unknown
  Bacterial polypetide isolated from the Sargasso Sea
MNKKIFTYKKSGVNITTADSFVNFISSISSKKKGKKKFSNIGGFGSISDIPRNIKQPKIVACTDGVGTKIEVANILNRYDKIGIDLVAMSVNDLIVQGARPLVFLDYISINKIDLIKLKSIIKGIVKGCKLSGCELVGGETAEMPGTYEKGKLDIAGFAVGVVGKNKILDKNKIKENDLVLAIPSNGLHSNGYSLVRYVINQKKINIKKNKFLKTELLKPT

SEQ ID NO: 195339 - protein, 252 aa, Unknown
  Bacterial polypetide isolated from the Sargasso Sea
ILAAELDQYKGIGQDLVAMCSNDILCNKAKPLFFLDYFACNSVKSKQYTEILKSITIACKKINCSLVGGETAEMPSLYKGNHFDLAGFLIGIKEKHKLLKISKGDLIIGVKSNGFHSNGYSLIRKIIKQNKINLKRAIFNKQKLSDLIMRPTRLYHQLISYNDLKYIKTLSHITGGGILSNFKRSIPKATKFDFNINKLPKEYDFIKDNINISDIELMEIFNCGIGMIFIINKKYYNKFIKRNFFKLIGEIK

SEQ ID NO: 195340 - protein, 208 aa, Unknown
  Bacterial polypetide isolated from the Sargasso Sea
IGGETAEMPSMYPDGEYDLAGFAVGAVEKRKIIDGTTIAEGDVVLGLASSGAHSNGYSLVRKIIEVSRPDLNADFHGQRLQDAIMAPTRIYVKPLLSLIDKLTVKGMAHITGGGLTENVPRVLQDNLTAVLHKDAWTLPPLFQWLQKAGNVADDEMHRVFNCGIGMVVIVSPADAPAAIAHLKDAGETVYQIGEIRARQAGEAQTIVV

SEQ ID NO: 195341 - protein, 284 aa, Unknown
  Bacterial polypetide isolated from the Sargasso Sea
MNKTVFTYKKSGVNIDAADKFVKFISKLSSKKQGKKKLQNIGGFGSISDIPKNIKRPKIVACTDGVGTKIEIANLIKKYDTIGIDLVAMSVNDLIVQGAKPIIFLDYISINKIDLKKLNSILKGIIKGCKIANCELVGGETAEMPGTYEKGKFDIAGFAVGVVDQNKILTKKKIKKNDLILAIPSSGIHSNGYSLIRHLLKIKKINVNKNNFLKKELIKPTKIYVKEVLNLIDRNLLKSCANITGGGLADNISRIIPNKLCAEIDLDKVKTLKIFKWLKQKNIS

SEQ ID NO: 195342 - protein, 253 aa, Unknown
  Bacterial polypetide isolated from the Sargasso Sea
MIKNNLTYEKSGVNIKAANKFVKFISIISKKTKQNSNFNNIGSFGSITKISNKLKNPYIVASSDGVGTKIEIANLLNKFDTIGIDLVAMNVNDIIVQGAKPILFLDYISINKIDLKKLKSIIKGIVKGCKIAGCELVGGETAEMPGTYTHGKFDVAGFSIGLVNKKKIFKTNNIKKNDLIVALPSSGLHSNGYSLVRKILKIKKININKNKILKKELLRPTKIYVNEVINLNNKNLIKSCAHITGGGLEENIK

SEQ ID NO: 195343 - protein, 255 aa, Unknown
  Bacterial polypetide isolated from the Sargasso Sea
GIGGFASLFAINNKRYKNPVIVCGTDGVGTKLRLATLLNQHSSIGQDLLAMCVNDVITTGADPVLFLDYLATGSINLRIHKKVLKGIKTACDKHNIALIGGETAEMPGMYNKNDYDLAGFCVGLVDKGNILDKKNVKKDNILVGINSSGIHSNGFSLINNLIDKKFLSLNKKIYNIDIKKALIKPTLIYSDIIKKISMSVKLRSISHITGGGITENLPRVIPDNLSAKVIRNSWVMPKIFKIIQEKSKLTDDDML

SEQ ID NO: 195344 - protein, 237 aa, Unknown
  Bacterial polypetide isolated from the Sargasso Sea
YFATSKLDNSQAKRIIKGIADGCLQSEMALIGGETAEMPGVYQSGEFDLAGFSVGIVDYKKIIDGSKISEGDSIIGLASSGPHSNGYSLIRKLIEDNSVDLDEMINGEKIGAQIIKPTIIYSRSVLSCIEKYEVSSMAHITGGGFQENIIRAIPEGCQAIIDKNSWSFPPVFQWIQNQAGIDSNEMLRTFNCGIGYVLIVKADIKNSVIKHFQNEDLEAYEIGSITSGEKSVIINHG

SEQ ID NO: 195345 - protein, 231 aa, Unknown
  Bacterial polypetide isolated from the Sargasso Sea
INLKIHKTVLKGIKSACDKHNIILIGGETAEMPGMYSKNDYDLAGFCVGLVDKKNILDKKNVKKDNLLVGINSSGIHSNGFSLINNLINKKFLSLNKKINNIDIKKALIKPTLIYSDIIKKISMVVRLRSMSHITGGGITENLPRVIPDNLTAKVIRNSWVMPKIFKIIQEKSRLTDDDMLKTFNCGLGMIIIIDKKDELKVHNIIKKNGFRSYTIGKIIKRMKNQSICYD

SEQ ID NO: 195346 - protein, 295 aa, Unknown
  Bacterial polypetide isolated from the Sargasso Sea
NVLENIGGFAGMYKLNKEYKDPILVACTDGVGTKVSLAQDFNDLSNIGQDLVAMCVNDLIVCGAKPLFFLDYYASSKLNIQEASVVISSIANACNDAGCALLGGETAEMPGHYIDNNFDLAGFAVGCVDEKKIINNENTKSGDVLIGIESSGPHSNGFSLIRKIINNSKAKEQEINAIKEKVLKPTTLYPKLIMNLINNFKINSISHITGGGLTENLPRSISKNLSVEIKTDSWDMPKVFKWLKEEGDISNRDMFRIFNCGIGMVLIVDKNDVKDISNKISEMNFKNYVIGTGKK

SEQ ID NO: 195347 - protein, 275 aa, Unknown
  Bacterial polypetide isolated from the Sargasso Sea
NDHKTIGIDLVAMCVNDLIVDKATPLFFLDYISTGKLNISKGVDIIKGIIKGCKISHCALLGGETAEHPGYDINEKYDLAGFCVGVKSGISKKVLQLKKSDLIIGIESSGIHSNGFSLIRKIIKDNNISLKKKIIKNSTLGKILLKPTYIYADVILDLFSKNLIKTCSHITGGGVTENLPRSISKNTKAVIDLNKWKLPAIFKWISSFNVSQNEMLRTFNCGYGMIIVIDEKNLSRVIKIIKKYKFKSDIIGNIEIKKSAKEKSIEFIGRFDFHE

SEQ ID NO: 195348 - protein, 243 aa, Unknown
  Bacterial polypetide isolated from the Sargasso Sea
MKKKITYAKSGVNIDEGNIFVKKIQPFVKRTLSKNTIGNTTSFAALYSLDLKNIKNPVLVSCTDGVGTKVQLGVETNKIEGLGIDLVAMCINDLICTGAKPLFFLDYLATSKLNSDYHSKVIKAIAKGCIDSNCSLVGGETAEMPGMYKPSEFDLAGFSVGVVDRKKIISPEKVRAGDILIGIPSSGPHSNGYSLIRKLYSGKNKPKIKGKFLNAVMKPTRLYANLIHKLLLQQGSITGIANI

SEQ ID NO: 195349 - protein, 282 aa, Unknown
  Bacterial polypetide isolated from the Sargasso Sea
TDGVGTKLELAQNKKFHFEVGIDLVAMCINDIITSGAKPLFFLDYIATGKLDKKQLLQVVQGISYGCKENNCSLLGGETAEMPGFYSKNKYDLAGFCVGIVDEDKLINGKKVSENDLIIALKSNGVHSNGFSLVRKIIQTNHQIDKEFEKVSHLNFYDELLKPTKIYNNVIDKILSENIEIKAMSHITGGGIPENLPRCIPSDFIPYINTNSWDIPILFKFLKEKGKIPEKDFWNTFNLGVGFCLIIDKQFKDSILNICKDYDIDSWEIGKIVRKNDSTISK

SEQ ID NO: 195350 - protein, 250 aa, Unknown
  Bacterial polypetide isolated from the Sargasso Sea
MNNTKFTYQKSGVNITTADKFVDYISNKTRQKKNKSKFKNIGGFGSITDIPKIYKRPKLVASTDGVGTKIEISNELKKFDTIGIDLVAMCVNDLIVQGAKPLIFLDYISINKLELKKIKSVMKGIIKGCEISGSSLVGGETAEMPGTYEKGKFDIAGFSVGVVDENKILTKNKIKKNNIILAIPSSGIHSNGFSLIRYILKKKKINLKKNNFLKSELLKPTKIYVSEILKLVKKNFINGCANITGGGIPR

SEQ ID NO: 195351 - protein, 216 aa, Unknown
  Bacterial polypetide isolated from the Sargasso Sea
MASNKLTYSKSGVNIPKADSFVKFISSLARKSSKSGDFKNIGGFGAISPIPRQLKDPCIVTSTDGVGTKIEIANDLNKFDTIGIDLVAMCVNDLIVQGAKPYLFLDYISISKINLKKLKHLVRGIVKGCDIACCKLVGGETAEMPGTYTKGKFDIAGFAIGLVEKKKILNKKIRNNDLILAVPSNGLHSNGYSLVRYLLKKKKINLKTSKFLKDEL

SEQ ID NO: 195352 - protein, 165 aa, Unknown
  Bacterial polypetide isolated from the Sargasso Sea
MKKYKFTYQKSGVNINASNQFVKYISKLTKKGNSKNKFKNIGSFGSINEIPKKFNNPLLVSSTDGVGTKLEITNILNKFNTIGIDLVAMCVNDILVLGAKPLFFLDYISTDKINLTKLKSIIKGIHEGCKISNCQLVGGETAEMPGTYSKNKFDLAGFSVGLVNK

SEQ ID NO: 195353 - protein, 291 aa, Unknown
  Bacterial polypetide isolated from the Sargasso Sea
MNKKSKINYSFAGVDIDAGNRAVEIIKDEVKSTFSSNVLTGIGNFGSLFEIGDLLKTYRKPVLVQSIDGVGTKAIIARKMNRYNTIGLDLLSAAANDIIVMGARPLTFLDYIANDKLEPEIIKEIIVGIAQGCRDTGVSLVGGETAEMPNTYLPNEHDLVGVITGVVEKDEIITGESVKINDVVLGLPSSGLHTNGYSLARKLFFEIANYKIDSLIPGLKRTVGETLLEPHINYTNPVQSLLGKNFSVNGIAHITGGGLLENIPRVLPEGCDVKIKKNSWPPLPVFKTSNQ

SEQ ID NO: 195354 - protein, 180 aa, Unknown
  Bacterial polypetide isolated from the Sargasso Sea
GFHLPKPIKNGDLIIGLPSSGIHSNGFSLVRKIVEISGLNYKSPSPFSDNSLGLELLTPTKIYAKPCLKVIETGQILGLAHITGGGLTENIIRILEPGLGLEINLDSWTLPPVFNWLANAGSVDPVEMLKTFNCGIGMVLIIPSASKDLVKQMLNSFYDQVFEIGIVNSTGEVSFSGELL

SEQ ID NO: 195355 - protein, 218 aa, Unknown
  Bacterial polypetide isolated from the Sargasso Sea
KSFKNIGGFGSIFDISTLKMKKPLIVSSTDGVGTKIEISNKFKKYNTIGIDLVAMCVNDLIVQGAKPIFFLDYIAINKIKLNKMKKILNGIITGCKLADCALLGGETAEMPGTYGRDKFDLAGFSLGLVEEKNLLNKDKVKVNDLILAIPSSGIHSNGFSLIRHILKIKKNLKIPKRIKKELMKPTKIYVRELNKINNKKLITSCAHITGGGLINNLL

SEQ ID NO: 195356 - protein, 243 aa, Unknown
  Bacterial polypetide isolated from the Sargasso Sea
FQNIGGFGSITSIPKNIKNPQLVASTDGVGSKIEIANELNKFNTIGIDLVAMCVNDLIVQGAKPLIFLDYISINKINLKKLKQIIKGITKGCEISNCELVGGETAEMPATYSRGKIDIAGFSVGIVDKNKILDKSKIKVNDLILAIPSSGIHSNGYSLVRYVLEKKKINLKKNKFLKKKLIEPTKIYVKEVLNLINKKLINGCANITGGGLKDNVKRILPSHLSAYIDLDKIKTKSIFKWIHN

SEQ ID NO: 195357 - protein, 209 aa, Unknown
  Bacterial polypetide isolated from the Sargasso Sea
SGGETAELPDMYEESKFDLAGFALGAVERDNLITKDKIKSKNIILGLPSSGIHSNGFSLVRKIISSNNIKLSEKFNFKKNLGEELLTPTKIYVPILKKLNKNNLLNGIAHITGGGLIENIPRVLPDNSSAKILLKSWEIPEIFSWIKNVGNISDNEMLRTFNCGIGMALIVDKVNLTRVSNIFDEINEKIFIIGEIIQETHSPKVYIEN

SEQ ID NO: 195358 - protein, 196 aa, Unknown
  Bacterial polypetide isolated from the Sargasso Sea
MTKEIIENDPYKSAGVDIDAGNDLIKKIKTNVGLTHNKNVLGNFGGFAGMYKLNKNIKNPVLVACTDGVGTKVALAQEYNALNGIGQDLVAMCVNDLVVCGAQPLFFLDYFASSKLDVNEASIIIKGISEACISSGCALLGGETAEMPGHYNDNNFDLAGFSVGCVDERKIIGDKNVKSGDVLIGIESSGPHSNGF

SEQ ID NO: 195359 - protein, 265 aa, Unknown
  Bacterial polypetide isolated from the Sargasso Sea
YNDLSGIGQDLVAMCVNDLIVCGAKPLFFLDYYASSKLDVNEATTVVKSIADACVKSDCALLGGETAEMPGHYIDNNFDLAGFSVGCVSKDKIIKNDNVMCGNVLIGIESSGPHSNGFSLIRKIIKESKVNEEEKNIIAKRCLEPTLLYPKLIMELISNYKINSLSHITGGGLTENLPRSIPDNLCVEIDTDSWEMPNIFKWLKENGNISDDDMYRIFNCGIGMVLFVDEDEELNISSRIKELKMNSFVIGKVKNKKEESSVIFV

SEQ ID NO: 195360 - protein, 250 aa, Unknown
  Bacterial polypetide isolated from the Sargasso Sea
MNKSRFTYKKSGVNINAADKFINFIANNSSKNKGNKKLSNIGGFGSISDIPKNIKKPKIIACTDGVGTKIEIANLLNKYDTIGVDLVAMSVNDLIVQGAKPIFFLDYISINKIELPKLKSIIKGILKGCKLSGCELVGGETAEMPGTYERGKFDIAGFAVGIVDEKKILNKEKIKKNDLVMAIPSSGIHSNGYSLVRYLLKKKRINISKKEFLKKELMRPTKIYVKEILKLVDKNLIHSCANITGGGLAD

SEQ ID NO: 195361 - protein, 234 aa, Unknown
  Bacterial polypetide isolated from the Sargasso Sea
FLDYIATGKLDINKTKKILKGILKGCKLSKCDLIGGETAEMPGIYKNNDFDLAGFSVGIVSKKKILSKKRVRTNDIIMAVPSSGVHSNGYSLVRTILKRNKISNKIKNELLKPTKIYSSEILKLVKKNYINACAHITGGGLVENLLRSVPEKFSVKIDLSKIKVKKIFKWIKSNNISDKEMLRTFNCGVGFCLIVPKKNVKKITNFFPKEYLPYEIGQITYGSKKIDLINSLKW

SEQ ID NO: 195362 - protein, 181 aa, Unknown
  Bacterial polypetide isolated from the Sargasso Sea
KTKSSSKKEIIGGFGSLFDISKLKIKDPVIVSCTDGVGTKIELANRFKKFDTIGIDLVAMCVNDLIVQGAKPLFFLDYIAVGKLNLNKTKKILKGIFKGCSMSNCKLIGGETAEMPGIYSRNKFDLAGFSVGIVSKKRILSKEKVKNGDVVLAIPSSGIHSNGYSLVRSLIKKNQLDKKLK

SEQ ID NO: 195363 - protein, 233 aa, Unknown
  Bacterial polypetide isolated from the Sargasso Sea
MNKKHFTYKKSGVDINAADKFVRFISNISSKKKGKKKLDNIGGFGSISNMPKKLSDPKIVACTDGVGTKIEIANVLNKYNTIGIDLVAMSVNDLIVQGAKPLLFLDYISINKINLFKLKSIIKGIVKGCEISNCELVGGETAEMPGTYEKNKFDIAGFAVGIVDKKKILNKYKIKKNDIILGIPSNGLHSNGYSLVRYILKKKKINLKKNKFLSKELIRPTKIYVKENIRFIR

SEQ ID NO: 195364 - protein, 261 aa, Unknown
  Bacterial polypetide isolated from the Sargasso Sea
MGTIGQDLVAMCLNDMVTSGAHPLFFLDYFASSKLNVTETVSVIKGIAKACKKTNCSLIGGETAEMPNHYIGKNFDLAGFSVGIVEKKLIIDSSQVRKNNIIIGIESSGAHSNGYSLINKLIKESKLSKSEKIKLIKLALKPTHLYTNVILDLVKKVKVKSIANITGGGLTENIPRSIPNTLSSEIYLNNWKMPLLFSALQELGKIQIRDMLRIFNCGIGMTLVIEPKDLDTTMKVLSKHKFKGFMIGKVVKKSSSEITFL

SEQ ID NO: 195365 - protein, 245 aa, Unknown
  Bacterial polypetide isolated from the Sargasso Sea
MTKEIIENDPYKLAGVDIDAGNNFVDRIKKSVAASHNKNVLENIGGFAGMYELDKDIENPVLVACTDGVGTKVSLAQQCNDLSGIGQDLVAMCVNDLIVCGAKPLFFLDYYASAKLDVNEATTVVKSIADACIESNCSLLGGETAEMPGHYIDNNFDLAGFSVGCVSKDKIIKNDNVMNGNVLIGIESSGPHSNGFSLIRKIIKESKVNEQEKTKIIKKCLEPTLLYPRLIMNLISNFKINSLSH

SEQ ID NO: 195366 - protein, 280 aa, Unknown
  Bacterial polypetide isolated from the Sargasso Sea
DPLLVSGTDGIGTKILLGIETDILDGLGHDLVGMCLNDILCHGAEPLFFLDYYASSKIDKNSFLKIMKSITEACKINNCSLIGGETAEMPGLYKKDDFDFAGFCVGAVERKKILPKRDVMKEDDLLYGIRSSGFHSNGYSLIRKVLKDKNIDLHKETEFKSSYQTNAAALMAPTKLYFPFLKKILTTNLINGISHITGGGIIGNAPRMLSENLSARIDKKFICDEEIFQWFQSLANISDEEMLKTFNCGLGLIMTISKNNYKEFEQLIKDENLDILKLGK

SEQ ID NO: 195367 - protein, 202 aa, Unknown
  Bacterial polypetide isolated from the Sargasso Sea
MFTYKKSGVDINAADRFVRYISTISSKKRGKKKFNNIGGFGSISNIPNNIKNPKIVASTDGVGTKIEIANLINKYDTIGIDLVAMSVNDLIVQGAKPLFFLDYISINKIDLIKLKLIIKGILKGCDISNCDLVGGETAEMPGTYEKGKFDIAGFAVGIVDQKKILNKDKIKNNDLVLAVPSSGLHSNGYSLVRNIINKKKIN

SEQ ID NO: 195368 - protein, 253 aa, Unknown
  Bacterial polypetide isolated from the Sargasso Sea
MTTYKEAGVDIENTDALVEDISQLSKSTNRNGNFDKIGGFGGIFDLKNCGYEDPLLVSGTDGIGTKILLGIETDILDGLGHDLVGMCLNDILCHGAEPLFFLDYYASSKIDKNSFLKIMKSITEACKINNCSLIGGETAEMPGLYKKDDFDFAGFCVGAVERKKILPKRDVMKEDDLLYGIRSSGFHSNGYSLIRKVLKDKNIDLHKETEFKSSYETNAAALMAPTKLYFPFLKKILTTNLINGISHITGGGI

SEQ ID NO: 195369 - protein, 241 aa, Unknown
  Bacterial polypetide isolated from the Sargasso Sea
PKLVASTDGVGTKIEIANLLNKFNTIGIDLVAMCVNDLIIQGARPLLFLDYISINKLNLKKLKSIIRGIVEGCKISNCELAGGETAEMPGTYSEGKFDIAGFSIGIVDKKKILLKKKIKKNNLILAIPSNGLHSNGFSLIRYIINRKKINIKKNIFLKKELLKPTKIYVKEVLNLHEKKIINGCANITGGGLKDNIVRIVPDGLCAKIDLNKIKIQPIFKWLKNQGINDKEMLKTFNCGIG

SEQ ID NO: 195370 - protein, 295 aa, Unknown
  Bacterial polypetide isolated from the Sargasso Sea
PLLVSGTDGVGTKLELAQEHGSHHGVGIDLVAMCVNDVITSGAAPLFFLDYMATGALAPSAMAEVVEGIADGCRQSGCALLGGETAEMPGFYPKGRYDLAGFCVAVVEEDELIDGQRIQPGDSVIGVASSGVHSNGFSLVRKVLEKANANANTLYGDDQRPLIDDLLAPTSLYADLVQHLLQSGCELHGMAHITGGGLPENLPRCLPDGCSARIDASSWTRPPLFRWLQEAGDIPERDLWHTFNLGIGFCLVVPAGSETAVIEHCRGKNHRAWVIGNVTSNTPGSAAVLDRCSRP

SEQ ID NO: 195371 - protein, 199 aa, Unknown
  Bacterial polypetide isolated from the Sargasso Sea
MKKTKNNYKKSGVNIETADKFTKYIGKYSQQAFKKKLNKFSRSNIGKFASVFDIKPFKIKDPILVASTDGVGTKLEIANRFNKFDTIGIDLVAMCVNDLIVQGAKPLFFLDYIATGKINLNKMKKIVRGIITGCKISNCILVGGETAEMPGTYGKNKFDLAGFSVGMVSRKKILSNNKVKNKDIILAVPSSGLHSNGFS

SEQ ID NO: 195372 - protein, 261 aa, Unknown
  Bacterial polypetide isolated from the Sargasso Sea
IGIDLVAMSVNDLIVQGARPLFFLDYISINKIDLKKMKSIIRGIVKGCNIAECSLVGGETAEMPDTYEKGKFDIAGFAVGITDKKKILYKNKIKKGDLILAVPSSGLHSNGFSLVRHLLKIKKINVKKNLFLKKELIKPTKIYVKEILNLVKRNLLNGCSNITGGGLADNISRVVPNNLSVEIDLNRIKPLKIFNWLKKYKISDKEMLKTFNCGVGFCLIINPKYIKKINRFFSKEYKPYVIGKITKNRNKVSLNGKVNWL

SEQ ID NO: 195373 - protein, 211 aa, Unknown
  Bacterial polypetide isolated from the Sargasso Sea
MYPRGSSVSTPTPLSYKDAGVDIDAGNALVSNIKAAVKRTRRPEVMGNLGGFGALCELPTKYKQPVLVSGTDGVGTKLRLAIDYKKHDTVGIDLVAMCVNDLIVQGAEPLFFLDYYATGKLDVETATSVVNGIGEGCFQSGCALIGGETAEMPGMYEGEDYDLARFCVGVVEKADIIDGSKVAAGDALIALASSGPHSNGYSLVRKVLEVS

SEQ ID NO: 195374 - protein, 278 aa, Unknown
  Bacterial polypetide isolated from the Sargasso Sea
NSKNKFKNIGSFGSLFDLSEYKIKDPVIVSSTDGVGTKLELANYFKKFDTIGIDLVAMCVNDLIVLGAKPLFFLDYIAIGKINLKKVKKILAGIVSGCKQSDCELIGGETAEMPGTYEKNKFDLAGFSVGIISKKKILKKNNVKKGDIILAFPSSGLHSNGYSLVRHILKNNKIPKSLSKELLKPTKIYVKEIKKLVSKNLISAAAHITGGGISENIVRSVPSNLSVEIDLAKIKTQKIFSWIKSKNLDDLEMLNTFNCGVGFCIIVKKNNLKKIYKS

SEQ ID NO: 195375 - protein, 140 aa, Unknown
  Bacterial polypetide isolated from the Sargasso Sea
MDYKTSGVDIEAGREFVSEIKKAVEETHTSNVIEGIGGFGGLFRIPIDSFKKPVLVSGTDGVGTKLELAQSKNFHFEVGIDLVAMCMNDIITSGAKPLFFLDYIATGKLDKKQLLKVVQGISHGCGENNCSLLGGETAEM

SEQ ID NO: 195376 - protein, 203 aa, Unknown
  Bacterial polypetide isolated from the Sargasso Sea
MRRRCAIFAAFQRVNRDSRVHPRQGAFLRPAHGLIPRADGMARGFIMTDGKNGITYSDAGVDIDAGNALVDRIKPAAKRTNRPGVMAGLGGFGALFDLKAAGYTDPVLVAATDGVGTKLRIAIDTGNVDGVGVDLVAMCVNDLVCQGAEPLFFLDYFCHRQLETETAARIIEGIARGCELSGCALIGGETAEMPGMYPEGDFD

SEQ ID NO: 195377 - protein, 239 aa, Unknown
  Bacterial polypetide isolated from the Sargasso Sea
MNNKKFTYKKSGVNIKAADKFVNFISSVSSKKKGKKRFSNIGGFGSISNISSNIKQPQIVACTDGVGTKIEIANTLNKYDTIGIDLVAMSVNDLIVQGAKPLLFLDYISINKINLIKLKSIIKGIVKGCKLSECDLVGGETAEMPGTYSKGKFDIAGFAVGVVSKNKILNKNKIKKNDLILAIPSSGLHSNGFSLVRYLIKKKKINIKKNKFLKSELLKPTKIYVKEVINLISKKLIYG

SEQ ID NO: 195378 - protein, 202 aa, Unknown
  Bacterial polypetide isolated from the Sargasso Sea
YDLAGFALGAVEKNNILPKNNIKDGDYIIGLKSSGIHSNGFSLVRKILKDNNINMNEKISDFPEKSIGLNLLTPTKIYVRPIINEHKLNNIKACAHITGGGLIDNLPRVIPHNLTSVIFGDKIIPNDIFKWLKKMGNIKSREMLKTFNCGIGMCVIVDPNKADQVLKNFNTQIEEAYIIGKLEKNSKNKNIIIEDENKIWNN

SEQ ID NO: 195379 - protein, 293 aa, Unknown
  Bacterial polypetide isolated from the Sargasso Sea
LNKIKVKDPILVSTTDGVGTKLELSNKFKKFDTIGIDLVAMCVNDLIVQGARPLFFLDYIAVGKINLVKMKNIVKGIIKGCKISKCILVGGETAEMPGTYSRNKFDLAGFAVGIVSRKNLIHKNKVNNNDIILAIPSNGLHSNGFSLVRQILRKKKINIFLKKELMKPTKIYVNYILKLVEKKLVNSSAHITGGGLIENITRSVPKNLTVNLDLSKIRVQKIFKWLKKENIDDYEMLKTFNCGIGFCIIVNKNNVKKIESFFDKKYKPYKIGYISKSKRKIKLLNKIKCKKKS

SEQ ID NO: 195380 - protein, 231 aa, Unknown
  Bacterial polypetide isolated from the Sargasso Sea
MDYKSAGVDVEAGRAFVQRIKSSVEATHRQEVVGGLGGFGGMMRLPAGLRQPLLVSGTDGVGTKLELAQDHQAHHNVGIDLVAMCVNDVITSGAQPLFFLDYMATGALSPDAMAEVVEGIADGCQQSGCSLLGGETAEMPGFYPAGRYDLAGFCVAVVEESELIDGHQVQPGDAVIGVASSGVHSNGFSLVRRVLAQANADRSTLYGPEQRPLIDDLLRPTQLYASLVQHL

SEQ ID NO: 195381 - protein, 261 aa, Unknown
  Bacterial polypetide isolated from the Sargasso Sea
DGVGTKSVMAYRHRGLKSFIGLGKDIVNHSVNDILVQGARPLFFLDYFGTDKLRLDEINYFIQGASEACIENGKFPILGGETAEMPLVYSKEKTDLVGCIIGFKDDRFFETPVNKNNILLGLPSDGPHTNGFSLINSLKDIDTSVVDNLLKPHKSYLSAVDGFVEEFGYSCLTSMAHITGGGLLENIKRVVPNNLDIFINYNQIEMPVWCEYIMGAGSVTKDEMLTVFNCGIGYVLIVDISKIDESKKDCLNRFLKIGYIY

SEQ ID NO: 195382 - protein, 245 aa, Unknown
  Bacterial polypetide isolated from the Sargasso Sea
DLVVQGAKPLFFLDYIAIGKLNIKKIKLILKGIIKGCNISDCDLIGGETAEMPGIYKKDKFDLAGFSVGIVSKKKLLTKKNVRSGDIILAIPSNGIHSNGYSLVRSVLKKNKITKRLKAELLKPTKIYTNEILNLTKNNLINAAAHITGGGLIENISRSVPKNLSINIDLSKIKVKNIFKWIKQKNITDKEMLTTFNCGVGFCLIVKRNNIKKIKRYFTKKYMPYEIGYISKDRKRLDFYKRIKW

SEQ ID NO: 195383 - protein, 340 aa, Unknown
  Bacterial polypetide isolated from the Sargasso Sea
MGLHKLTYAKSGVNIKKADKFVNFITSLSKKSNKSGDFKNIGGFGAISKVPNNLENPHIVTSTDGVGTKIEIANELNKFNTIGIDLVAMCVNDLIVQGAKPYLFLDYISVNKIDLKKLKNILKGIMKGCKLANCKLVGGETAEMPGTYDIGKFDIAGFAVGLVEKKKILKNKIRKNDLILAVPSNGLHSNGYSLVRQIIKKKKIKLKKNNFLKKELIRPTKIYVKELLKLIDKNILNGCANITGGGLKDNIKRIIPNNLCADIQLNKIKGLKIFKWLKKTGIKEDEMLKTFNCSVGFCIIINPENVKKVKKYFSKTFQPYIIGKISKNSKRVKFSGKVNW

SEQ ID NO: 195384 - protein, 347 aa, Unknown
  Bacterial polypetide isolated from the Sargasso Sea
MDYKTSGVDIEAGREFVSEIKQAVEGTHTSNVIEGIGGFGGLFRIPIDSFKKPVLVSGTDGVGTKLELAQSKNFHFEVGIDLVAMCMNDIITSGAKPLFFLDYIATGKLDKKQLLRVVQGISHGCGENNCSLLGGETAEMPGFYSKNKYDLAGFCVGIVDEDKLINGKKVSENDLIIALKSNGVHSNGFSLVRKIIQNNNLIDKEFENVFHLNFYNELLKPTKIYNNVITKILSENIEIKAMSHITGGGIPENLPRCIPSDFIPYINTSSWEIPIIFKFLKEQGSIPEKDFWNTFNLGVGFCLIIDKQFKDAILSICEDHDIDSWEIGKIVRKNDLTISKFLPEILT

SEQ ID NO: 195385 - protein, 298 aa, Unknown
  Bacterial polypetide isolated from the Sargasso Sea
LCALPQKYRDRVLFSGTDGVGTKLRLAMDLKRHDTIGIDLVAMCVNDLVVQGAEPLFFLDYYATGKLDVDTAASVINGIAEGCLQSGCALVGGETAEMPGMYHGEDYDVAGFCVGVVEKSEIIDGSKVADGDVLIALGSSGPHSNGYSLVRKIVEVSGCDPETTELEGKSLADHLLAPTRIYVKSILELIEKVDVHAIAHLTGGGFWENIPRVLPDNTQAVIDESSWQWPAVFNWLQTAGNVSQHEMYRTFNCGVGMVIALPAPEVDKALALLNEKGENAWKIGIIKASDSEQRVVIE

SEQ ID NO: 195386 - protein, 316 aa, Unknown
  Bacterial polypetide isolated from the Sargasso Sea
MNNKQKTKINYQKSGVSIDRADKLISSLKSKNINKDKNVLSNIGGFSSLYKIDTKIKDPVIVSGTDGVGTKLKIANKLKCHKHIGQDLVAMCVNDIITSGAKPLFFLDYLATSKIKQSIHSDVLRSIKNACHICGMSLIGGETAEMPGMYHKDDYDLAGFCVGIVSQKKIISPKKVKSGNIIIGLPSSGFHSNGFSLINKLIESKRLKLNKVFQKSILGNILIKPTRLYWKIINSLQKEIQIKGLAHITGGGITDNVPRILPENLSASIDLRTLKIPNIFRNIQELSKMNDLEMLQTFNCGIGMAVIVEEKNISKV

SEQ ID NO: 195387 - protein, 199 aa, Unknown
  Bacterial polypetide isolated from the Sargasso Sea
MKKLSYSSSGVSINKGNKFVSEIKNIIRKDKNLKKSNIGGFSGQYILDPKIKRPILVGATDGVGTKIEIARMMKNHKTIGIDLVAMCVNDLIVDQAKPLFFLDYISTGKLDITKGKEIIRGIIEGCKISNCSLLGGETAEHPEVDSNDKYDLAGFCVGVKNGEVKASAKLKENDLIVGISSSGLHSNGYSLVRKIIKEN

SEQ ID NO: 195388 - protein, 352 aa, Unknown
  Bacterial polypetide isolated from the Sargasso Sea
MYPRGSSVSTPTPLSYKDAGVDIDAGNALVSNIKAAVKRTRRPEVMGNLGGFGALCELPTKYKQPVLVSGTDGVGTKLRLAIDYKKHDTVGIDLVAMCVNDLIVQGAEPLFFLDYYATGKLDVETATSVVNGIGEGCFQSGCALIGGETAEMPGMYEGEDYDLAGFCVGVVEKADIIDGSKVAAGDALIALASSGPHSNGYSLVRKVLEVSQADPQQDLNGKPLIQHLLEPTKIYVKSLLKLIEASDVHAMAHITGGGFWENIPRVLPENCKAVIQGDSWQWPAVFNWLMENGNIAEYEMYRTFNCGVGMIVALPADKVDAALALLAAEGEQAWLIGAIAAREGNEEQVEIL

SEQ ID NO: 195389 - protein, 345 aa, Unknown
  Bacterial polypetide isolated from the Sargasso Sea
MKKINYKSAGVDIDAGNKAVDKIKDKVQSTFTGNVLTGIGGFGSLYRLNDIISQYKDPIMVQSIDGVGTKTIIARKMKKYNTIGIDLLSAAANDILVMGARPLTFLDYIANDKLKPDVIDEIVTGMVSACKETGVSLVGGETAEMPDTYLPGEHDLVGVITGIVDREKIIDGNKINLGDSILGLPSNGLHTNGYSFARKLFFDIGGYTVKDVIPDLGQSVGDALLEPHINYTNHIRILLDQEIEIKGIAHITGGGIVENIPRILPDNRSVNINLGSWPILPIFKTMQSIGSVDDSEMFRAFNMGIGMALIADSSNIDNIKTALKELTPVFEIGKVVEGDKEIIIA

SEQ ID NO: 195390 - protein, 343 aa, Unknown
  Bacterial polypetide isolated from the Sargasso Sea
MNKKKFTYKKSGVNIKAADKFVDFISTVSAKKRGKKKFSNIGGFGSITNIPGNIKQPRIVACTDGVGTKIEIANTLNKFDTIGIDLVAMSVNDLIVQGAKPLLFLDYISINKIDLKKLKAIIKGINKGCNQSECELVGGETAEMPGTYEKGKFDIAGFAVGVVGKNRILNKNKIKKNNLIVAIPSSGLHSNGYSLVRYLLKQKKINIKKNNFLKSELLKPTKIYVKEIMNLINNNLINSCANITGGGLSDNIKRVIPDKLTAHISLDKIKTSKIFNWLKKSGISDKEMLKTFNCGVGFCLIVKSRNLKKISKFFSKKYKPYVIGKILNGKNKVKLNGSINWYQ

SEQ ID NO: 195391 - protein, 337 aa, Unknown
  Bacterial polypetide isolated from the Sargasso Sea
MSLGKLTYTKSGVNIKKADKFVKHISKKTNKSGDFKNIGGFGAISNIPKKLNNPHIVTSTDGVGTKIEIANDIKKFNTIGIDLVAMCVNDLIVQGAKPYLFLDYISTNKINLKKLKNILKGIIKGCEIANCKLVGGETAEMPGTYENGKFDIAGFSVGLVEKNKILKGKIKKNDIILAVPSSGIHSNGYSLVRELIKRKRININKNKFLKTELIRPTKIYVKEVLNLINKNILNGCANITGGGLKDNIKRIIPNNLCAEIDLNKINTLKIFKWLKYSGIEEKEMLRTFNCGVGFCLIINKKNIQKVKKYFSKKFQPYVIGKISKNYKKVKFNGKIKW

SEQ ID NO: 195392 - protein, 256 aa, Unknown
  Bacterial polypetide isolated from the Sargasso Sea
MNKKKFTYKKSGVNIKAADKFIDFISSVSAKKRGKKKFSNIGGFGSITNIPGNIKQPRIVACTDGVGTKIEIANTLNKFDTIGVDLVAMSVNDLIVQGAKPLLFLDYISINKIDLKKLKAIIKGINKGCHQSECELVGGETAEMPGTYEKGKFDIAGFAVGVVGKSKILNKNKIKKNNLIIAIPSSGLHSNGYSLVRYLLKRKKINIKKNKFLKSELLKPTKIYVKEIMNLISKNLINGCANITGGGLPDNIKELY

SEQ ID NO: 195393 - protein, 347 aa, Unknown
  Bacterial polypetide isolated from the Sargasso Sea
MDYKTSGVDIEAGREFVSEIKHAVEVTHTSNVIEGIGGFGGLFRVPIDSFKKPVLVSGTDGVGTKLELAQSKNFHFEVGIDLVAMCMNDIITSGAKPLFFLDYIATGKLDKKQLLRVVQGISHGCGENNCSLLGGETAEMPGFYSKNKYDLAGFCVGIVDEDKLINGKKVFENDLIIALKSSGVHSNGFSLVRKIIQNNNQIDKEFEKVSYLNFYDELLKPTKIYNNVIHQILSENIEIKAMSHITGGGIPENLPRCMPSDFIPYINTSSWEIPILFKFLKDKGSIPEKDFWNTFNLGVGFCLIIDKQFKQAILSICKDHDIDSWEIGKIVRKNDSTISKFLPEILT

SEQ ID NO: 195394 - protein, 171 aa, Unknown
  Bacterial polypetide isolated from the Sargasso Sea
MKKKLYSYKDSGVNISLGNKFVKHIGRLTKKNVKKTKNNKLQNNIGSFGSLYDISSLKIKNPIIVSCTDGVGTKLELADKFKKLDTIGIDLVAMCVNDLIVQGAKPLFFLDYIAIDKIQLTKLKKILKGILQGCQKAKCSLIGGETAEMPGIYKKKKFDLAGFSVGIVQKK

SEQ ID NO: 195395 - protein, 342 aa, Unknown
  Bacterial polypetide isolated from the Sargasso Sea
MKKLDYKSAGVDIDAGNQAVDLIKSKVKSTFTKNVLTGIGSFGSLYDLKPILQKYDNPVLVQSIDGVGTKTIIAKKMKKYDTIGIDLLSAAANDILVMGARPLTFLDYIANDKLDPLIIKEIVDGMVSACKDSGVSLVGGETAEMPDVYLTGEHDLVGVITGVVEKKKIITGEKIQHGDVVLGLPSSGLHTNGFSLARKIFFEYGGYSISDNIDELDKSVGLTLLEPHTNYTNHVFSLLNKSIPINGIAHITGGGLVENIPRILPNNCAVEIIDNSWPILSVFKVMQSIGNVSSDEMYRAFNMGIGMVFIVNPDNMDEIILNLKPLTEVFHIGNVIKGVNEV

SEQ ID NO: 195396 - protein, 299 aa, Unknown
  Bacterial polypetide isolated from the Sargasso Sea
MIKSNLTYAKSGVNIKAADKFVKFISSFSKNSSKRTKFKNIGAFGSVTKVPSIYRNPHLVASTDGVGTKIEIANILNNFKTIGIDLVAMCVNDLIVQGAKPIIFLDYISVHKINLKKLKNIIKGIKKGCTISQCELVGGETAEMPGTYSKNKFDIAGFSVGIVSKNKILDSNKIKKDNLILAIPSSGIHSNGFSLIRNIIKKKRVNIRKNNFLRKELLKPTKIYVKEILSLIEKNKINGCAHITGGGLKDNIERIIPDKLTAKINLNQIKTKKIFNWIRQQGVKDKEMLKTFNCGVGFC

SEQ ID NO: 195397 - protein, 282 aa, Unknown
  Bacterial polypetide isolated from the Sargasso Sea
MVACTDGVGTKVSLAQQYNDLSGIGQDLVAMCVNDLIVCGAKPLFFLDYYASSKLNVNEAATVVKSISDACIESDCALLGGETAEMPGHYIDDNFDLAGFSVGCVSKDKIIKNDNVMCGNVLIGIESSGPHSNGFSLIRKIIKESKLTEEEKTKIAKKCLKPTILYPRLIMELISNYKINSLSHITGGGLTENLPRSITNDLCVEIDTSSWEMPDIFKWLKENGKISDNDMYRIFNCGIGMVLFVDEDEVLNISKRIKELEMNSFIIGTVKNKKEESSVIFV

SEQ ID NO: 195398 - protein, 343 aa, Unknown
  Bacterial polypetide isolated from the Sargasso Sea
MTKEIIENDPYKSAGVDIDAGNELIEKIKADVASTQNVNVLGNIGGFAGMYEIGKEFEEPILVACTDGVGTKVSLAMEYNYIDGIGQDLVAMCVNDLIVTGAKPLFFLDYYAASKLDVDHAAQIIKSIAGACKNSGCALLGGETAEMPGHYIDNNFDLAGFSVGCVEKKNIIDKNSVCDGDILIGIESSGPHSNGFSLIRKILAESDKSVDEKKAVATQVLEPTILYPTLISSLLKKHEIKSMSHITGGGLTENLPRSIPEKLCIELSVNSWDIPPVFKWLQSEGNIHNDDMYKIFNCGIGMVLFVDSSQEEDIRKSITEFNFKNYKIGTVSKTSGSKEVIFS

SEQ ID NO: 195399 - protein, 239 aa, Unknown
  Bacterial polypetide isolated from the Sargasso Sea
MKKKLYSYKNSGVNISLGNQFVKHISKLTKKNVKKANKKNNKNNIGSFGSLYDISSLNIKNPIIVSCTDGVGTKLELSDRYNKLNTIGIDLVAMCVNDLIVQGAKPLFFLDYIAIEKINLSKLKKIINGILKGCKIAGCDLIGGETAEMPGIYKKNKFDLAGFSTGIVSKNKILKKGNVKDGDIIIAIPSSGIHSNGYSLVRNILIKNKLPEKIKKQLLTPTKIYVNEILNLCKKNLIH

SEQ ID NO: 195400 - protein, 339 aa, Unknown
  Bacterial polypetide isolated from the Sargasso Sea
MTSKTKPTDPYAKAGVNIEKGNKLVKSIKASVNATHDKRVLGGIGGFAGLFQLGSKYKNPVLVGCTDGVGTKVALSQAHNKIHLTGQDLVAMCVNDMITCGAEPLFFLDYFAASKLEPRSTAKIVKGIAKACKKSNCALLGGETAEMPGHYVKNNFDLAGFSVGVVEKSKIIDGKNIKSGHIIIGIESSGPHSNGYSLIRSIIKKHKAPDSILHALLKPTHLYTAPILELIKKINVKGMAHITGGGLTENIPRILKSGLVADINLSSWKFPKTFKWLQEKGRISQADMLRIFNCGIGMIYIIDKTDLAKAQKILSSHKLRTFEIGSITKSNLKEQIRYY

SEQ ID NO: 195401 - protein, 350 aa, Unknown
  Bacterial polypetide isolated from the Sargasso Sea
MTSDNKDSLIDYKQAGVDVDAGYDLVKKIKPFVQKTKRPEILSGLGSFSAISRIPTHFKNPLLVSCTDGVGTKIEIAKAENNFENIGIDLVGMCVNDLIVCGAEPLLFLDYYVTDKLQVEVASKVIESIAKGCILANCSLVGGETAEHPGSFPDDSFDLAGFSIGIVDEEQMIGLDGPKNGDMIIGISSSGFHSNGYSLIRKVLQDYDIALSQEIEGETLGNILLKPTNIYVQEILSLNKLINISSMAHITGGGFFENIPRMLNENQKVNIDFNFSDWPASSYFKWIQDIANISDENMLKTFNCGIGLMLAVSPEDEEMALGTINQSSFFAKTIGIVEENKGNENILNFV

SEQ ID NO: 195402 - protein, 351 aa, Unknown
  Bacterial polypetide isolated from the Sargasso Sea
MGIAVSEQKTSLSYKDAGVDIDAGEALVDRIKGAVKRTTRKEVMGGLGGFGALCQIPAGYKEPVLVSGTDGVGTKLRLAMDLKRHDSVGIDLVAMCVNDIVVSGAEPLFFLDYYATGKLDVNTAATVVEGIAKGCELAGCALVGGETAEMPGMYHGEDYDIAGFSVGVVEKSEIIDGSKVKAGDQLIALAASGPHSNGFSLIRKVLEVSGQDPQTLLEGKTIADHLLEPTRIYVKNLLALIKSMPVHALCHITGGGFWENIPRVLPENTQANIKESSWQWPAIFSWLQQQGNVERHEMYRTFNCGVGMIVVVPATHLDAALAQLKAAGENAWHLGEINQVAADEPQVVIQG

SEQ ID NO: 195403 - protein, 359 aa, Unknown
  Bacterial polypetide isolated from the Sargasso Sea
MTINDKKQEKDIKDHNFSGATYKDSGVDVEAGYELVDSIKPFVEKTRRPEILSGLGSFSALSRIPKHIDNPILVTCTDGVGTKIEIAKELDDFSTIGIDLVAMCVNDLIVCGAEPLVFLDYYVTDKLNVETASTVIEGIAKGCELANCSLAGGETAEHPGSFPDNSFDLAGFSLGVVNENEIIGQDGPMNNDILIGIESSGFHSNGFSLLRKVIKDYEIDLHAQWKGEEIGEFLLKPTHIYVSEILALKKIVSVNAISHITGGGFIENIPRMLSKHQKAIIEHEFSDWPAGKYFEWLMQTADIPKENMLDTFNCGVGLVLSVHEADEENVLGALNQRYFAKRIGRIEDKEENEEPIVFV

SEQ ID NO: 195404 - protein, 346 aa, Unknown
  Bacterial polypetide isolated from the Sargasso Sea
MSNQKSKITYSDSGVDIDKANDLIDEIKPIIKETLTDDVLSNIGGFGGLFELSTKGIERPVLVSGTDGVGTKVKLAQELDILEGVGVDLVAMCVNDIITSGAKPLFFLDYFATSKLDNAQAKRIIKGIANGCVQSEMALIGGETAEMPGVYQLGDFDLAGFCVGVVDYEKIIDGSKISEGDSIIGLASSGPHSNGYSLIRKIIEKNSVDLDELIDGEKIGSRIIKPTIIYSKSVLSCLEKYEVKSMAHITGGGFKENIIRSIPDGFQAIIDKKSWNLPSVFGWIQGEAGIDSDEMLKTFNCGIGYVMIVKKDIRDSVINHFQDEGIEAYEIGSIKSGEKSVIINHG

SEQ ID NO: 195405 - protein, 351 aa, Unknown
  Bacterial polypetide isolated from the Sargasso Sea
MNQPKSAPDAQGLSYRDAGVDIDAGDALVDAIKPFAKKTMRDGVLGGIGGFGALFEVPKKYKEPVLVSGTDGVGTKLRLAFQLNKHDTVGQDLVAMSVNDILVQGAEPLFFLDYFACGKLDVGTAATVVKGIAHGCELSGCALIGGETAEMPGMYPDGEYDLAGFAVGAVEKSKIIDGSTIAPGDVVLGLASSGIHSNGFSLVRKIIERAQPDLNADFDGRSLADALMAPTHIYVKPLLALMQQIAVKGMAHITGGGLVENIPRVLREGLTAELDHRSWPLPPLFSWLQKHGGVADAEMHRVFNCGIGMAVVVSAADADAAIGLLSAAGEQVWKIGVIRESAAGEAQTLVV

SEQ ID NO: 195406 - protein, 340 aa, Unknown
  Bacterial polypetide isolated from the Sargasso Sea
MTISYKKAGVDITEIKKSQRAIGRLIGSTHNLQKMAKMTHGFGHYAGIVEIPGGKLLATHTDGVGTKVMIANLMKKYDTIGIDCIAMNVNDIICIGATPISFVDYIAANKNDQKIFKQIVSGLVKGAKKSSMPIVGGETAIMSDLIAGKGFGFDLAGMVVGMLSKKDMVLGDKIKPNDVIIGIKSSGLHSNGYSLARKALLTKYSVKDNIKGIGNLGNALLRPTEIYVKPVLEAVKKCKIHGLAHITGGSFTKLLRLKQIGYNLDSMPKTPALMQLIEDSGVKNEEMYKTFNMGIGFCIIAPENQAKNIHKIFKKHKTKSYEIGRISKNKGVFINKLKIA

SEQ ID NO: 195407 - protein, 273 aa, Unknown
  Bacterial polypetide isolated from the Sargasso Sea
MTKNKLDYKLAGVDINAGNEAVDLIKDSVKSTFSKNVLIGLGGFGALYDLKSIIKKYEHPVLVQSIDGVGTKTIIARKLNKYDTIGIDLLSAAANDIIVMGARPVTFLDYIANDKLKPSVIKEIISGMVMACKNSNVSLIGGETAEMPDTYLPGEHDLVGVITGLVEKDKIISGDLISAGDVVLGLPSSGLHTNGYSLARKVFFDIGGYGINDRLDGLNSSIGLTLLEPHINYTNDVFKLLDRDINIKGMAHITGGGLVENIPRVLPKNLWQL

SEQ ID NO: 195408 - protein, 351 aa, Unknown
  Bacterial polypetide isolated from the Sargasso Sea
MNPPKSAPDAQGLSYRDAGVDIDAGDALIDKIKPFAKKTLRDGVLGGIGGFGALFEVPKKYKEPVLVSGTDGVGTKLKLAFHLNKHDTVGQDLVAMSVNDILVQGAEPLFFLDYFACGKLDVDTAATVVKGIAQGCELSGCALIGGETAEMPGMYPDGEYDLAGFAVGAVEKSKIIDGSTIAEGDVVLGLASSGIHSNGFSLVRKIIERANPDLSADFHGRSLADALMAPTRIYVKPLLALMQKLSVKGMAHITGGGLVENIPRVLREGLTAELDQNAWPLPPLFKWLQEHGGVADAEMHRVFNCGIGMAVIVSAADADAAIADLTAAGEQVWKIGTVRATREGEAQTVVV

SEQ ID NO: 195409 - protein, 330 aa, Unknown
  Bacterial polypetide isolated from the Sargasso Sea
MTKNKNKYKDTGVDIEEGQKFIEDIKDLTKEPITSYSLSNIGSFSGYIETPSEFSDPVYALACDGVGTKIKIGLKLNNLKTIGIDLVAMCVNDLISSGAKPTAFLDYYGCSKLDRSKGKEIISGILEGCKIAGCELIGGETAEMPNHYTDNNFDLVGFSMGVNNRNQIIDGSSIESGNVILGLPSSGFHSNGYSLINEIIKDKAIDDSLMEKLLIPTKIYVNEILSLKEVCNINGMAHITGGGLNENLSRIANGMTLCIDKSKWSVPEIFEEIKALGNISEEEMFNVFNCGIGFCLVLDKENAKKAIEENSELIEIGFVSDRDEVDFKFI

SEQ ID NO: 195410 - protein, 342 aa, Unknown
  Bacterial polypetide isolated from the Sargasso Sea
MNKKKFTYKKSGVNITAADNFVNFISNVSSKKKGKKKFSNIGGFGSITNIPKGINQPKIVACTDGVGTKIEIANTLNKYDTIGIDLVAMSVNDLIVQGAKPLLFLDYISINKIDLKKLKSIIKGILKGCRLSGCELVGGETAEMPGTYEKGKFDIAGFAVGVVSKNKILNKNKIKKNNLILAVPSSGLHSNGFSLVRYLINQKKIDIKNNKFLKSELLKPTKIYVDEVLKLIDQNLINGCANITGGGLSDNIKRIIPDEMIADIDLDQIKTLNIFKWLKKNGISEKEMLKTFNCGVGFCLIINSKNLKKVIKYFSRDYRPYVIGKISKGNNKVKLNGSINWY

SEQ ID NO: 195411 - protein, 350 aa, Unknown
  Bacterial polypetide isolated from the Sargasso Sea
MNKKNSPITYSSSGVDIEKGNQLVEEIKPIIRETKVPGADIEIGGFGGLFDIMKLGFNDPLLVSSTDGVGTKLLLAIESNNVSGVGIDLVAMCVNDLIVQGAQPLFFLDYFATGILSKTTAKEVIKSIADGCIQSKCALIGGETAEMPGFYDENHFDLAGFAVGAVERKNLLPKEVKVNDDIIGLKSSGVHSNGFSLVRKILDVSKTQLDSNTPFNEFTFSEELLKPTRIYVKTIISLLNKTNAINAIAHITGGGITENLPRVFSSGKVQAEIYKDSWEKPEIFHWLQNAGNIEESEMLKTFNCGIGMILIVNPKETNNLLNKLKELGEEPSLIGKIIHNENPETLVVYK

SEQ ID NO: 195412 - protein, 332 aa, Unknown
  Bacterial polypetide isolated from the Sargasso Sea
MPTDDKEKENNLEELSYKQSGVDVDAGYELVKKIKPFVEKTRRPEILSGLGSFSALTRIPKHIEKPILVTCTDGVGTKIEIAKEMNNYSTIGIDLVAMCVNDLVVCGAEPLVFLDYYVTDKLDIETASKVIEGIAKGCEQANCSLVGGETAEHPGSFPDDSFDLAGFSMGVVDENSMIGQDGPKNDDVLIGIESSGFHSNGYSLLRKIITDYQLDLGSKIQKEEIGKVFLEPTNIYVSAILALKKILQINAIAHITGGGFFENIPRMLNENQKAIVNHNFSDWPAGHYFEWLMQLTNMPKENLLNTFNCGVGMVIAVSQSDEEDALGILNQS

SEQ ID NO: 195413 - protein, 344 aa, Unknown
  Bacterial polypetide isolated from the Sargasso Sea
MDYKSAGVDIEAGRHFVERIRTSVEATHRPEVLGGLGGFGGLCRLPGGLKNPLLVAGTDGVGTKLELAQDCSRHHGVGIDLVAMCANDVITCGAEPLFFLDYIATGKLSPAAMAEVVEGIASGCRQSGCSLLGGETAEMPGFYPAGRYDLAGFCVAVVDEPKLIDGQKIQSGDQLLAIASSGVHSNGFSLVRRILAANDTPLEASQADLDGRSAAEALLEPTLLYAPLVKALLQSPGLDLRGMAHITGGGLPENLPRALPKGVAARIDPGSWVRPSLFSWLQKLGSVPERDLWHTFNLGIGYVLVIPPKSCQQALQVVKDSGFEGWICGEIIPGEGVHGLPAGA

SEQ ID NO: 195414 - protein, 341 aa, Unknown
  Bacterial polypetide isolated from the Sargasso Sea
MAKRDKEHKELSYKKSGVDVEAGYALIDKIKPFVEKTKRPEILSGLGSFSALSRIPKHIKNPILVTCTDGVGTKIEIAKELNNFDSIGIDLVAMCVNDLIVCGAEPLVFLDYYVTDKLKVETAADVIKGIAKGCELANCSLVGGETAEHPGAFPENSFDLAGFALGVVEETEILGIEGPKNDDILIGIESSGFHSNGFSLIRKAINEFDIDLEKKIGREKLGNILLKPTHVYVNEILALKKITSINAIAHITGGGFDENIPRMLGENQKAIIKHDFDDWPSGKYFKWLMETTGIPKENLVNTFNCGVGLIISVNKSNEEDVLGALNQSLFAKTLEKFKKKN

SEQ ID NO: 195415 - protein, 222 aa, Unknown
  Bacterial polypetide isolated from the Sargasso Sea
MKKLSYSSSGVSINKGNEFVSKISNLIKKDKGLIKAEIGGFSGQFPLSTKIKKPILVGATDGVGTKIQIAEEMNDHKTIGIDLVAMCVNDLIVDKATPLFFLDYISTGKLNISKGVDIIKGIIKGCKISHCALLGGETAEHPGYDTKEKYDLAGFCVGVKSGISKKVLQLKKGDLIIGIESSGIHSNGFSLIRKIIKDNNISLKKKIIKNSTLGKILLKPTP

SEQ ID NO: 195416 - protein, 345 aa, Unknown
  Bacterial polypetide isolated from the Sargasso Sea
MDYKSAGVDVEAGRAFVERIRTSVEATHRPEVMGGLGGFGGMMRLPEGLRQPLLVAGTDGVGTKLELAQQHHGHHGVGIDLVAMCVNDVITSGASPLFFLDYMATGALSPDAMATVVEGISAGCRLSGCALLGGETAEMPGFYPDGRYDLAGFCVAVVEAEDLIDGSSIHPGDRVIGLASSGVHSNGYSLVRRVLERMEADASTVYGSQQRPLIKDLLTPTQLYPGVVQSLLKNGLTINGMAHVTGGGLPENLPRCLPEATRIAIDPGSWPRPDLFAWLQQAGDIPERDMWHTFNLGIGYCLVVPSDQENAVLDLCREQQQQAWSIGEVLSRAAGDPPEISGIPQ

SEQ ID NO: 195417 - protein, 223 aa, Unknown
  Bacterial polypetide isolated from the Sargasso Sea
MNKKKFTYKKSGVNINAADNFINFISKVSSKKKGKKKFSNIGGFGSITSIPHGINQPKIVACTDGVGTKIEIANMLNKYDTVGIDLVAMSVNDLIVQGAKPLLFLDYISINKIDLKKLKSIIKGILKGCKLSSCELVGGETAEMPGTYEKGKFDIAGFAVGVVGKNKILTKNRIKKNNLILAVPSSGLHSNGFSLVRYIINQKKINIKNNKFLKSELLKPTKI

SEQ ID NO: 195418 - protein, 310 aa, Unknown
  Bacterial polypetide isolated from the Sargasso Sea
MTKYTYSKSGVDINKGNKFIENIKKTIKSDKNKSSKASVIGGFAGHFKLNSLKNSPYLVAATDGVGTKLEIANDMNNHKTIGIDLVAMCVNDIVVTGAKPLFFLDYIATGKLDLKKSTDVIKGILKGCNQAGCELLGGETAEMPGFYSKGKYDIAGFSVGILEQRDIKKIKVKENDVVIGIKSSGLHSNGYSLVRNIIRDKKISLKKYFDFDKKKSIGNYLLQPTLIYVDLILELYKKNLIKSCAHITGGGIIENLPRILDKKFQAQIDLDKWDLGNLYKWLISCGINQRETSRTFNAGYGMTFILDKKI

SEQ ID NO: 195419 - protein, 266 aa, Unknown
  Bacterial polypetide isolated from the Sargasso Sea
NKFDTIGIDLVAMSVNDLIVQGAKPLFFLDYISINKINLSKLKSIIKGIVKGCVISNCELVGGETAEMPGTYEKGKFDIAGFAVGLVDESKILKKNKIKNNDLILAVPSSGLHSNGYSLVRSIIAKKKINIKKNRYLQKELIKPTKIYVKEILSLINKNLINGCANITGGGLPGNIGRVIPNGYCASINLNNIKPLKIFKWLKKNNIKDKEMLKTFNCGVGFCLIIKPKNQKKIINYFPKNFKPYLIGKIVKKPYKVKLNGKINWE

SEQ ID NO: 195420 - protein, 340 aa, Unknown
  Bacterial polypetide isolated from the Sargasso Sea
MTISYKKAGVDITEIKKSQRAIGKLIGSTHNLQKMAKMTHGFGHYAGIVEIPGGKLLATHTDGVGTKVMIANLMKKYDTIGIDCIAMNVNDIICIGATPISFVDYIAANKNDQRIFKQIVSGLVKGAKKSSMPIVGGETAIMSDLIAGKGFGFDLAGMVVGMLSKKDMVLGDKIKPNDVIIGIKSSGLHSNGYSLARKALLTKYSVKDNIKGIGNLGNALLRPTEIYVKPVLEAVKKCKIHGLAHITGGSFTKLLRLKQIGYNLDSMPKTPALMQLIEDSGVKNEEMYKTFNMGIGFCVIAPENQAKNIHKIFKKHKTKSYEIGRISKNKGVFINKLKIA

SEQ ID NO: 195421 - protein, 337 aa, Unknown
  Bacterial polypetide isolated from the Sargasso Sea
MKNDPYKKAGVDIKAGNDLVDKIRKDVASTFDKNVLGGIGSFSGFYSLPKGFKNPVLVACTDGVGTKVALAQKNSSLGTIGQDLVAMCVNDMVTSGAHPLFFLDYFASSKLNVTETATVIKSIAKACKKTNCSLIGGETAEMPNHYIGKNFDLAGFSVGIVEKKLIIDSSKVRKNNIIIGIESSGAHSNGYSLINKLIKESKLSKSEKMKLIKLALKPTHLYTNVILDLVKKVKVKSIANITGGGLTENIPRSIPNTLSSEIYLSNWKMPVLFSILQELGKIQIRDMLRIFNCGIGMTLVIEPKDFDTTMKVLSKHKFKGFMIGKVVNKSSSEITFL

SEQ ID NO: 195422 - protein, 171 aa, Unknown
  Bacterial polypetide isolated from the Sargasso Sea
MIATEDTIKEEQPSPKLSYQSSGVDIENGNQLIELIKPITRSTARPGADGKIGGFGGIFDLKAAHYRDPILVAANDGVGTKLKLAIETNNHKQVGIDLVAMCVNDLVVQGAEPLFFLDYYATGKLSLGSAKEVINGIAEGCLTAGCALIGGETAEMPGMYNGNDYDLAGFA

SEQ ID NO: 195423 - protein, 285 aa, Unknown
  Bacterial polypetide isolated from the Sargasso Sea
MDYKTSGVDIEAGREFVSEIKQAVEGTHTSNVIEGIGGFGGLFRIPIDSFKKPVLVSGTDGVGTKLELAQSKNFHFEVGIDLVAMCMNDIITSGAKPLFFLDYIATGKLDKKQLLRVVQGISHGCGENNCSLLGGETAEMPGFYSKNKYDLAGFCVGIVDEDKLINGKKVSENDLIIALKSNGVHSNGFSLVRKIIQNNNQIDKEFEKVSHLNFYDELLKPTKIYNNVITQMLSEDIEIKAMSHITGGGIPENLPRCIPSDFIPYINTSSWQIPILFKFLKEKGS

SEQ ID NO: 195424 - protein, 219 aa, Unknown
  Bacterial polypetide isolated from the Sargasso Sea
MTTYKEAGVDIENTDALVEDISELSKSTNRNGNFDKIGGFGGIFDLKNCGYEDPLLVSGTDGIGTKILLGIETDILDGLGHDLVGMCLNDILCHGAEPLFFLDYYASSKIDKNSFLKIMKSITEACKINNCSLIGGETAEMPGLYKKDDFDFAGFCVGAVERKKILPKRDVMKEDDLLYGIRSSGFHSNGYSLIRKVLKDKNIDLHKETEFKSSYETNA

SEQ ID NO: 195425 - protein, 244 aa, Unknown
  Bacterial polypetide isolated from the Sargasso Sea
MGARPVTFLDYIANDKLKPSVIKDIISGMVVACKNSNVSLVGGETAEMPDTYLPGEHDLVGVITGLVEKDKIISGDLISAGDVVLGLPSSGLHTNGYSLARKVFFDVGGYGINDRLNGLNSSIGLTLLEPHINYTNDVFKLLDKDINIKGMAHITGGGLVENIPRILPKNCMAIINKDAWSVLPVFNAIQSIGSIDESEMFRTFNMGIGMICIVSSDYVSSIKQLIRVREIGKIVSGDGEVKIV

SEQ ID NO: 195426 - protein, 360 aa, Unknown
  Bacterial polypetide isolated from the Sargasso Sea
MSTIKSKKTKTYIDAGVNIDIGDQFVDEIKPLVKKTNTFGAKASLGGFGGIFDLSKLSLKEPLLISSTDGVGTKLEIAIKMQKHDTIGIDLVAMCVNDILAEGAQPLFFLDYYATGKLDLNISKEILKGIVKGCIQAEISLIGGETAEMPGIYQQNIYDLAGFCVGAIEKKKYYSREFIKKGDIAIALSSSGIHSNGFSMVRSILKDNDISLYDADPFEKSKTIGETLLEPTKIYTKFLNKLNALNLIKRSVNITGGGLIKNPPRVFDDNLTLKINVNNWHLPKEFKWLKKKGNLSTFEMLKVFNCGIGMIVLVEKDYVDEVIQYANNGNENCFVIGEMVEKCESSVFFEGNLKKWSTMG

SEQ ID NO: 195427 - protein, 163 aa, Unknown
  Bacterial polypetide isolated from the Sargasso Sea
MKNDPYKKAGVDIKAGNDLVDKIRKDVASTFDKNVLGGIGSFSGFYSLPKGFKNPVLVACTDGVGTKVALAQKNSSLGTIGQDLVAMCVNDMVTSGAHPLFFLDYFASSKLNVTETATVIKGIAKACKKTNCSLIGGETAEMPNHYIGKNFDLAGFSVGIVEK

SEQ ID NO: 195428 - protein, 244 aa, Unknown
  Bacterial polypetide isolated from the Sargasso Sea
MGARPVTFLDYIANDKLKPSVIKEIISGMVVACKNSNVSLIGGETAEMPDTYLPGEHDLVGVITGLVEKDKIISGDLISAGDVVLGLPSSGLHTNGYSLARKVFFDIGGYGINDRLDGLNSSIGLTLLEPHINYTNDVFKLLDRDINIKGMAHITGGGLVENIPRVLPKNCMAIINKDAWSALPVFNVIQSIGSIDESEMFRTFNMGIGMICIVSSDDVSSIKQLISVREIGEIVSGDGGVKVV

SEQ ID NO: 195429 - protein, 281 aa, Unknown
  Bacterial polypetide isolated from the Sargasso Sea
MNKNLFTYKKSGVNIDAADKFVSFISNISSKKRGNKKNANIGGFGSVTDLPKNIKNPKIVACTDGVGTKIEIANLLNKYDTIGIDLVAMSVNDLIVQGAKPLFFLDYISINKIDLKKMKAIIRGIVKGCDIAECSLVGGETAEMPDTYAKGKFDIAGFAVGITDKKKILYKNKIKKGDLILAVPSSGLHSNGFSLVRHLLKIKKINIKKNIFLQKELIKPTKIYVKEILNLVKRNLLNGCANITGGGLADNIRRVVPNNLSVEIDLNKIKPLKIFSWLKKQ

SEQ ID NO: 195430 - protein, 347 aa, Unknown
  Bacterial polypetide isolated from the Sargasso Sea
MKKLSYSSSGVSINKGNKFVSEIKKIIRKDKNLKKSNIGGFSGQFVLDSKIKKPILVGATDGVGTKIEIARMMRDHKTIGIDLVAMCVNDLIVDQAKPLFFLDYISTGKLDISKGKEIIGGIIKGCKMSNCSLLGGETAEHPEVDSNDKYDLAGFCVGVKSGVAKASPKLRENDIIVGISSSGLHSNGYSLVRKIIKENKIKLNKKIEKNKTIGELLLKPTEIYVSPILEMYSKKIIKTCAHITGGGITENLPRSLNKNVSAKINLETFNLPTIFKWIQSFGVSQNEMLKTFNCGYGMIVILDRIKFNQFEKLIKKYKLKYSVIGNLVNSKKINKKVSYIGKLNFNV

SEQ ID NO: 195431 - protein, 324 aa, Unknown
  Bacterial polypetide isolated from the Sargasso Sea
MINLQNFVAKYSKHAFKNKKDLLAQGIGGFGAVHNFYKLKFKNPLLVSSTDGVGTKIEIANKLNKFDTIGIDLVAMCVNDLIVQGAKPLFFLDYIAVEKINLKKVKAIIKGIVKGCKISNCILVGGETAEMPGTYQNNKFDLAGFSVGVVEKNKLIHKGKVRNRDVVLAIPSSGLHSNGFSLVRHILKKQKINKFLKKELLEPTKIYVDPVIKLCEKKLIHSSANITGGGIVENISRSIPDKLTANIDLSRIRVTKIFKWIKKKNISESEMLKTFNCGVGFCLIAERKKINIIKKLFEKKYKPYEIGFISKSSKKIRLFNKVKW

SEQ ID NO: 195432 - protein, 313 aa, Unknown
  Bacterial polypetide isolated from the Sargasso Sea
MKKNLFTYKKSGVDIKAADKFVKFIASISSKKKGKKKLSNIGGFGSINNIPKNLKNPSIVACTDGVGTKIEIANLINKYDTIGIDLVAMSVNDLIVQGAKPLLFLDYISINKINLSKLKSIIHGIVKGCKISGCELVGGETAEMPETYDKGKFDIAGFAVGLVNKNKILNKKKIKKNDIILAIPSSGLHSNGFSLVRNILKKKRINIKKNIYLKKELIKPTKIYVEEVLSLVKNNLINGCANITGGGLPENIKRVIPDGLCAEIDLKKINTLQIFRWLKKNNISDIEMLKTFNCGVGFCLIINPKNINKINKF

SEQ ID NO: 195433 - protein, 191 aa, Unknown
  Bacterial polypetide isolated from the Sargasso Sea
MTSDNKDSKLDYKKAGVDVDAGYELVDKIKPFVKSTKRPEILSGLGSFSALSRIPSHIKNPLLVTCTDGVGTKIEIAKLENRFENIGIDLVAMCVNDLIVCGAEPLLFLDYYVTDKLQVDIASKVIEGIAEGCILANCSLVGGETAEHPGSFPENSFDLAGFSLGVVDEEEMIGMDGPKNGDILIGVSSSG

SEQ ID NO: 195434 - protein, 346 aa, Unknown
  Bacterial polypetide isolated from the Sargasso Sea
MKSTAYQQAGVSLDAADEVVDKVKPLAQRTFRPGVIGGLGGFGGLFHLDPNKWKNPVLVSGTDGVGTKLKLAFELEKHDTIGIDLVAMCVNDILVQGAEPLYFLDYLACGKLYPDKVATIVSGISEGCRQSNCALIGGETAEMPGMYSGEDYDLAGFAVGVVEKEKLINGEKILPGDQLIGLPSSGIHSNGFSLVRKILEDNSLHLNQSMDAHVSSGQKTLGEVLLEPTRIYVRPLLKLMQTIPIKGMVHVTGGGLPGNLPRMLPEGAAVELDSGSWENLPVFDWLQEKGNLSKEEMLPVFNMGIGFVICLSPEHLDQVFSILHQEGEQPVTIGKVISGNRHVIIH

SEQ ID NO: 195435 - protein, 350 aa, Unknown
  Bacterial polypetide isolated from the Sargasso Sea
MRKKNSPITYSSSGVDIEKGNQLVEEIKPIISKTKIPGADIDIGGFGGLFDIMKLGYNDPLLVSSTDGVGTKLLLAIESKNVTGVGIDLVAMCVNDLIVQGAQPLFFLDYFATGVLSKSTAKEVIKSIADGCIQSKCALIGGETAEMPGFYDKEHFDLAGFSVGAVEREKLLPKKIEIGDDIIGLKSSGVHSNGFSLVRKILDVSKTQLDDNTSFNDLSFSEELLKPTRIYVKTIMSLLGQTNAIKAIAHITGGGITENLPRVFSSNEVGAEIYKDSWKRPGIFNWLQKTGNIEDIEMLKTFNCGIGMILVVNPNETNDILMELKKLGEDPSLIGKIDDSKNLNCPVVYK

SEQ ID NO: 195436 - protein, 322 aa, Unknown
  Bacterial polypetide isolated from the Sargasso Sea
MPNEDFGKQGSISYRDAGVDINAGSKLVDRIGPVVKATQNTDLQLSSIGGFAALTQLPAHYKQPVLVSGTDGVGTKLELAEKFGRHETIGQDLVAMCVNDVLVCGGEPLIFLDYFATGKLDIDLAAEVIKGIAKGCQIAKCSLVGGETAEMPGFYQGSQYDLAGFCVGIVEKDKIINGAEITKGDKIIGLPSSGPHSNGFSLIRKILELKEIESSDLIDEMMNPTKIYVRSVLALLQKIKVKGMVHITGGGFYENIRRILPNQHLSANIDLSAWERPQIFRWLQDAGRVDEREMLTTFNCGIGYLIIVSSKDVEKTTEILAL

SEQ ID NO: 195437 - protein, 320 aa, Unknown
  Bacterial polypetide isolated from the Sargasso Sea
MKKINYKSAGVDIDAGNQAVDKIKGKVGSTFSKNVLTSIGGFGSLYSLKKLLTEYKEPIMVQSIDGVGTKTIIARKMKKYDTIGIDLLSAAANDILVMGAKPITFLDYIANDKLDPDVIDQIVSGMVIACRETGVSLVGGETAEMPDTYLPGEHDLVGVITGVVDKEKIIDGSKIKCHDSILAIPSNGLHTNGYSLARKLFFDIGKYDVRDEIPKLEKSVGLTLLEPHINYTNHINNLVKSDIEIKGIAHITGGGLIENIPRILPDLCAAKIDHDSWPILPIFNVMQSIGSIDDDEMFRAFNMGVGMVLIVDPELESRVI

SEQ ID NO: 195438 - protein, 352 aa, Unknown
  Bacterial polypetide isolated from the Sargasso Sea
MYPRGSSVSTPTPLSYKDAGVDIDAGNALVNNIKAAVKRTRRPEVMGNLGGFGALCELPTKYKQPVLVSGTDGVGTKLRLAIDYKKHDTVGIDLVAMCVNDLIVQGAEPLFFLDYYATGKLDVETATSVVNGIGEGCFQSGCALIGGETAEMPGMYEGEDYDLAGFCVGVVEKADIIDGSKVAAGDALIALASSGPHSNGYSLIRKVLEVSQADPQQDLNGKPLIQHLLEPTKIYVKSLLKLIEASDVHAMAHITGGGFWENIPRVLPENCKAVIQGDSWQWPAVFNWLMENGNIAEYEMYRTFNCGVGMIVALPADKVDAALALLAAEGEQAWLIGAIAAREGNEEQVEIL

SEQ ID NO: 195439 - protein, 350 aa, Unknown
  Bacterial polypetide isolated from the Sargasso Sea
MNKKNSSITYSSSGVDIEKGNQLVEEIKPIIKKTKVPGADIDIGGFGGLFDIMKLGFNDPLLVSSTDGVGTKLLLAIESNNVSGVGIDLVAMCVNDLIVQGAQPLFFLDYFATGILSKTTAKEVIKSIADGCIQSKCALIGGETAEMPGFYDENHFDLAGFAVGAVERKKLLPKEVKVNDDIIGLKSSGVHSNGFSLVRKILDISKTQLDSNTPFNEFTFSEELLKPTKIYVKTIISLLNKTNAINAIAHITGGGITENLPRVFSSRNIQAEIYKDSWEKPEIFHWLQNTGNIEESEMLKTFNCGIGMILVVNPKETNSLLNKLRDLGEEPALIGKITNNENPKTLVIYK

SEQ ID NO: 195440 - protein, 343 aa, Unknown
  Bacterial polypetide isolated from the Sargasso Sea
MTKDIIENDPYKSAGVDIEAGEDLINKIKKDVALTQNQNVIGNIGGFAGMYKLDKKYDSPVLVSCTDGVGTKVALAQEYNNLEGIGQDLVAMCVNDLVVCGAKPLFFLDYFASSKLVVNDAAQVIKSISKACIDSGCALLGGETAEMPGHYVNDNFDLAGFSVGCVEESHIIQSQNVGLGNVLIGIESSGPHSNGFSLIRKVLNESKISNSEKKVIAKKLLIPTTLYPKLIMKILKDFKINSISHITGGGLTENLPRSIPTDMSIEIDTNSWEMPEIFKWLSIEGNISVNNMFRIFNCGIGMVLIVEEGAAEEISKKISSLNFKNFFIGKVKEKTQNNSVVFL

SEQ ID NO: 195441 - protein, 337 aa, Unknown
  Bacterial polypetide isolated from the Sargasso Sea
MKNDPYKKAGVDIKAGNDLVDKIRKDVASTFDKNVLGGIGSFSGFYSLPKGFKNPVLVACTDGVGTKVALAQKNSSLGTIGQDLVAMCVNDMITSGAHPLFFLDYFASSKLNVTETATVIKSIAKACKKTNCSLIGGETAEMPNHYIGKNFDLAGFSVGIVEKKLIIDSSKVRKNNIIIGIESSGAHSNGYSLINKLIKESKLSKSEKMKLIKLALKPTHLYTNVILDLLKKVKVKSIANITGGGLTENIPRSIPNTLSSEIYLSNWKMPVLFSTLQKLGKIQIRDMLRIFNCGIGMTLVIEPKDFDTTMKVLSMHKFKGFMIGKVVNKSSSEITFL

SEQ ID NO: 195442 - protein, 117 aa, Unknown
  Bacterial polypetide isolated from the Sargasso Sea
MEPHINYTNDVFKLLDRDINIKGMAHITGGGLVENIPRVLPKNCMAIINKDAWSALPVFNAIQSIGSIDESEMFRTFNMGIGMICIVSSDDVSSIKQLISVREIGEIVSGDGGVKVV

SEQ ID NO: 195443 - protein, 342 aa, Unknown
  Bacterial polypetide isolated from the Sargasso Sea
MEKTKNSYKKSGVNIALANKFVKHIAKISTKNVRKKNKINKQDNIGAFGSVFDLTKIKIKDPLIVSCTDGVGTKIELANKFNKFDTIGIDLVAMCVNDLIVQGAKPLFFLDYIAVGKLNLKKIKLILKGILKGCEQSNCELIGGETAEMPGIYEKNKFDLAGFSVGVVSKKKVLNKKNVKSGNIILGIPSNGIHSNGYSLVRSVLKKNKVSQRLKNELLKPTKIYTKEILGLCKNNLINSAAHITGGGLFENLARSVPQDLCINIDLSKIKIKNIFKWLKRKNISDREMLNTFNCGIGFCIIIKKNNINKIKKYFKKDNSPFEIGYISKGKKRFNLINEMKW

SEQ ID NO: 195444 - protein, 202 aa, Unknown
  Bacterial polypetide isolated from the Sargasso Sea
LIGGETAEMPGIYSKNKFDLAGFSVGVVSKKKILSKKKVKKNDVVLAIPSSGLHSNGFSLVRNILKKNKIPKNLKKELLKPTKIYSNEILKISDAKLIHASAHITGGGLIENLLRSVPKNLTLNIDLSKIKIKKIFKWIKKRNVSDNEMLNTFNCGVGFCIILPKQNISKVEKFFTDEYKPYEIGFISEEKSKVNLSENLRW

SEQ ID NO: 195445 - protein, 342 aa, Unknown
  Bacterial polypetide isolated from the Sargasso Sea
MPNNLTYAKSGVNIRSADKFVKFISKITSKQSKNYKQNNIGNFGSITKIPINIKNVHIVASTDGVGTKIEIANELNKFNTIGIDLVAMSVNDILVQGGKPFIFLDYISINKIDQNKLKNIFKGIYKGCKISRCELVGGETAEMPGTYSKGKFDMAGFCVGLVEKNKILHKNKIKKNNLIIAIPSSGLHSNGYSLVRYLLKQKKINIKKNKFLKTELLKPTKIYVKEIMNLINKNLINGCANITGGGLSDNIKRIIPDKLSADISLDQIKTSKIFNWLKNNGISDMEMLKTFNCGVGFCLIIDRKNLKKIDKFFSKEYKPYIIGKISENNNKVTLNGSINWLQ

SEQ ID NO: 195446 - protein, 341 aa, Unknown
  Bacterial polypetide isolated from the Sargasso Sea
MKYSNLTYQKSGVNIKAADNFVKFLSSLSKKSRKSKNFQNIGGFGSITEIDKKTKNPQLVASTDGVGTKIEIANELNKFDTIGIDLVAMCVNDLIVQGAKPLIFLDYISLNKIDLKKLKQIIKGVVKGCKLSNCELVGGETAEMPGTYSKGKFDIAGFSVGIVEKKKILDKSKIKVNNLILGIPSSGVHSNGYSLIRYLLKKNKINLKKNKFLKKELIKPTKIYVKEILSLINKNLINGCANITGGGLVDNIKRVLPENYCAKIYLEKLKTNKIFKWLHLNGIGNSEMLKTFNCGIGFCIIINPKNLKKIKKYFPKKFEPYVIGKIINGKKRVDLNGKIKW

SEQ ID NO: 195447 - protein, 341 aa, Unknown
  Bacterial polypetide isolated from the Sargasso Sea
MTKEIIENDPYKLAGVDIDAGNSLVDKIKKSVAASHNKNVLDNIGGFAGMYELDKDIKNPVLVACTDGVGTKVSLAQQYNDLSGIGQDLVAMCVNDLIVCGAKPLFFLDYYASSKLDVNEATTVVKSIADACIKSDCALLGGETAEMPGHYVDNNFDLAGFSVGCVSKDKIIKNDNVMCGNVLIGIESSGPHSNGFSLIRKIIKESKVNKEEKNIIAKRCLEPTLLYPKLIMELISNYKINSLSHITGGGLTENLPRSIPDNLCVEIDTDSWEMPNIFKWLKENGNISDDDMYRIFNCGIGMVLFVDEDEELNISSRIKELKMNSFVIGKVKNKKEESSVI

SEQ ID NO: 195448 - protein, 347 aa, Unknown
  Bacterial polypetide isolated from the Sargasso Sea
MNKKITYKDAGVDIKKADEAIEMSKKEISSTFSKDVLSTIGGFGSMYSLKNIFNNFQDPVLVQSIDGVGTKMSVAMAANNFRFIGHDLVNACCNDVAATGAVPLTFLDYVAGSDLNKNIISEVIKSVAHECKAHGVSLVGGETAEMPGTYHKNEYDLVGVATGIVEKRNIVDGTKVKPGDVAIGVFSNGLHTNGYSLARKLIFETMELTTSDILPGHDISIEDCLLAPHTNYSSLITRITNAGIKIKSIAHITGGGLVDNIPRVIPGEFSLEIDTASWKKIPIFNFLQNNLDINTKDLYQTFNMGIGLVLIVDESKKEKLISFIGRDNCNSIGVVVNDKDNMVHLYG

SEQ ID NO: 195449 - protein, 344 aa, Unknown
  Bacterial polypetide isolated from the Sargasso Sea
MSKLDYKSAGVDIDAGNEAVDRIKNSVRSTFTTNVLTGLGSFGSLYELKPILDAYQDPVMVQSIDGVGTKTIIARKLGKFDTIGIDLLSAAANDILVMGARPLTFLDYIANDKLNPAIIEEIVSGMVKACKDTGVSLVGGETAEMPDTYLPGEHDLVGVITGVVEKDKIITGENIQPGHVALGLPSNGLHTNGYSFARKLFFEIGGYDVNDTIPELESSVGLTLLEPHINYTNHVFTALDAGIDIKGIAHITGGGLVENIPRILPDGCGVEVQKGSWPKVPVFDVMQSIGNVDEDEMARAFNMGIGMVFVVDSNDVKSIKDVLKDLTETYEIGEVVSGEGVKIG

SEQ ID NO: 195450 - protein, 260 aa, Unknown
  Bacterial polypetide isolated from the Sargasso Sea
MKKLSYSSSGVSINKGNEFVSKISNLIKKDKGLIKSEIGGFSGQFPLSTKIKKPILVGATDGVGTKIQIAEEMNNHKTIGIDLVAMCVNDLIVDKATPLFFLDYISTGKLNVPKGIDIIKGIIKGCKISHCALLGGETAEHPGYDIKEKYDLAGFCVGAKSGIPKKILKLKKSDLIIGIESSGIHSNGFSLIRKIIKDNNISLKKKIIKNSTLGKILLKPTHIYVDVILDLFSKNLIKTCSHITGGGVTENLPRSISKNT

SEQ ID NO: 195451 - protein, 338 aa, Unknown
  Bacterial polypetide isolated from the Sargasso Sea
MDKLTYKKSGVNINEADKFVKFISKIRPKLNRQRSSNIGAFASITEIPNKFKKPVIVTSTDGVGTKIEIANKLKKFDTIGVDLVAMCVNDLIVQGAKPLAFLDYISINKINLKKLKHIVSGIVKGCKISGCELVGGETAEMPGTYELNKFDIAGFAVGAVERKKILKKENVKKNNLILAIPSNGLHSNGYSLIRFLLESKKVNLKKNKFLKKELLKPTKIYVQEILKLASKNLINSCANITGGGIEENIKRVIPNNLTAEIDLKKIKTQKIFKWLRRSISEKEMIKTFNCGVGFCIIIKPQNLNKVINIFKKEYKPYVIGKIISGNKKTKLYSKIQWI

SEQ ID NO: 195452 - protein, 345 aa, Unknown
  Bacterial polypetide isolated from the Sargasso Sea
MSKLDYKSAGVDIDAGNEAVDRIKDKVRSTFTNNVLTGLGSFGSLFDLKPILKEYNNPVMVQSIDGVGTKTIIARKLDKFDTIGIDLLSACANDILVMGAKPLTFLDYIANEKLKPAIVEEIVSGMVTACKDTGVSLVGGETAEMPDTYLPGEHDLVGIITGVVEKEKAITGEKISPGDIVLGLPSSGLHTNGYSLARKVFFDIGGYNINDHISGLEKSVGLTLLEPHINYTNHVFNVLDRGIDIKGIAHITGGGLLENIPRVLPAQCDVEIKKGSWPTTPVFNVMKAIGSIDEKEMLRAFNMGIGMVFIVRPGDVGKVKDVLKDLSPIYEIGHVKNGSKNIFIK

SEQ ID NO: 195453 - protein, 330 aa, Unknown
  Bacterial polypetide isolated from the Sargasso Sea
MTKNKNKYKDTGVDIEEGQRFIEDIKDLTREPITSYSLSNIGSFSGYVDTPSEFSSPVYALACDGVGTKIKIALKLNNLKTIGIDLVAMCVNDLISSGAKPTAFLDYYGCSKLDRSKGKEIISGILEGCKLAGCELIGGETAEMPNHYTNDNFDLVGFSLGVNNKDEIIDGSSIEADNLVLGLPSSGFHSNGYSLINQIIEDKVIDNSLMQKLLTPTNIYVNDILALKKVCKINGMAHITGGGLNENLSRIANGKTICIDRKKWALPNIFEEIKELGNISEEEMFNVFNCGIGFCLVLDKLNARKAIKENPKLIEIGFVSDKGEVDFKFI

SEQ ID NO: 195454 - protein, 183 aa, Unknown
  Bacterial polypetide isolated from the Sargasso Sea
MSSQKKISYKKSGVDIAKGEKLVEKIKPIAKATFRKEVINEIGGFSSLMSIPKKYKNPVLVSSTDGVGTKIEIAEMMKNHTTIGIDLVAMCVNDLITSGAEPLFFLDYLVTDKINLKKSKEIISGIANGCKESNCSLIGGETAEHPKNFPKGKYDLAGFSVGIIEKENLKKEKLRSGDILVGL

SEQ ID NO: 195455 - protein, 253 aa, Unknown
  Bacterial polypetide isolated from the Sargasso Sea
MKKIQNNYKKSGVNISLANKFVDHIAKISKKNDQKTNKLFDSSNIGSFGSVFDISNINIKDPVIVSCTDGVGTKLDLANKYKKFDTIGIDLVAMCVNDLIVQGAKPLFFLDYMALGKLELNKTKSILKGILRGCKISNCKLIGGETAEMPGIYSKDKFDLAGFCVGIVSKKKILNKKNVKKNDLIFAIPSSGVHSNGYSLIRSILKKNKIPKNLKKELLKPTKIYTNEILNLVKKNLINSAAHITGGGLIENV

SEQ ID NO: 195456 - protein, 332 aa, Unknown
  Bacterial polypetide isolated from the Sargasso Sea
KSAGVDIDAGNDLINKIKKDVAATQNNNVLENIGGFAGMYKLGNNFKNPVLVACTDGVGTKVSLAQEYNDLSGIGQDLVAMCVNDLIVCGAEPLFFLDYYASSKLNVDEASLVIKSIAKACLDSGCSLLGGETAEMPGHYIDNNFDLAGFSVGCVDEKKILNDKNVKVGNILIGIESSGPHSNGFSLIRKIINDSQSPKTLKEDMVKQVLKPTILYPNLIMSLIKDFKVNSISHITGGGLLENLPRSIPNNLSIEIDETSWEIPKIFQWLKEEGNLSNNEMYRIFNCGIGMALFVEKDDSSKIMNKILQMGHKCFQIGVVSEKKDNDSIKFF

SEQ ID NO: 195457 - protein, 254 aa, Unknown
  Bacterial polypetide isolated from the Sargasso Sea
CVNDVITTGADPILFLDYLATGSINLKIHKTVLKGIKSACDKHNIILIGGETAEMPGMYSKNDYDLAGFCVGLVDKKNILNKKNVKKDNLLVGINSSGIHSNGFSLINNLINKKFLSLNKKINNIDIKKALIQPTLIYSDIIKKISMAVSLRSMSHITGGGITENLPRVIPDNLTAKVIRNSWVMPKIFKIIQEKSRLTDDDMLKTFNCGLGMIIIIDKKDELKVHNIIKKNGFRSYTIGKVIKRMKNQSICYD

SEQ ID NO: 195458 - protein, 332 aa, Unknown
  Bacterial polypetide isolated from the Sargasso Sea
IDHPGGFSGIIDFGDELLAMCTDGVGSKLMLASKLGQWETVPIDCMAMNVNDLLCIGAEPIAFVDYIATPKPDPEVHAALGRGLAKAAEIANVSLAGGETASLPDIVTELDMSGTSLGWLPKGDQLTGENIISGDVLIGIPSSGIHSNGFSLVRKILELSNADLEMPPPFDATNEYREIERFDINKELTLGEVLLNPTRIYVNPMIPLFEECRKNKSPCNYSDIKGIAHITGGGLSNLLRLHPSLGYHINNPLPSLPEFDWLQEVGGVSDYEMARTFNMGMGLCVVVSKESVNSILSWLEESGIRGCAEVGHVNDSGHRVTHINPDICFEHY

SEQ ID NO: 195459 - protein, 346 aa, Unknown
  Bacterial polypetide isolated from the Sargasso Sea
MSNQKSKITYSDSGVDIDKANDLIDEIKPMIKQTLTAGVLSNIGGFGGLFELNSEDYERPVLVSGTDGVGTKVKLAQQLDILEGVGVDLVAMCVNDIITSGAKPLFFLDYFATSKLDNSQAKRIIKGIADGCLQSEMALIGGETAEMPGVYQSGEFDLAGFSVGIVDYKKIIDGSKISEGDSIIGLASSGPHSNGYSLIRKLIEDNSVDLDEMINGEKIGAQIIKPTIIYSRSVLSCIEKYEVSSMAHITGGGFQENIIRAIPEGCQAIIDKNSWSLPPVFQWIQDQAGIDSNEMLRTFNCGIGYVLIVKADVKNSVIKHFQDEDLEAYEIGSITSGEKSVIINHG

SEQ ID NO: 195460 - protein, 302 aa, Unknown
  Bacterial polypetide isolated from the Sargasso Sea
SSIGGFAALTQLPAHYKQPVLVSGTDGVGTKLELADKFGRHETIGQDLVAMCVNDVLVCGGEPLIFLDYFATGKLDIDLAAEVIKGIAKGCQIAKCSLVGGETAEMPGFYQGSQYDLAGFCVGIVEKDKIINGAEITKGDKIIGLPSSGPHSNGFSLIRKILELKEIESSDLIDEMMNPTKIYVRSVLALLQKIKVKGMVHITGGGFYENIRRILPSQHLSANIDLSAWQRPQIFKWLQDAGRIDEREMLTTFNCGIGFLIIVSSEDAEKTTEILALEHEEPLLVGEIVSSDSPANSNQILI

SEQ ID NO: 195461 - protein, 256 aa, Unknown
  Bacterial polypetide isolated from the Sargasso Sea
MNVLVVGQGGREHALAWKLSKSKKVSKIFVAPGNGGTANEAKCFNKSINVNNFSALEELVNSENIELIVVGPEDPLVNGINNYFQDSRVKVFGPTKEGAQLEGSKIFSKKFMFENNIPTGAANFFSESKLAKNYLKTVEFPIVLKADGLAAGKGVLVAKELGEAMQWIEDVMEKNKFGDAGNEVLIEECLFGTELSYMGIMTPKGFYPFETSVDYKPLLDGNSGPNTGGMGCMSPSPFMNSELLKNINKQVVEPTA

SEQ ID NO: 195462 - protein, 346 aa, Unknown
  Bacterial polypetide isolated from the Sargasso Sea
LVDKIFVAPGNAGTSLESKAVNIEISPNDIEGLVSFSKKENIGLVIVGPEDPLVDGITDAFMKAGINCFGPQSIGAQLEGSKDFAKSFMKKHNIPTASYESFTDADHAKKYIQENELPLVIKADGLAAGKGVVIAENYETAIKTIDEFISETKYGEASKKIIIEEFLIGQELSYIVMVDGTEYLPLATSQDHKTIGDGDVGLNTGGMGAYSPVPFVNNELDTTIKEKVIEPTVRGLSKDGISFRGFLYAGLMIDSNMNPKVLEYNCRFGDPETQPIMLRLKSDLIDMIQTCFSGCISDYNVKWDNKSAMGVVISSHGYPESYETGKEIIGQETLSDRNDVKVFHSG

SEQ ID NO: 195463 - protein, 278 aa, Unknown
  Bacterial polypetide isolated from the Sargasso Sea
PNKVASQLEGSKIFTKNLCKKYNIPTAEFGIFKNADESYNYIDNAKHPLVIKADNLAAGKGVYICREQEESYLAVKEIFDGKFGIAKNILFEEFLEGEEMSYFIVSDGKTFKYFGSAQDHKRVGEGDKGKNTGGMGAYSPSRLFNKELEQKILEKIIKPTLKGINDLGTTYKGFLYAGLMIVKDEPFLIEYNVRMGDPECQTILPTLDTDIIKIFQSCVNEKLDEIEIKWINKKSLCVVLCSNGYPDKYEKNIIIENFEKLNLDENNYLFHAGTEIKD

SEQ ID NO: 195464 - protein, 209 aa, Unknown
  Bacterial polypetide isolated from the Sargasso Sea
MVNVLIIGSGGREHAFTWKASQSDLVDKIFVAPGNAGTSLEPKAENIEISSSDIEGLVSFSKKENIGLVIVGPEDPLVNGITDAFTEAGINCFGPESLGAQLEGSKDFAKSFMKKHNIPTASYESFTDADQAKNYIQENDLPLVIKADGLAAGKGVVIVEDHETANKTIDQFIGETKFGDASKKIIIEDFLVGQELSYIVMVDGTEYLP

SEQ ID NO: 195465 - protein, 262 aa, Unknown
  Bacterial polypetide isolated from the Sargasso Sea
MKIAILGNGGREHAIATKISKSPKLERLYCIPGNAGTDSIAVNVELDFYNFESLLQFLKENKIDLVIVGPEKPLVDGVVDFLLKENIKVFGPNKKVSQLEGSKIFTKKICERYNIPTAQFGVFRTAVEAYSYLKNANMPIVVKADGLAAGKGVYICEDLESSNKAVQEIFNGKFGLAEQVLIEEFLQGDEMSYFVLSDGKTYKRFNTAQDHKRVGEGDRGKNTGGMGAYSPSGLINAELDKKIITEVVNPTFQAIKEMGENY

SEQ ID NO: 195466 - protein, 203 aa, Unknown
  Bacterial polypetide isolated from the Sargasso Sea
NTGGMGAYSPAPVVDSIVHEKIMQDVIYPTLKGLREEGYKYVGFLYAGMMIDQDKNLKVLEFNCRFGDPETQPIMMRLKSDLADLCFKACESDLSNETLEWDEKKSLGVVIAAEGYPSKYEINKKIKNIPSEKNDLKVFHAGTRFQEDSLTSNGGRVMCVTALGSSIQSAQKKVYNAISEIAYEDAFYRKDIGYRAIDREKEK

SEQ ID NO: 195467 - protein, 290 aa, Unknown
  Bacterial polypetide isolated from the Sargasso Sea
ALAWKCSTDKFVEKVYVAPGNAGTFLEEKIENISLDINNNEDVSDFCVSNNIELVIVGPEDPLVNGLVDFLESKNIKVFGPRKGAAQLEGSKTFAKDFFIKYGIPTANYKSFDNHHDALNYLDKIDFPSVVKADGLAAGKGVIICDDREAAEKALEDIFESNAFGDAGNRVVIEDFLNGEEASFIAVVSDDQIIPLATSQDHKSVGDGDVGLNTGGMGAYSPAPIVTDEIHKRVIDEVMLPTMNGLKAEGFPYLGFLYAGLMIEGDEIKVLEFNCRFGDPETQPIMLRLE

SEQ ID NO: 195468 - protein, 329 aa, Unknown
  Bacterial polypetide isolated from the Sargasso Sea
GTHLEDKVSNIELNLNEFSSIEKFCLEEKVGLVIIGPEQPLVDGLTDFLQSKNIKTFGPSKNAAQLEGSKTFSKDFFVKYNIPTAEYKSFDNFESSIEYLNEISFPTVVKADGLAAGKGVIICQNSEEAIKALDSIFNDKAFGTAGNRVVIEEFLEGEEASFIAVVSKDKIIPLATSQDHKAVGDGDVGLNTGGMGAYSPAPIVTEEIHKKILNEVMYPTMNGLINEGSPYLGFLYAGLMIKDNEIKVLEFNCRFGDPETQPILLRLNSSLVELCKAAIDNELHTYSIQWTEKHSCGVVIASEGYPEDYESNKKVSIKENNIKDSKFVH

SEQ ID NO: 195469 - protein, 245 aa, Unknown
  Bacterial polypetide isolated from the Sargasso Sea
MKKNQRPEELKRILIVGSGGRENSIAWAISKNQSIEQIYVCPGNGGTANFEKCSCLKPKSEDAKTIINECQRLEIDLVIIGPEIPLAEGLANKMRQAGLTVFGPGKDGAQLEASKDWSKALMVENNIPTAKYWPAKTKEEALEILRRFNQPLVVKADGLAAGKGVTVCETIEESKEAIKDIFSGKFGSAGNKVILEEKIEGPEVSIFGLCDGEKLIVLPPAQDHKRLLNGDHGPNTGGMGAYAPA

SEQ ID NO: 195470 - protein, 260 aa, Unknown
  Bacterial polypetide isolated from the Sargasso Sea
KISNIEVDIENFQAIEEFCMTEKIDLVIIGPEQPLVMGLSDYLQSKNIKTFGPSQNAAQLEGSKTFSKDFFIKYDIPTAKYKSFDDYALALKHLDEIEYPTVVKADGLAAGKGVIICENIKEASEALKSIFKENTFGAAGNKVVIEEFLEGEEASFIAVVSKDKIIPLATSQDHKAVGDGDIGLNTGGMGAYSPAPIVTDTINKKILEKVMYPTMQGLIQEGYPYLGFLYAGLMIKGDEIKVLEFNCRFGDPETQPILLR

SEQ ID NO: 195471 - protein, 253 aa, Unknown
  Bacterial polypetide isolated from the Sargasso Sea
ALTVVGPEAPLAAGVVDEFRAHGLRIFGPSKAAAQLESSKAFSKDFMARHGIPTALYETFTDPVAAHAYVDRLGAPIVVKADGLAAGKGVVVATTLQEAHDAVDFMLVDNKYGVAHNDGGARVVIEEFLAGEEASFIVLCDGKNVLALATSQDHKRLKDGDQGPNTGGMGAYSPAPVVTADVHARAMREIILPTIRGMEKDGIPYTGFLYAGLMIDASGHPKTLEFNCRMGDPETQPIMMRLKSDLVDVMLAA

SEQ ID NO: 195472 - protein, 313 aa, Unknown
  Bacterial polypetide isolated from the Sargasso Sea
LERHNIPTATYKDFEDLDKAIEYVRSSTFPIVIKADGLAAGKGVIITETLAEAEDTLRRMLEGKIFGQAGSKVVIEEFLYGEEASFIAIVDDTRIVPLASSQDHKTRDEGDQGPNTGGMGAYSPAPVMTKKLSDQVMQDIILPTVEGMHADGMNYRGFLYAGLMIDPNGNTKVLEFNCRFGDPETQPILIRLRSDLAALCLSAFDGSLESIEIEWDPRASLGVVMASDGYPESYRKGDPITGLDNILGKNSKVFHAGTTLDEKNIVTNGGRVLCAVALGKNVTEAAANAYDITEKIDWEGAFYRHDIGYRAIK

SEQ ID NO: 195473 - protein, 251 aa, Unknown
  Bacterial polypetide isolated from the Sargasso Sea
MNLAIIGSGGREHALCYKLRQSKEVKKIFCIPGNAGTKNLAENIEHDLKNFDGIYKIIKEKNIDFVLVGPEEPLVNGIVDFLSKNNVKVFGPNKFSSQLEGSKAFMKNICKDYNIPTANFGVFDKLDQAVNFIKKNKMPIVVKADGIASGKGVFICKNKEEAINITKEILNGKFKSSKKVVLEEFLEGEELSYFCVVDENNYHFFGSAQDHKKVGEKDTGPNTGGMGAYSPANLLTEELEEKIKKRIIEPT

SEQ ID NO: 195474 - protein, 313 aa, Unknown
  Bacterial polypetide isolated from the Sargasso Sea
EPKTKNIDISASDIDALISFSEKENIDLVIVGPEDPLVNGITDRFKKIGIKCFGPESLGAQLEGSKDFAKAFMQRHNIPTASYESFTNANKAKKYIQENELPQVIKADGLAAGKGVVIVEDYETAFKTIDEFISETKYGDASRKIIIEDFLRGQELSYIVMVNGTEYLPLATSQDHKTIGEGDVGLNTGGMGAYSPVPFVNDELDIIIKKEVIDPTVRGLSEDGIAFRGFLYAGLMIDTNLNPKVLEYNCRFGDPETQPIMLRLKSDLIDLIQTCFSGGISDYKIEWDNKSAMGVVLSSLGYPESYKTGKEIS

SEQ ID NO: 195475 - protein, 287 aa, Unknown
  Bacterial polypetide isolated from the Sargasso Sea
GDEASAIAYLKTQQIPIVIKADGLAAGKGVTVAESYASAQQAVKEIFAGRFGKGMEVVIEEFMEGEEASYFICTDGIDFLSLVSAQDHKRVGEGDTGPNTGGMGAYSPAPIFTQEIKDQVDKKIIIPTLKAFQDKGCPYKGILYAGLMINDGIAKLVEYNIRFGDPECQVLMLRMKSDLVEMMLNTIEGKIKDTNLKWEDDHCATVVIASDGYPGKFEKRTVIKNLDKLSNNNNFQVFHASTLKENSNIKADGGRVLSITAKSNTLQDALDKIYDSINLIDWPQWLF

SEQ ID NO: 195476 - protein, 282 aa, Unknown
  Bacterial polypetide isolated from the Sargasso Sea
GPLAAGIVNLFRSRGLKIFGPSKEAAQLESSKDFAKAFMKRHAIPTAEYETFADVAAAHAYLDAKGAPIVIKADGLAAGKGVVVAQTLEEAHAAVDMMLSDNKLGDAGARVVIEEFLAGEEASFIVMVDGKHVLALASSQDHKRLLDGDQGPNTGGMGAYSPAPIVTPQLHARVMREIIQPTVRGMEKEGIRFTGFLYAGLMIDAQGNPKTLEFNCRMGDPETQPIMARLKGDFSKVVEQAIAGTLDTIELEWDRRTALGVVLAAHNYPDTPRKGDRISDIP

SEQ ID NO: 195477 - protein, 253 aa, Unknown
  Bacterial polypetide isolated from the Sargasso Sea
MNIGLIGSGGREHALCKKLYESRLCKKIFCFPGNAGTENLAKNIEVDVLNFTKLLKLIKLHKIDLVLIGPEEPLTLGIVNFLTKNKVKVFGPSKYAARLEGSKAFMKKICKENNIPTAKFRICKNKRQVVKFLKSSRLPIVVKADGLAAGKGVTICKTKKQVLNVSEEIFKGKFKSSNKLVIEEFLVGEEASYFLIVDKNSFKFFGTAQDHKRVGEKDIGPNTGGMGAYSPAPIINKNLEKKIINKIVKPTLK

SEQ ID NO: 195478 - protein, 269 aa, Unknown
  Bacterial polypetide isolated from the Sargasso Sea
MVVIGPEEPLVKGLVDFLVKNKIKVFGPNKYAAKLEGSKSFVKRICARNKIPTASFKICKNKLQVAKFINENKFPIVVKADGLAAGKGVHICKNKKQVIKISNEIFKGKYKSSNKLVLEEFLKGEEASYFLMVDKYNFKFFGTAQDHKRVKEKDMGPNTGGMGAYSPAPIINGTIEKKIISKIVKPTLRALKKEKHSYTGFLYVGLMIKDNEPYLIEYNVRMGDPECQVIIPRLKTDLVKIFDNAIKNKLNRTQIKWKKEKSMTVVLCS

SEQ ID NO: 195479 - protein, 213 aa, Unknown
  Bacterial polypetide isolated from the Sargasso Sea
MKILVIGSGGREHALAWKCSTDKFVEKVYVAPGNAGTFLEEKIENISLNINNNEDVSNFCISNNIELVIVGPEDPLVNGLVDFLESKNIKVFGPRKGAAQLEGSKTFAKDFFIKYGIPTANYKSFDNHHDALKYLDKIDFPSVVKADGLAAGKGVIICDNREAAEKALEDIFESNAFGDAGNRVVIEDFLNGEEASFIAVVSDDQIIPLATSQ

SEQ ID NO: 195480 - protein, 213 aa, Unknown
  Bacterial polypetide isolated from the Sargasso Sea
MNIGIIGSGGREHSLCFKLKESKIVDKIYCFPGNAGTEKIAQNINIETTNFEEIKKECLKKNIELLVVGPEQPLVDGIVEYFNDTKIKVFGPNKISAQLEGSKTFTKKLCKKFNIPTSNFEIFKDEKSALNYLSNKKYPLVIKADGLAAGKGVYISKNENEGKNAIKEIFGGRFGKADCVLVEEFLLGEEMSYFIVCDGINYKFFQTAQEITK

SEQ ID NO: 195481 - protein, 286 aa, Unknown
  Bacterial polypetide isolated from the Sargasso Sea
EKPLVEGLVDFLESKNIKVFGPRKKVAQLEGSKIFTKQICEKFNIPTAKFKICKSKEDAFVFLSSSNFPLVVKADVLAAGKGVYICQNVDDAKTAVNEIFDGKFGKADQVLIEEFLEGDEMSFFIISDGISYKTFNTAQDHKRVGEGDTGKNTGGMGAYSPSSLINNDLENKILNKIIEPTLKAISEMNEKYVGFLYAGLMIKSNEPYLIEYNVRMGDPECQTILPLVNSDLLEIINACCNSKLKKHEIKWKNKKSMCIALCSKGYPDKYNKNVEIKNLKEFKSTK

SEQ ID NO: 195482 - protein, 196 aa, Unknown
  Bacterial polypetide isolated from the Sargasso Sea
MKVGVIGSGGREHAICISLKKSKNIDKIYCFPGNAGTSFIAENIEIDLNNFEELKRVIKELGIDIIIVGPEKPLVDGIVDFLELNKIKVFGPNRISSQLEGSKIFTKNLCKKYNIPTAKFGVFNNIQDSLSFLNECKFPIVVKADGLAAGKGVYICETSDQSKKAVEEIFKGKFGEAKQILIEEFLKGEEMSFFII

SEQ ID NO: 195483 - protein, 236 aa, Unknown
  Bacterial polypetide isolated from the Sargasso Sea
AAQLEGSKIFTKKICEKYNIPTAKFGIFYNTNEAIKFLQNSSFPSVIKADNLASGKGVYICNNIKEAQKAIDEIFGGKFGKAENLLIEEFLDGEEMSFFTIHDGENFKNFGTAQDHKRALEGDKGKNTGGMGAYSPSRLINEELEIKIINKIIKPTLKGLSELGTQYKGFLYTGLMIVKNEPYLVEYNVRMGDPECQTILPKLKTNLSDIFLACCEKKLNQINIEWVNKKSLCVVL

SEQ ID NO: 195484 - protein, 322 aa, Unknown
  Bacterial polypetide isolated from the Sargasso Sea
LSERVADLLDKHGLNVIGPKKKLAQMETSKSFTRNLQKKYSIPGAPIYQTFDSIDGVDEFLNILGEDFVVKYDGLAGGKGVKVSGEHLHSKEEAIDHCQELVNKGGRFVIEEKFVGEEFSLMSFCDGKVLKHMPAVQDHKRAYRGDTGPNTGGMGTYSDANHSLPFLNENDIARARIINEKTTEALQKEVGEGYKGILYGGFMATANGVKLIEYNARLGDPEAMNVLSILKTDIIDIFNSIGRGTLNELSIDFDNKATVCKYAVPEGYPDKPVKGKKIDISSVSNKDSLFFASVDMEGDHLIEAGSRTVAVVGIASSISQAE

SEQ ID NO: 195485 - protein, 213 aa, Unknown
  Bacterial polypetide isolated from the Sargasso Sea
GTSQDHKAVGDGDVGLNTGGMGAYSPAPIVTEEIHQKILNEVMYPTMNGLINEGSPYLGFLYAGLMIKDNEIKVLEFNCRFGDPETQPILLRLNSSLVELCKAAIDDELDTYSIQWTEKHSCGVVIASEGYPENYESNKKVSIKENNIKDSKLFHAGTKYENETVLTNGGRVFCATALGSDLKDAQKNAYNLVNNVEFDGAFFRNDIGFKGIK

SEQ ID NO: 195486 - protein, 260 aa, Unknown
  Bacterial polypetide isolated from the Sargasso Sea
MKVGIIGSGGREHAICQILKKSRKISKIYCFPGNAGTENIAKNINLDLQNFKKIKNFILDNQIDLIVVGPEKPLVDGLVDYLQKFKIKVFGPNKKASQLEGSKIFTKKLCKKYNIPTAKFGIFQNKKNAKKFLKTSKYPIVIKADNLASGKGVYICDNRKEANVAIEEIFNGKFGKAKNLLVEEFLNGEEMSFFTIHDGKNYKIFGTAQDHKRVFEGDKGKNTGGMGAYSPSRLINKKLEKKIINKIIKPTLIGLSDLKT

SEQ ID NO: 195487 - protein, 227 aa, Unknown
  Bacterial polypetide isolated from the Sargasso Sea
IISDGESFIPLTSAQDHKRIGDGDIGLNTGGMGAYSPAPIMNKELEEKTINKIIKPTIKAMNDYGSPYIGILYAGLMIKDNEPKLIEYNVRFGDPECQVIIPRLENDLVELLVNVKEKNLDNYTLKWKENFAITVVLAAKGYPESYETGDEIKGLDAIDNIDDVEIFHAGTKTKNNKIVTSGGRVLNINGYGKNLVDAKEKAYSLVKKINWSGCYYRKDIGWRALRE

SEQ ID NO: 195488 - protein, 275 aa, Unknown
  Bacterial polypetide isolated from the Sargasso Sea
KNISLKLDNFNEIYNFLKNNEIDLVIVGPEKPLVDGIVDFLNIKNIKVFGPNQKVSQLEGSKVFTKKICEKYNIPTAKFGIFNNKEDAFKFLQNKNMPLVIKADGLASGKGVYICEDTESSKNAVIEIFNGKFGSADQILIEEFLEGEEMSYFIISDGLNFKSFNTAQDHKRVGEGDIGKNTGGMGAYSPSKLINPNLEKKIIDKIIKPTLEAIGDMGEKYKGFLYAGLMIKNNEPYLIEYNVRMGDPECQTILPLLKTDLLDLILSCCNNNLNE

SEQ ID NO: 195489 - protein, 274 aa, Unknown
  Bacterial polypetide isolated from the Sargasso Sea
MNVGIIGSGGREHAICCMLGKSKKVSEIFCFPGNAGTSLIAHNVNLNPDNFYELEKHCIEKKIKLLVVGPEKPLVNGIADHFRGKSIKVFGPDKISSQLEGSKIFTKKICQKNNIPTAKFKICDSLNESINYLKYSQFPLVIKADGLASGKGVYVCENFNEAKIASEEIFNGKFGLAEQILVEEFLDGEEMSYFIVTDGKNYKFFGSAQDHKRVGEGDTGKNTGGMGCYSPSRLLSKDLELKIKKKIIEPTLNAIKGSGGVYKGFLYVGLMIKT

SEQ ID NO: 195490 - protein, 268 aa, Unknown
  Bacterial polypetide isolated from the Sargasso Sea
MIVGIIGSGGREHAICEALNNSERVSKLYCFPGNAGTAQIATNIVLDLNNFEKIKNFILEKKIDLVVVGPEKPLVDGIVDYLEKFNIKVFGPNKVASQLEGSKIFTKKICQKYQIPTANFGIFENENEAKKFLDNSKFPIVIKADNLASGKGVYICENNEQSINAVREIFGGKFGKAKNVLIEEFLKGEEMSFFIISDGVSFQNFGSAQDHKRVLEGDKGKNTGGMGAYSPSRLINKELEKKILDKIINPTLEALNNLGCSYKGFLYA

SEQ ID NO: 195491 - protein, 283 aa, Unknown
  Bacterial polypetide isolated from the Sargasso Sea
IVVKADGLAAGKGVLICNSKEEAITETKKILNGKFKSSNKVVLEEFLEGEELSYFVLVDENSYSFFGSAQDHKKVGEGDTGLNTGGMGAYSPARNLTYDLESKIRNKIIEPTLQAMKALGYPYTGFLYAGLMVKNGEPFLIEYNIRMGDPECQVLMMKLKTDLLSIIEATTNNSLSKLKIKWDNKKCITIVLCANGYPGEYVKDKEIKNLSKIHLDKNNQIFHAGTYEIDNKIFSKGGRVLNITCSSNDLYEARNNSLSNLKEINWDNGFFRKDIGWRAIKKK

SEQ ID NO: 195492 - protein, 238 aa, Unknown
  Bacterial polypetide isolated from the Sargasso Sea
FLKGEELSYFAVVDKNSYCFFGSAQDHKRVGEGDTGPNTGGMGAYSPTPLLTNELEDKIKKKIIEPTLLAMKKLGHPYTGFLYAGLMINKNEPYLIEYNIRMGDPECQVLMMRLQTDLLKIIDRATKNKIRNLKIEWKNKSCITIVLCAKGYPNNYIKDSEIKNLSKVSIDQNNQIFHAGTYKKKNKFFSNAGRVLNVTSLAKNMNIAKKKSLDNLKKINWNDGFFRKDIAWKIIKTK

SEQ ID NO: 195493 - protein, 292 aa, Unknown
  Bacterial polypetide isolated from the Sargasso Sea
SNVSTANYKEFGSIEEAKKFVAGSPFPLVIKLDGLAAGKGVTICENIREANETLDDIFIPDEKNKRVLIEEFMPGEEASLFVITDGYNCLSLGGAQDHKRLKDGDRGPNTGGMGAYSPAPVLTIEIEDRALNEIVKPTIKEMADRGTPFKGILYAGLMINNGKPSLVEYNVRFGDPECQVIMMRLGGQILDIILSCLEGNLLRSKVNWANDHALTVVLASKGYPYKYNKGSLLKNIKKIKEDSNLKIFHAGTKKIKDSFYSNGGRVLNVTARGSSLKKAKKSAYDTVSKIKW

SEQ ID NO: 195494 - protein, 230 aa, Unknown
  Bacterial polypetide isolated from the Sargasso Sea
CDGEDFIILNTAQDHKRAFEDDLGPNTGGMGAYSPTPLSTSNLLKTVGSKIIKPTLKAMKDKGNPYTGFLYVGIMLVEDEPYVIEFNVRMGDPETQVVLPLLKSSIFELLWKATEGKLKDVDVLISKETAVTVVLSAEGYPEKYQKGMVIKGLDKNENHLIYHAGTIRKGHDIIANGGRVLNVVGFGEDLKSAIIDAYQIVDSINFEGKFYRKDIGARGLQYLNKGAKHD

SEQ ID NO: 195495 - protein, 287 aa, Unknown
  Bacterial polypetide isolated from the Sargasso Sea
KLLKTIKSYKIDLVVVGPEEPLVRGIVDFLNKHKIKVFGPNKYASKLEGSKAFMKSICKKFKIPTAQFKICKNKKDVVKFLEDNRLPLVVKADGLAAGKGVTICKTKKEILTISNEIFKGKFKTSKKLVLEEFLKGEEASYFLIVDKKNYKFFGSAQDHKRVGENEKGPNTGGMGAYSPAPIVNKDLEEKIIKKIVKPTLLALKNKKKPYTGFLYVGLMIINNEPYLIEYNVRMGDPECQVILPRLKTDLVKILNATINNRLNKIKINWKKLKCMTIVLCSKGYPGK

SEQ ID NO: 195496 - protein, 237 aa, Unknown
  Bacterial polypetide isolated from the Sargasso Sea
MKVGIIGSGGREHSLCEALNKSKKITKIYCFPGNAGTQQIAENININIDDFEILKKFVISKKIELLVVGPEKPLVEGIVDFFENINIPIFGPNRLASQLEGSKIFTKKICDKYKIPTAKFGIFENINEAKLFLKNTKFPMVVKADGLAAGKGVYICENNESAENAIEEIFNGKFGKAKNVLLEEFLIGEEMSYFIVSDGTNIKKFETAQDHKRVGEGDTGKNTGGMGAYSPSRLISD

SEQ ID NO: 195497 - protein, 285 aa, Unknown
  Bacterial polypetide isolated from the Sargasso Sea
TVKEYNIDFVLIGPEAPLAEGVSDILKREGILTFGPSKASSQLETSKKFTKEICNASGAPTAEYRSFDSLETALSYIKTKGAPLVVKADGLAAGKGVIVATDIEMALSAVHEIFGGSFGNAGASVVIEEFMEGEEASLFVLVDGETILPIGTAQDHKRVGDGDTGLNTGGMGAYSPAPILNEEVLKKTVERIIRPTMREMVRRGMPFTGVLYAGLMIKDSNPRLVEYNVRFGDPECQVLMMRLGGQILDALLSTAKGKLSDVKINWANDHSITVVMASNGYPRFL

SEQ ID NO: 195498 - protein, 299 aa, Unknown
  Bacterial polypetide isolated from the Sargasso Sea
IRVFGSNKFASQLEGSKAFMKNLCKKNNIPTAKFDIFNNFKDASDFIKKNTTPIVVKADGLAAGKGVSVCHSKDDALKKTKEILDGKFKSSKKVVLEEFLKGEELSYFVIVDKFSYSFFGSAQDHKRAGEGDTGPNTGGMGAYSPAPLLTDKLEEKIKKKIIEPTLLAMKNLGHSYKGFLYAGLMIKNDEPYLIEYNIRMGDPECQVLMMRLETDLLEIIDFATKNKINDLKIKWSNKNSITIVLCAKGYPLNHIKNSEIKNLSTISIDKDNQIFHAGTYKKNNKIYTSGGRVLNITSS

SEQ ID NO: 195499 - protein, 291 aa, Unknown
  Bacterial polypetide isolated from the Sargasso Sea
VERDAICKTLLNSKKINKIFCFPGNAGTEDIADNIKIDLENFKSLKDFIFKNKIDLIIVGPEQPLVDGLVDYLEESNIKVFGPNKIAAQLEGSKIFTKKICKKFNIPTAKFGIFDNKNDANKFLIDSEFPLVIKADNLASGKGVYICKNIDEGNLAVEEIFNGKFGKAKNLLIEEFLDGEEMSFFTIHDGNTFKNFQTAQDHKRVFEGDKGKNTGGMGAYSPSRLINKNLEEKIINKIINPTLKGLSELGTRYKGFLYAGLMIVKNEPYLIEYNVRMGDPECQTILPKIKT

SEQ ID NO: 195500 - protein, 289 aa, Unknown
  Bacterial polypetide isolated from the Sargasso Sea
MNILIVGSGGREHAIASTFLRSPLVKKIVVSPGNPGIEEIAECRKVSVDDLDGLVKLAIEIKADLVFIGPELPLVKGLKNKLDTARIKTFGPTLEAARLEGSKIFSRNFCKKYKIPQPIYFECKNTQTAKKAINFFQGFCVIKADGLASGKGVIVCDNPEDAIKTSNSILIDKIFSEAGEKIIVEERLEGVEASVFALSNGKDFILIGTAQDHKRAFENDKGPNTGGMGAISPAPALNNQMLDEIVNKVIKPTIDGMNKENIPYEGVLYAGIMITKSGPKLIEFNCRTR

SEQ ID NO: 195501 - protein, 275 aa, Unknown
  Bacterial polypetide isolated from the Sargasso Sea
NKKNIKVFGPSKFASQLEGSKGFMKNLCKEYNIPTAKFGIFESFKESVDFINKNGVPIVVKADGLAAGKGVSICTSINEAKKKTKEILEGKFQSSKKVVLEEFLEGEELSYFVVVDENSYNFFGSAQDHKRVGEGDAGPNTGGMGAYSPTKILTRELEEKIKKKIIEPTLKGMKNLGHPYKGFLYAGLMIKKNEPYLIEYNIRMGDPECQVLMMRLKTDLLKIIDCATRNSLDNLKIEWDKNSCMTIVLCSKGYPGNYIKDIEIKNLSKIILDKN

SEQ ID NO: 195502 - protein, 272 aa, Unknown
  Bacterial polypetide isolated from the Sargasso Sea
GSKAFSKDFMNRHNIPTGRSMTFSELTPALEYIQSIEIPIVIKADGLAAGKGVIVAETRIEAEKAVQDMLAGNVFGEAGHRVIVEEFLEGEEASFIVIVDGEKVLPLATSQDHKRIGDNDTGPNTGGMGAYSPAPIVDEKIHSRIMQEIILPTVKGMQIEGNYYRGFLYAGLMIDRNGNPRVIEYNCRLGDPETQPILMRLKSDLAEICLAALEGSLESISASWDSRHSIGVVMASQGYPGTYKTGVSISGLEMSCEEDIKVFHAGTAFENR

SEQ ID NO: 195503 - protein, 206 aa, Unknown
  Bacterial polypetide isolated from the Sargasso Sea
AVGDGDVGLNTGGMGAYSPAPIITDSINKKILDEVMYPTMRGLIKENSPYLGFLYAGLMIKDGEIKVLEFNCRFGDPETQPILLRLNSSLVELCMAAITDNLDSYIIDWTPKHSCGVVIASDGYPQSYESNKEVNIEEYDMDGTKLFHAGTKFENKKIITNGGRVFCATALGDNLKEAQKNAYNLVQKVNFDGAFYRKDIGFKGIK

SEQ ID NO: 195504 - protein, 280 aa, Unknown
  Bacterial polypetide isolated from the Sargasso Sea
MKILVIGGGGREHALVWKLNQSAHVEKIFCAPGNPGISEMAECVPIVVNQVDQLAEYAESQKMDLTVIGPEEPLVLGVVDEFKKRGLKIYGPDRQSAKLEGSKAYAKSVMKRFGIPTASYQEFTDFEDALGYLQEQGSPIVIKADGLAAGKGVTVAETQEEAEAALDDALRQRIFGEAGQKVVIEEFLEGEEMTVLAFVDGETVLPLVPSQDHKPIFDGDRGPNTGGMGAYSPVPHLEEWLREIQRLILKPLAKGLAESGQPYRGLLYTGLMLNESGPKV

SEQ ID NO: 195505 - protein, 305 aa, Unknown
  Bacterial polypetide isolated from the Sargasso Sea
MQILGNGGREHALALQISKSNKLSELYCIPGNAGTNLIAKNVDIELENFDKIYSFIKKEKIDLVVVGPEKPLVNGIVDYLNKRKIKVFGPNQKVSRLEGSKIFTKKICKKYKIPTAKFKICKTKNDAYKFLKNTKMPLVIKADGLAAGKGVYICKNIKNSKIAISEIFNGKFGKANEILLEEFLEGEEMSYFIISDGFTFKSFNTAQDHKRVGEGDTGKNTGGMGAYSPSNLINKRLEDKIIRKIITPTFDAIRDMNQKYIGFLYAGLMIKDNEPYLIEYNVRMGDPECQTILPLLKTEFIRVIS

SEQ ID NO: 195506 - protein, 98 aa, Unknown
  Bacterial polypetide isolated from the Sargasso Sea
MNILIIGSGGREHALAWKCAQDQNVNQVFVAPGNGGTSLDQGIENLKIDIKNADSIANTCNQNGIDLVIIGPEQPLVDGLMDDLQLKNINVFGPSAKA

SEQ ID NO: 195507 - protein, 222 aa, Unknown
  Bacterial polypetide isolated from the Sargasso Sea
MNVLIVGSGGREHAFTWKASQSDLVEKIFVAPGNAGTSLEPKAENINISPSDIDALVSFSKKENIDLVIVGPEDPLVNGITDEFKKVGIKCFGPESLAAQLEGSKDFAKAFMKRHNIPTAGYKSFTNANKAKKYIRENELPLVIKADGLAAGKGVVIADDYMTADKTIDEFISKTKYGDASRKIIIEDFLIGQELSYIVMVDGTEYLPLATSQDHKTIWRRR

SEQ ID NO: 195508 - protein, 315 aa, Unknown
  Bacterial polypetide isolated from the Sargasso Sea
MHRSKNILVVGGGGREHALAWKLARDGANVFAAPGNAGTAREATNLPIQATDSDALLAAVKQHEIDLVVVGPEAPLVNGLVDKLTDAGVRTFGPSALAAQLEGSKIFCKELLHTNDIPTATYRQFDSLDKARGFLESREDEPVVVKADGLAAGKGVFVCSNREEALDAINQLQRDPQFRTAASGVLIEERLDGVEVSVIAITDGRTIVTLPPLQDHKAALDGDRGPNTGGMGAFCPAPFVTQALMTEIEEQILVPTVHGMRRRRTPFHGILYAGLMLTSQGPKVLEFNVRFGDPECQALCIRLESSLLELIDAAR

SEQ ID NO: 195509 - protein, 154 aa, Unknown
  Bacterial polypetide isolated from the Sargasso Sea
MNIALIGSGGREHALCRKLKDSKNINQIFCIPGNAGTAKIATNLNVNFLDFNLLLKTLKDYEIEIVVVGPEEPLVNGIVNFLEKNRIKVFGPNKYASQLEGSKAFMKSVCKKYNIPTANFQVCKNQKEFKNSINKFSLPVVVKADGLAAGKGVV

SEQ ID NO: 195510 - protein, 232 aa, Unknown
  Bacterial polypetide isolated from the Sargasso Sea
MNVLIIGEGGRESAILHQTLLSPKVSKVFIAPGNGGTSELCVNINISSDNISELAKFAVDNKIDLTIVGPEIPLSLGIVDLFESKGLKIFGPSKNASRIESSKIFAKNLMKEFNIPTAKFEVFENESSAIKFLNKTEFPIVIKADGLAAGKGVYISDNLDDAKLAIKDLMNSQIFGKSGKKIVIEEFLSGSEFSVFAFTNGNDIKVLLSACDYKKAHDEDKGPNTGGMGSFS

SEQ ID NO: 195511 - protein, 157 aa, Unknown
  Bacterial polypetide isolated from the Sargasso Sea
MNLAVIGSGGREHAICYKLKQSLKIKKLICIPGNAGTEKIAENIKEDILNFEAIYKIVRDKKVDVVIVGPEQPLVNGLTDYLNSKKIKVLGPSKFAAQLEGSKAFMKNLCKKNNIPTANFGVFENLNDAKIFIEKNNIPIVVKADGLASGKGVSICS

SEQ ID NO: 195512 - protein, 229 aa, Unknown
  Bacterial polypetide isolated from the Sargasso Sea
MRIAIIGSGGREHAICQKIYESKKVKKIFCIPGNGGTSKIANNVEINTNNFDEIKSFLINKNIDLTIVGPEEPLVNGIVDFLTNEGLKVFGPDKFCSRLEGSKIFTKKICKSENIPTANFEIFKDKLSSLNYLKETEYPTVVKADGLAAGKGVYICENFSDASNAVEEIFKGKFGIAEEVLIEDFLVGEEMSFFVLYDNNCFKIFNTAQDHKRVFEGDKGKNTGGMGAY

SEQ ID NO: 195513 - protein, 296 aa, Unknown
  Bacterial polypetide isolated from the Sargasso Sea
DLVVIGPEAPLCAGLTDRLETYGINVFGPNKAAAELEGSKQFAKEVMAAAEVPTSAYSNFVDVERACAYVREKNMPIVIKADGLAAGKGVTVAETIDQAEKAIFDALEDNVFGAAGSSVVIEDFLEGEEASILALIDGENIVLLASSQDHKRIYEKDEGPNTGGMGAYSPASIVNDIVCEKVIHEIYQPTLNELKKRGITYKGVLYAGLMIKDNQPYVVEFNCRFGDPETQAVLSRWNGDIIPALMAVVNGNLSDDLISWKKEPSACVVMVAGGYPGSYKKGDPIGNISLANKVKD

SEQ ID NO: 195514 - protein, 297 aa, Unknown
  Bacterial polypetide isolated from the Sargasso Sea
HAICSKLYTSKKISKIYCFPGNAGTSKIAENVNLDLKNFPELKKFISKYKIELLIVGPEEPLVNGITDFLEKEKIKVFGPNKQCSKLEGSKIFTKKICEKYSIPTAKFGIFSNLNDSIFFLNKKKFPIVVKADGLAAGKGVSICQNLSEAKKSVEEIFNGKFGKAKEVLIEEFLEGEEMSFFIISDGVSYKKFGTAQDHKRVFDGDKGPNTGGMGAYSPSRLTDKNLEQKILKKIIEPTLLALNNMGSKYIGFLYAGLMVKDNEPFLIEYNVRMGDPECQTILPTLETDLLEIFIKA

SEQ ID NO: 195515 - protein, 308 aa, Unknown
  Bacterial polypetide isolated from the Sargasso Sea
VGPEDPLVNGLVDFLESKNIKVFGPSKGAAQLEGSKTFAKDFFIKYGIPTANYKSFDNHHDALKYLDKIDFPSVVKADGLAAGKGVIICDDREAAEKALEDIFESNAFGDAGNRVVIEDFLNGEEASFIAVVSDDQIIPLATSQDHKAVGDGDVGLNTGGMGAYSPAPIVTDEIHKRVIDEVMLPTMNGLKAEGFPYLGFLYAGLMIEGDEIKVLEFNCRFGDPETQPIMLRLESSLTNLCLDAINKKLNAHQIEWSSMHSCGVVLASSGYPEDYEIDMGIDIKNHFSENEKLFHAGTKFVDNKILTS

SEQ ID NO: 195516 - protein, 289 aa, Unknown
  Bacterial polypetide isolated from the Sargasso Sea
KAENIDISATDIDALVSFSKKEGIDLVIVGPEGPLVNGITNKFKKAGINCFGPESLGAQLEGSKDFAKTFMKRHNIPTASYRSFTDANEAKKYIQENELPQVIKADGLAAGKGVVIVEDYETASKTIDEFISETKYGDASRKIIIEDFLKGQELSYIVMVDGTEYLQLATSQDHKTIGEGDIGLNTGGMGAYSPVPFVNDELDIIIKKEVIEPTVRGLSEDGIAFRGFLYAGLMIDSNLKPKVLEYNCRFGDPETQPIMLRLKSDLIDMIQTCFSGNISKYDIEWDNNS

SEQ ID NO: 195517 - protein, 259 aa, Unknown
  Bacterial polypetide isolated from the Sargasso Sea
GREHALAWKCAEPPYVDKVFCAPGNAGTAREDKVINVAISPEDLERLASFAEEENIALTIVGPEAPLVSGIVNAFDARGLKCFGPTKEASVLEGSKVFTKDFLHRHGIPTGKYKSFSDISGALNYIKDCEFPLVIKADGLASGKGVFITSDHVEAEGVVRTILSGNKFGEAGSQIVIEEFLDGEEVSYICMTDGYHCVPFASSQDHKARDNGDSGPNTGGMGAYSPAPLLNSDLEHRVLEEIIYPTLSGLREEGKLYKG

SEQ ID NO: 195518 - protein, 250 aa, Unknown
  Bacterial polypetide isolated from the Sargasso Sea
MNIGIIGSGGREHALCLKLNESDLVNKIYCFPGNAGTELLAENIDINIDDFNEIKKKSLEKNISLLVVGPEKQLVNGIVDFFKNTGIQVFGPNRISSQLEGSKIFTKKLCKKFNIPTSKFEIFIKKRDAINYLENSKYPIVIKADGLASGKGVYICKSKNNAEEAVNEIFNGKFGNADSILIEEFLEGEEMSYFVICDGKDYKFFQTAQDHKRVGEGDTGPNTGGMGAYSPSRLNNDNLQDKINKKIIEP

SEQ ID NO: 195519 - protein, 312 aa, Unknown
  Bacterial polypetide isolated from the Sargasso Sea
LIETSKSFARKIIDLCCPEKNPQRREFSSIEGVEGFIEQLGGEYVIKFDGLMGGKGVRVSGEHLKNIDEGIAYANEIINIGGTFLIEEKLVGEEFSLMSFVDGKVCKHMPIVQDHKRAYEGDTGPNTGGMGTYSFANHSLPFLSDKDIKEAQKTNELVAKQLFEATGTPYVGILYGGFMLTKGGVKVIEYNARFGDPEAMNVLSILESDFLSICISMVDGNLKTQDVSFERLSTVCKYVVPVGYPDKPTKNFEVFCDQNDPSLFLASVMLKDQRLVACGSRTAAVVGKNKNVFQAELFAEAGIANISGKLFH

SEQ ID NO: 195520 - protein, 271 aa, Unknown
  Bacterial polypetide isolated from the Sargasso Sea
MKVGIIGSGGREHAICETVKKSNKIDKIFCFPGNAGTKDIAENINIDLDNFEVLKNYILEKKIDLIVVGPEKPLVDGLVDYLEKYKIKVFGPSKIAAQLEGSKIFTKQICEKYKIPTASFGIFENKKDAKKNLKSTNYPIVIKADNLASGKGVYICTNENEAIIAIDEIFNGKFGEAKNLLIEEFLKGEEMSFFTIHDGITFKTFDTAQDHKRVLEGDKGKNTGGMGAYSPSRLINEDLKNKIINKIIKPTLEGLAGFGSKYKGFLYTGLM

SEQ ID NO: 195521 - protein, 240 aa, Unknown
  Bacterial polypetide isolated from the Sargasso Sea
MEKFLEGEELSYFVIVDKNSYRFFGSAQDHKRVGEGDTGPNTGGMGAYSPARILTDELEEKIKKKIIEPTLKAMKNLGHPYEGFLYAGLMIKKNEPYLIEYNIRMGDPECQVLMMKLKTDLLEIVDSATRNNLNNLKIEWNKNKCMTIVLCANGYPGGYVRDKEIHNLSKIASDENNQIFHAGTYEKDNKIFSKGGRVLNITCSAKNLRKARDQSLINLKKINWIDGFFRKDIGWRAIKK

SEQ ID NO: 195522 - protein, 256 aa, Unknown
  Bacterial polypetide isolated from the Sargasso Sea
MNVLVVGQGGREHALAWKLSKSKQVSKIFVAPGNGGTANEAKCFNKSINVNNFSALEELVNSENIELIVVGPEDPLVNGINDYFQNSKVKVFGPTKEGAQLEGSKIFSKKFMFENNIPTGAANFFSESKLAKNYLKTVEFPIVLKADGLAAGKGVLVAKELGEAMQWIEDVMEKNKFGDAGNEVLIEECLFGTELSYMGIMTPKGFYPFETSVDYKPLLDGNSGPNTGGMGCMSPSPFMNSELLKNINKQVVEPTA

SEQ ID NO: 195523 - protein, 259 aa, Unknown
  Bacterial polypetide isolated from the Sargasso Sea
ICKTISLSSKVSKIYCLPGNAGTQQLAENIDLDIDDFEKVLKFLKQSKVDLVIVGPEKPLVNGVVDFLENNGIKVFGPRKIPSQLEGSKTFTKNICKKYNIPTAKFGIFEKKENTINFLKNSKFPIVIKADGLAAGKGVYITENLSEATEAVNEVFDGKFGIAKKILVEEFLNGEEMSFFVICDGKNFKIFETAQDHKRVNEGDMGKNTGGMGAYSPSGLINKTLEKKIIDKIISPTLKAIEEMGEKYKGFLYAGLMIS

SEQ ID NO: 195524 - protein, 190 aa, Unknown
  Bacterial polypetide isolated from the Sargasso Sea
MGLKILILGSGGREHAISWIISKSKREIEKIYVMPGNAGTLSEKNVFNIECDINNHQAVLNFALENNIDLTIVGPEVPLVEGISDLFEENNLNIFGPKKYFAQLEGSKVFSKNFMDSNNLPTASYKEFNDSKKAKGYLNDKKMPIVIKYDGLAAGKGVDICETIDAAKNSIDNLLKPEEKIIIEDFIKGI

SEQ ID NO: 195525 - protein, 245 aa, Unknown
  Bacterial polypetide isolated from the Sargasso Sea
MKVAVIGSGGREHAICLSLKKSEKVKKVYCIPGNAGTDSIAENVDIEVSDQNKLKDYILLNRIDLVIIGPEKPLVDGIVDYLQKFNINVFGPNKIASQLEGSKIFTKQLCEKYKIPTANFGIFKSVNDAKKFLKESDYPVVVKADGLAAGKGVYICENIDQSIDAVKEIFDGKFGKTKEVLIEEFLKGEEMSFFIISDGVTFKTFGTAQDHKRVFEGDKGKNTGGMGAYSPSRLENEKLNNKIIE

SEQ ID NO: 195526 - protein, 304 aa, Unknown
  Bacterial polypetide isolated from the Sargasso Sea
NGIVDFLTKNKIKVLGPNKFASQLEGSKAFMKDLCKKNNIPTAKFGTFDNYDNAINFLNKSKLPIVIKADGLAAGKGVSICKNKEEAKKQIYEIINGKFKSSKTVILEEFLEGEELSYFVLVDKNSYSFFGSAQDHKRVGEGDVGPNTGGMGAYSPSNLLTKKLETKIKNKIIEPTLNAMQALGHPFKGFLYAGLMISKGEPFLIEYNIRMGDPECQVLMMRLKTDLLEILEAVILDNLEKINIEWYEEDSITIVLCARGYPGNYIKNSEIKNINKIVMDVNNQVFHAGTYEKNNKIFSKGGRV

SEQ ID NO: 195527 - protein, 170 aa, Unknown
  Bacterial polypetide isolated from the Sargasso Sea
MKILVIGSGGREHALAWKCSTDKFVEKVYVAPGNAGTFLEEKIENISLDINNNEDVSNFCVSNNIELVIVGPEDPLVNGLVDFLESKNIKVFGPRKGAAQLEGSKTFAKDFFIKYGIPTANYKSFDNHHDALKYLDKIDFPSVVKADGLAAGKGVIICDNREAAEKALED

SEQ ID NO: 195528 - protein, 298 aa, Unknown
  Bacterial polypetide isolated from the Sargasso Sea
NKYAAKLEGSKAFMKSICKRHKIPTAQFKICKNTNDVVNFFKKTNFPLVVKADGLAAGKGVTICKTKKEVLNISNEIFRGKFKSSKKLVLEEFLIGEEASYFLIIDNKNYKFFGSAQDHKRVGENEKGPNTGGMGAYSPAPIVNNVLEKKIIDRIVKPTLQALKKKGKPYTGFLYVGLMIVNNEPFLIEYNVRMGDPECQVILPRLKSDLLKIFNAAVENRLNKIKIKWKKVKCMTIVLCSKGYPLKIKINKPIRNISKIKDTKTSFIFHAGTKFLNNNLVSSGGRVLNITATGKILK

SEQ ID NO: 195529 - protein, 248 aa, Unknown
  Bacterial polypetide isolated from the Sargasso Sea
MVILDVNDHAAVIGFCMANQIGLVVIGPEAPLVDGLGDSLRDADIPVFGPSKAAAQLEGSKGFTKDLCARAGIPTGAYIRTHSLEQARTALADFAAPYVLKADGLAAGKGVVIAEDIAQAEIVLADMFGGAHGEAGAQVVIEEFLAGEEASFFAITDGKTVVPFGTAQDHKQVGEGDTGPNTGGMGAYSPAPVLTAELQTRVMEEIIKPTVDTMAAEGMPYSGVLYAGLMLTKTGPQLIEYNCRFGDP

SEQ ID NO: 195530 - protein, 301 aa, Unknown
  Bacterial polypetide isolated from the Sargasso Sea
MAWKAAQSAHVTQVFVAPGNAGTALEANLTNVAIAADDVSALTAFAKSEGIALTIVGPEAPLAKGVVDTFRQQGLAIFGPTRASAQLESSKAFAKDFLARHKIPTAAYANFTEIEPAKAYVKTNGTPIVIKADGLAAGKGVIIAQTEAEAFAAIDDMLSGNKFGSAGSRVVIEEFLTGEEASFIVMVDGTHALAFASSQDHKARDDGDKGPNTGGMGAYSPAPVVTPAVHDWVMQNVIYPTVNGMASEGHIYTGFLYAGLMVAPDGTCKVLEFNCRFGDPETQPIMMRLQSDLVELCQAAV

SEQ ID NO: 195531 - protein, 225 aa, Unknown
  Bacterial polypetide isolated from the Sargasso Sea
GLVDFLESKSIKVFGPRKKVAQLEGSKIFTKEICEKFNIPTAKFKICKSKEDAFVFLSSSNFPIVVKADVLAAGKGVYICQNVDEAKTAVSEIFDGKFGKADQVLIEEFLEGDEMSFFIISDGISYKTFNTAQDHKRVGEGDTGKNTGGMGAYSPSSLINNDLESKILNKIIEPTLKAISEMNEKYVGFLYAGLMIKSNEPYLIEYNVRMGDPECQTILPLVDSD

SEQ ID NO: 195532 - protein, 179 aa, Unknown
  Bacterial polypetide isolated from the Sargasso Sea
MKVGIIGSGGREHALCVSLKNSNKIDKIYCFPGNAGTSLIAENIETDLTNFEKLKEIIQKLKINLVIVGPEKPLVDGIVDFLEENKIKVFGPNKFCSQLEGSKIFTKNLCQRYNIPTANFGVFKNQDKSLLFLKKCKYPIVVKADGLAAGKGVYICQTFEQSSNAIKEIFNGKFGEAKE

SEQ ID NO: 195533 - protein, 303 aa, Unknown
  Bacterial polypetide isolated from the Sargasso Sea
MVSLPFGPNQKAAQLEGSKSFTKNICKEYNIPTAAYETFSNLDKTIKYIDNHSIPLVIKVDGLAAGKGVIIAETREHAINSVKEIFSGKFGSAGNEIVIEEFLEGEEASFFVVSDGNSFIPLTSAQDHKRIGDGDTGLNTGGMGAYSPAPIMNSDLEEKTINKIIKPTLKAMNDYGEPYIGILYAGLMIKDNEPKLIEYNVRFGDPECQVIIPRLENDLVDLLINVKEKNLDNYTLNWKDNFAITIVLAANGYPESYQTGDEIEGLDQVANMDNVEIFHAGTKMIENKVVTSGGRVLNVNGYG

SEQ ID NO: 195534 - protein, 251 aa, Unknown
  Bacterial polypetide isolated from the Sargasso Sea
ISEMAECVPIAVNQVDQLAEYAESRKIDLTVVGPEEPLVLGVVDEFKKRGLKIYGPDRQSAKLEGSKAYAKSVMKRFGIPTASYEEFTDFEDALGYLRVQGAPIVIKADGLAAGKGVTVAETQQEAKDALDDALRQGIFGEAGQKVVIEEFLEGEEMTILAFVDGETVLPLVPSQDHKPIFDGDRGPNTGGMGAYSPVPHLEQWLTEIQSLILKPLAKGLTESGQPYRGLLYTGLMLNESGPKVVEFNVRF

SEQ ID NO: 195535 - protein, 287 aa, Unknown
  Bacterial polypetide isolated from the Sargasso Sea
KNKKDVLNFLKMSKLPLVVKADGLAAGKGVTICSSKKKVLNISEEIFKGKFKSSKKIVLEEFLEGEEASYFVIADKKTFKFFGTAQDHKRVKENDKGPNTGGMGAYSPAKIIDKKLEKKIINKIIKPTFFALKKQKIYYTGFLYVGLMIKDNEPYLIEFNVRMGDPECQVILPRLKTDLIKIINNVVNNKLDRTIINWHKKKSMTVVLCSKGYPGKYKKNKTIKNLDRIKLSKNDFIYHAGTKLENNQLKSNGGRVLNITSVGTDFLKIRKKIIKIIKNIKLERRFF

SEQ ID NO: 195536 - protein, 137 aa, Unknown
  Bacterial polypetide isolated from the Sargasso Sea
MNILVIGSGGREHALAWKCAQDNFVNHVYVCPGNAGTFLEDKVSNINLDIDDFKSIEDFCLEENIELVIIGPEQPLVEGLTDYLHSKNIKAFGPSKNAAQLEGSKTFSKDFFVKYDIPTAGYKSFIDFESSSKLSRR

SEQ ID NO: 195537 - protein, 218 aa, Unknown
  Bacterial polypetide isolated from the Sargasso Sea
ATSQDHKARDNGDKGPNTGGMGAYSPASVVTDEVYQRIMDKVILPTVAGMAEDGNDYTGFLYAGLMVSPDGEVNVVEFNCRFGDPEAQPVMMRLQSDLPELCLAALEQALDSKSAEWDSRYAVGVVLASGGYPDLYAKGDVISGIPKSTKHQKVFHAGTSEQEGNIVTSGGRVLCATALGISVSEARAAAYELVNSINWKNVYFRTDIAYRAIARENT

SEQ ID NO: 195538 - protein, 250 aa, Unknown
  Bacterial polypetide isolated from the Sargasso Sea
IKVFGPRKGAARLEGSKTFAKDFFIKYGIPTANYKSFDNHHDALKYLDKIDFPSVVKADGLAAGKGVIICDDREAAEKALEDIFESNAFGDAGNRVVIEDFLNGEEASFIAVVSDDQIIPLATSQDHKAVGDGDVGLNTGGMGAYSPAPIVTDEIHKRVIDEVMLPTMNGLKAEGFPYLGFLYAGLMIEGDEIKVLEFNCRFGDPETQPIMLRLESSLTNLCLDAINKKLNAHQVEWSSMHSCGVVLASS

SEQ ID NO: 195539 - protein, 246 aa, Unknown
  Bacterial polypetide isolated from the Sargasso Sea
MNVGIIGSGGREHAICFMLNKSKKVFKIYCFPGNAGTSLIAQNVNIDPDNFSELEKYCVENDIKMLVVGPEKQLVNGIVNHFKGKSIKVFGPDKISSKLEGSKIFTKKICQKKDIPTSKFKICKSLSETLEYLKDSDFPLVIKADGLASGKGVYICKNFDEAKIASEEIFNGKFGSAEQILVEEFLDGEEMSYFVVTDGKNYKFFGSAQDHKRVGEGDTGKNTGGMGCYSPSRLLNDHLESKIKQR

SEQ ID NO: 195540 - protein, 286 aa, Unknown
  Bacterial polypetide isolated from the Sargasso Sea
HRGIPGISKIAECVPIAVNQVDQLAEYAESRKINLTVVGPEEPLVLGVVDEFKKRGLKIYGPDRQSAKLEGSKAYAKSVMKRFGIPTASYQEFTDFEHALGYLRVQGAPIVIKADGLAAGKGVTVAETQQEAEAALDDALRQGIFGEAGHKVVIEEFLEGEEMTILAFVDGETVLPLVPSQDHKPIFDGDRGPNTGGMGAYSPVPQLEQWLTEIQRLILKPLAKGLAESGQPYRGLLYTGLMLNESGPKVVEFNVRFGDPEAQVVLPLLENDLVEILSASCEGRLN

SEQ ID NO: 195541 - protein, 245 aa, Unknown
  Bacterial polypetide isolated from the Sargasso Sea
GGREHALVWKLNQSAHVEKIFCAPGNPGISEMAECVPIAANQVDQLAEYVESRKIDLTVVGPEEPLVLGVVDEFKKRGLKIFGPDRQSAKLEGSKAYAKSVMKRFGIPTARYEEFTDFEDALGYLQEQGTPIVIKADGLAAGKGVTVAETQEEAQAALDDALRQGNFGEAGQKVVIEEFLEGEEMTILAFVDGETVLPLVPSQDHKPIFDGDRGPNTGGMGAYSPVPHLEQWFKEIQRLILKPLA

SEQ ID NO: 195542 - protein, 196 aa, Unknown
  Bacterial polypetide isolated from the Sargasso Sea
MKVGVIGSGGREHAICISLKKSKNIDKIYCFPGNAGTSFIAENIEIDLNNFEELKRVIKELGIDIIIVGPEKPLVDGIVDFLEQNKIKVFGPDRVSSQLEGSKIFTKNLCKKYNIPTAKFGVFNTIQDSLSFLGECKLPIVVKADGLAAGKGVYICETLDQSKKAVEEIFNGKFGEAKQILIEEFLKGEEMSFFII

SEQ ID NO: 195543 - protein, 220 aa, Unknown
  Bacterial polypetide isolated from the Sargasso Sea
DDIVKHVFVCPGNAGTHLEDKVSNIELNLNEFSSIEKFCLEEKVELVIIGPEQPLVDGLTDFLQSKNIKTFGPSKNAAQLEGSKTFSKDFFVKYNIPTAKYKSFDNFESSLEYLNEISFPTVVKADGLAAGKGVIICQNSEEAIKALDSIFNDKAFGTAGNRVVIEEFLEGEEASFIAVVSKDKIIPLATSQDHKAVGDGDVGLNTGGMGAYSPAPIELK

SEQ ID NO: 195544 - protein, 309 aa, Unknown
  Bacterial polypetide isolated from the Sargasso Sea
IPTASYRSFTNANEAKKYIEENELPQVIKADGLAAGKGVVIVEDYETATKTIDEFISETKYGEASRKIIIEDFLEGQELSYIVMVDGTEYLPLATSQDHKTIGEGDTGLNTGGMGAYSPVPFVNDELDMIIKKKVIEPTVIGLSEDGIAFRGFLYAGLMIDSNLNPKVLEYNCRFGDPETQPIMLRLKSDLIDMIQTCFSGNISKYGIEWDNKSAMGVVMSSIGYPESYETGKEIYGLDKLFNKDETKVFHSGTIIENSNILTNGGRVLCITALGDGLCECQENAYSAVKQINWDGKYYRKDIGFRVMK

SEQ ID NO: 195545 - protein, 298 aa, Unknown
  Bacterial polypetide isolated from the Sargasso Sea
MNILVVGSGGREHALCWAIKKSPLVKKLYCTPGNAGIKNLAFCIETNNPSNDFIIKKCKEYKINLVVIGPETNLVGGLANDLIKEKIKVFGPTKEAAILESSKSFTKSLCTKYNIPTAKHKSFNNRKDASEYIKNQMFPLVIKADGIAAGKGVIIVKSKIEAISVINEIFDGKFGDAGNTIVIEEFLEGVEASFFAITDGKMIMPFSTAQDYKRAFDGNIGPNTGGMGAFSPAKNISTKLQEKIMDLIIYPTFDALKKEDILYKGILYAGLMIKDNKPKLIEYNARFGDPECQVILSR

SEQ ID NO: 195546 - protein, 257 aa, Unknown
  Bacterial polypetide isolated from the Sargasso Sea
NKGGRFVIEEKFVGEEFSLMSFCDGKVLKHMPAVQDHKRAYRGDTGPNTGGMGTYSDANHSLPFLNENDIARARMINEKTAEALQKEVGEGYKGILYGGFMATANGVKLIEYNARLGDPEAMNVLSILKTDIIDIFNSIGRGTLNELSIDFDNKATVCKYAVPEGYPDKPIKGKKIDITSVSNKDSLFFASVDIEGDHLIEAGSRTVAVVGIASSISQAEKIAEEEISKVDGPLFHREDIGTDDLIRARVEHMESLR

SEQ ID NO: 195547 - protein, 308 aa, Unknown
  Bacterial polypetide isolated from the Sargasso Sea
VTALYCAPGNAGISQEAECVQIAAEDIEGLIRFVQDNQIDFVVIGPEAPLVAGLSDKLAEINVKSFGPSADAAVMEGSKGFMKDFCARHDIPTANYGRFTNSKLAKDFIAENGVPIVVKADGLAAGKGVIIAETIEQANAAVDDMLEGDAFGAAGAELVIEEFLGGEEASFFVLCDGEIALPLASAQDHKRVGDGDTGPNTGGMGAYSPAPIITQSMTEKIMERIIKPTILGMKLEGKPYKGVLYAGLMIENDQPKLLEYNVRFGDPECQVLMMRLMSDLLPALIASSDGVLKDFDLRWYEETALTVV

SEQ ID NO: 195548 - protein, 285 aa, Unknown
  Bacterial polypetide isolated from the Sargasso Sea
MIICVIGSGGREHAICKSIQKSPKVKKIFCLPGNAGTQELAENIDLNIDDHDELIKFLKKSKVDLVIVGPEKPLVNGITNVLENNNIKVFGPRKVPSQLEGSKTFTKEICKKYNIPSAKFGVFETIDETLNFLKKSNFPIVIKADGLAAGKGVYISKNFQESEDAVKEIFGGKFGNAKKILVEEFLNGEEMSFFIICDGKNFKVFQTAQDHKRVGEGDVGKNTGGMGSYSPSGLINKNLENKIINKIITPTLKAINDLGEKYKGFLYAGLMISNNEPFLIEYNVR

SEQ ID NO: 195549 - protein, 324 aa, Unknown
  Bacterial polypetide isolated from the Sargasso Sea
MLRATPGSAIEENIENIAIDVLDFDALESFAKENEVGLTIVGPEAPLVDGVVDQFEAAGLKIFGPKKGAAQLEGSKAFTKDFLARHQIPTAEYQNFTDVEPALAYLREKGAPIVVKADGLAAGKGVIVAETLEQAEEAVKDMLSGNAFGDAGCRVVIEEFLAGEEASFIVMVDGKNVLPMATSQDHKRVGDKDTGPNTGGMGAYSPAPVVTPEIDARIMKEVIMPTVEGMAAEGNDYTGFLYAGLMIDESGAPKVIEYNCRFGDPETQPIMLRMQSDMVAHCLAALEGKLDSETAKWDPRPALGVVLAAAGYPADYPKGDVISL

SEQ ID NO: 195550 - protein, 259 aa, Unknown
  Bacterial polypetide isolated from the Sargasso Sea
DDFDDALNYLDEIDYPTVVKADGLAAGKGVIICENKNEAIEALQSIFKDNAFGSAGNKVVIEEFLEGEEASFIAVVSKDKIIPLVTSQDHKAVGDGDVGLNTGGMGAYSPAPVVTDEINRKILDEVMYPTMHGLIQENSPYLGFLYAGLMIKDNEIKVLEFNCRFGDPETQPILLRLKSSLVELCKAAINDNLDSYNIEWTEEHSCGVVIASKGYPENYESGKEVSIDQNKSENSKLFHAGTKFENNKIFTNGGRVFCA

SEQ ID NO: 195551 - protein, 193 aa, Unknown
  Bacterial polypetide isolated from the Sargasso Sea
MGAYSPAPIVTDAIHKKILDEVMYPTMQGLIDEGTPYLGFLYAGLMIKDDDIKVLEFNCRFGDPETQPILLRLNSSLVELCLSAINDDLDSYSIKWTDKHSCGVVIASEGYPESYESNKEVSFESFEAENAKLFHAGTEYKNDKVLTSGGRVFCATALGNNLKEAQENAYNLVSKVSFEGAFFRKDIGNKGIK

SEQ ID NO: 195552 - protein, 200 aa, Unknown
  Bacterial polypetide isolated from the Sargasso Sea
MIVGVIGSGGREHAICSKLYISKKISKIYCFPGNAGTSKIAQNIDIDLNDFSKLKKLISKYKIELLVIGPEEPLVNGMTDFFENEKIKVFGPNKQCSRLEGSKIFTKKICEKYNIPTAKFGTFSNLNDCIFFLNKNKFPIVVKADGLAAGKGVSICKNLIEAKKSVQEIFSGKFGKAKEVLIEEFLDREEMSFFIISDGI

SEQ ID NO: 195553 - protein, 207 aa, Unknown
  Bacterial polypetide isolated from the Sargasso Sea
RVGDGDTGLNTGGMGAYSPAPILNEEVLSKTIERIIRPTMREMVRRGLPFTGVLYAGLMIKDSNPRLVEYNVRFGDPECQVLMMRLGGQILDALLSTAKGNLSDVKINWADDYSLTVVMASKGYPGSYEKGTEIVGLADLPSNSNFMCFHAGTAEKNEKLVANGGRVLNITTRAETLIEAQKIAYEMIKNIDWPEGFYRKDIGWRAL

SEQ ID NO: 195554 - protein, 196 aa, Unknown
  Bacterial polypetide isolated from the Sargasso Sea
NIDINNFNKIYEFIVSLNIDLIIVGPEKPLVNGIVDFFDKKNIKIFGPTKKAAQLEGSKIFTKQICEKYNIPTAKFGIFKSKEIALKSLINVKMPIVIKADGLAEGKGVYICKDLKESKIAIKEIFDGKFGKAYQILIEEFLEGDEMSYFVISDGVSFKNFNTAQDHKRVGKGDTGKNTGGMGAYSPSSILNSNLE

SEQ ID NO: 195555 - protein, 301 aa, Unknown
  Bacterial polypetide isolated from the Sargasso Sea
KASQIEGSKIFMKKICEEFKIPSAKFKEINNINDAKNIITEFELPIVVKSDGLAYGKGVTICNSREEAIDDISKILNGKFSSSKKVIIEEFLKGEEASYFVISDGNNFLPIGTAQDHKRIGENDTGLNTGGMGAYSPSFLINNEIEEKIKNKIIAPTIDGMKKKGIPFKGILYAGLMIYKSEPRLIEYNIRFGDPECQVLMMRLEEDLLNLILSAVNNNLQKKKLNWSKEPGITIVAASKGYPEKYEKLYEITNLKQIKKNLKQQLFHAGTVKVNDNILTKWWQSIKFNRLSPSSLSKARE

SEQ ID NO: 195556 - protein, 304 aa, Unknown
  Bacterial polypetide isolated from the Sargasso Sea
EFLFRHEIPTAKYKSFTETSDALNYVKELEFPLVIKADGLASGKGVFITPDLTDAEQVIRTILSGDKFGEAGNQIVVEEFLEGEEVSYICMTDGYHCVPFASSQDHKARDNGDLGPNTGGMGAYSPAPLLNSDLEKRVLKEIIYPTLSGLRREGRLYKGFLYAGLMISSGGEPKVLEFNCRFGDPEAQPILSRLNSDLVDACLKALEGQVEGLELDFDPKTALGVVLAANGYPESYQTGWPIEGLKNFHDRKGLKLFHAGTKLSGRDVLSMGGRVLCVVGVGHNVEEAQRVSYEGVSLVESTNL

SEQ ID NO: 195557 - protein, 218 aa, Unknown
  Bacterial polypetide isolated from the Sargasso Sea
MGSAQDHKKVGEGDTGPNTGGMGAYSPARNLTKNLEIKIKKKIIEPTLRAMKALGHSYTGFLYAGLMIKDGEPYLIEYNIRMGDPECQVLMMKLKTDLLTIVDAAIENDLAGLKIDWDDKKCITIVLCAKGYPGEYIKDKEIKNLSNIHLDKNNQIFHAGTYEDKDKIFSKGGRVLNITSSGNDLNEARDNSLINLAKINWDHGFFRKDIGWRAIKKK

SEQ ID NO: 195558 - protein, 242 aa, Unknown
  Bacterial polypetide isolated from the Sargasso Sea
MNIALIGSGGREHVLCQKICESKSSKNILCIPGNAGTAKIAKNIDIDFLNFKILLKTIKNHKIDLVIVGPEEPLVKGMVDFLNKHKVKVFGPNKYAAKLEGSKAFMKSICKRYKIPTAKFKTCKNKKDVIKFLKKTQFPLVVKADGLAAGKGVTICKTKKEILNVSNEIFKGKFKTSKKLVLEEFLKGEEASYFLIVDKKSYKFFGSAQDHKRVGEREKGPNTGGMGAYSPAPIINKNLEKK

SEQ ID NO: 195559 - protein, 227 aa, Unknown
  Bacterial polypetide isolated from the Sargasso Sea
MNVGIIGSGGREHAISYSLKNSKKVNTIYCIPGNAGTKEIAINIDIDLKDFDQIKNLIIEKNIEFLIIGPEKPLVDGLVDFLKDTKVKVFGPNKAASQLEGSKIFTKNLCKEFNIPTANFGIFQNPSEAKIFLEKSNFPIVIKADGLAAGKGVYICKNISNAVQAVKEIFNGKFGLAKNVLIEEFLDGEEMSFFIITDGKTIKKFETAQDHKRVFEGDKGKNTGGMG

SEQ ID NO: 195560 - protein, 226 aa, Unknown
  Bacterial polypetide isolated from the Sargasso Sea
MNILVVGSGGREHALCHFIAKSPMCTKLFCAPGNAGILDNAICVKINILDIHELVSFALSENVELVVIGPEAPLVAGLTDSMIKAGIHVFGPTKKAAQIEGSKAFMKGLCSKYGIPSAAYKLFQDANSAKKFAKLTSIPIVVKANGLAAGKGVFICENVSEAFDAIDYIMIDRAFGESGSEVIIEEFLEGEEVSFFALVSGNDTMPLISVQDHKKALDGDNGLNTG

SEQ ID NO: 195561 - protein, 157 aa, Unknown
  Bacterial polypetide isolated from the Sargasso Sea
MIICIIGSGGREHAICKAISKSPKVSKIYCLPGNAGTQELAENINLDINDFEKILKFLKESKVDLVIVGPEKPLVNGIVDYLENNSIKVFGPRKIPSQLEGSKTFTKNICKKYNIPTANFGIFEKKEDAINFLKNSKFPIVIKADGLAAGKGVYISK

SEQ ID NO: 195562 - protein, 304 aa, Unknown
  Bacterial polypetide isolated from the Sargasso Sea
YPLYNKVYMRIAIIGSGGREHAICQKIFESKKVTKILCLPGNGGTEKIAHNIKVDIKNFEKIKSILISEKIDLTIVGPEEPLVNGIVDFLRKNGLHVFGPDKFCSKLEGSKIFTKKICEIEKIPTADFKIFKDINSSLNYLKNKKFPLVVKADGLAAGKGVYICENYMDAKKGINEIFNGKFGKADELLIEDFLIGEEMSFFIISDDKSFKVFNTAQDHKRVFEGDEGKNTGGMGAYSPSRLYNKDLERKIINKIILPTLKYLKKENGKYIGFLYAGLMVKDNEPYLIEYNVRMGDPECQTILP

SEQ ID NO: 195563 - protein, 234 aa, Unknown
  Bacterial polypetide isolated from the Sargasso Sea
EELSYFSIVDKNSYKFFGSAQDHKRVGEGDTGPNTGGMGAYSPAEILNDNLEKKIKSKIIDPTLTAMKELGQSYTGFLYAGLMIKKNEPYLIEYNIRMGDPECQVIMTRLNSDLCEIIDAATKNNLNNIEIKWIADSSITVVLCAKGYPGKYLKNSEIQNIPKVISDKNNQVFHAGTYEKNNKIYSNGGRVLNITSVGKNIIEARDKCLSNLKKINWIDGFYRKDIGWRAISKK

SEQ ID NO: 195564 - protein, 253 aa, Unknown
  Bacterial polypetide isolated from the Sargasso Sea
IGSGGREHALCLKIRESRLVKNIICLPGNAGTSKIAQNIPVNISNFKEILKIVKFFKIDLVVVGPEEPLVKGVVNFLIKNKIQVFGPNKYASKLEGSKAFMKELCRKKNIPTANFKICTNAKEVNIFIKKNSFPIVVKADGLAAGKGVTICNNEDQILKITNQIFKGKFKSSKKLVLEEFIEGEEVSYFLIVDKNNHLFFGSAQDHKRVRENDKGPNTGGMGAYSPAMIINKKLENKIINRIVLPTLNELRNK

SEQ ID NO: 195565 - protein, 271 aa, Unknown
  Bacterial polypetide isolated from the Sargasso Sea
LVLGVIDDFKKRGLKFYGPDRQSAKLEGSKAYAKSVMKRFGIPTARYEEFTDFEDALGYLRVQGAPIVIKADGLAAGKGVTVAETQQEAEAALDDALRQGIFGEAGQKVVIEEFLEGEEMTVLAFVDGETVLPLVPSQDHKPIFDGDRGPNTGGMGAYSPVPHLVQWLTEIQSLILKPLAKGLAESGQPYRGLLYTGLMLNESGPKVVEFNVRFGDPEAQVVLPLLENDLVEILSASCEGRLNEVELKWKKEASVCVIAAAPGYPGPPTKG

SEQ ID NO: 195566 - protein, 318 aa, Unknown
  Bacterial polypetide isolated from the Sargasso Sea
SICYKLKQSAKINKLICIPGNAGTKGLAENINIDIKNFQEILKIIKIKNIDIVIIGPEEPLVNGIVDFLHKEGVKVIGPDKFASKLEGSKSFMKELCKKRNIPTAKFGVFEDYDSAVNFLLNNKTPIVIKADGLAAGKGVSICKDIEEAKNKIKEIIEGKFKSSRKVILEEFLEGEELSYFIIADNNCYKFFGSAQDHKKVGEGDVGPNTGGMGAYSPSNLLNDELENKIKNKIIEPTIEEMKKLGHPYKGFLYAGLMISNGEPYLIEYNIRMGDPECQVLMMRLKTDLLDIFDLATKDELKKISIEWYNDEAITVVL

SEQ ID NO: 195567 - protein, 206 aa, Unknown
  Bacterial polypetide isolated from the Sargasso Sea
MNLAIIGSGGREHAICYKLKQSPKIKRLICIPGNAGTQKMAENIKEDISNFDALYKIIKKQNVDIVIVGPEQPLVDGLVNYLNQKKVRVFGPDKFSSQLEGSKAFMKNLCKKNNIPTANFGIFSNFNDASSFIKKNGVPIVVKADGLAAGKGVSICTSIDEALKNTKEILNGKFKSSNRVVLEEFLEGEELSYFVIVDNNSYHFFG

SEQ ID NO: 195568 - protein, 180 aa, Unknown
  Bacterial polypetide isolated from the Sargasso Sea
MNLAVIGSGGREHSICYKLKQSPKIKKLICIPGNAGTEKVAENIKEDISNFDAIYEVIKKKSIDLVIVGPEQPLVDGLVDYLNKKEIRVFGPNRFCSQLEGSKSFMKNLCLNNNIPTAKFGIFNNFDNASNFIKKHGAPIVVKADGLAAGKGVSVCATTKEALKNTKEILEGKFKSSNKV

SEQ ID NO: 195569 - protein, 247 aa, Unknown
  Bacterial polypetide isolated from the Sargasso Sea
MNVLVIGNGGREHALCYGIKQSPNCSNLYCIPGSDAISEIASSIIIDVNDHDAIIQFCLESKIDLVVIGPEQPLTKGLSNLLINNSILVFGPDQMGAELEKSKKFTKDICKKLNLKTAAYDVFDNYDNALNFCQNQSYPLVIKADGLAAGKGVIICQSKGDAKDALIKCFKDNSFGDAGSVVVIEEFLVGEEVSLFSLVDKNGFVLPLTTAQDHKKILEGEKGLNTGGMGAYTPVPSISSNKMNELS

SEQ ID NO: 195570 - protein, 241 aa, Unknown
  Bacterial polypetide isolated from the Sargasso Sea
KQLLEEFLDGEEASYFVITDGENFKQIGTAQDHKRIGEGDTGLNTGGMGAYSPSLLINEEIEKKIINKIILPTIQGMKELGCKYKGILYAGLMIKNNEPKLIEYNIRFGDPECQALMLRLEDDLLDIILSSIDEKLDNKPIKWSQNPSITIVAASKGYPGIYETKKEIKNIPKTYDKNEYIFHAGTTEIDGKIFTNGGRVLNSTVSLPSMKASRDRAIKLLNQVVWENKYFRKDIGWRVIK

SEQ ID NO: 195571 - protein, 296 aa, Unknown
  Bacterial polypetide isolated from the Sargasso Sea
SAKNYIQENDLPLVIKADGLAAGKGVVIVEDYVTANKTIDQFIGEKKFGDASKKIIIEDFLVGQELSYIVMVDGSEYLPLATSQDHKTIGEGDVGLNTGGMGAYSPVPFVNDELDIIINKEVIEPTIRGLSDDGISFRGFLYAGLMIDSNRKPKVLEYNCRFGDPETQPIMLRLKSDLIDMIQTCFSGSISDYEIEWDNKSAMGVILASAGYPESYETGKKISGLDKLSNIDDVKVFHSGTCIENKDILTNGGRVLCVTALGNDLNLSKEKAYSAVKKINWDGKYYRNDIGFRVIK

SEQ ID NO: 195572 - protein, 178 aa, Unknown
  Bacterial polypetide isolated from the Sargasso Sea
MIVGIIGSGGREHAICYKIKKSTLTTKIFCIPGNAGTSNIAENVNIKVNDFKSIKNFCLNNKIELLIVGPEQPLVDGIVDYFEGTNIKIFGTNKLSSKLEGSKIFTKKICNEYNIPTAKFKIFKNINETKKFLNEAQFPLVIKADGLAAGKGVYICKNYSDGLIAAKEVFGGKFGNAE

SEQ ID NO: 195573 - protein, 316 aa, Unknown
  Bacterial polypetide isolated from the Sargasso Sea
VLPRYQTFDSMSGVDEFLNILGEDFVVKYDGLAGGKGVKVSGEHLHSQREALDHCQDLVNSGGRFVIEEKFIGEEFSLMSFCDGKGLKHMPAVQDHKRAYKGDTGPNTGGMGTYSDANHSLPFLNKNDITHARMINEKTAEALQKEVGEGYKGILYGGFMATANGVQLIEYNARLGDPEAMNVLSILKTDIVDIFNSIGRGTLSELSIDFDNKATVCKYAVPEGYPDKPIKGKKIDISSVSNKDSLFFASVDIEGDHLIEAGSRTVAVVGIASSVSQAEKIAEDEISKVDGPLFHREDIGTDDLIRARVEHMESLR

SEQ ID NO: 195574 - protein, 283 aa, Unknown
  Bacterial polypetide isolated from the Sargasso Sea
GIAKSSGADFVVVGPENPLEDGLVDDIEKEGIPCVAPKKSVAKIETSKSFARKILDGCYKEKNPKRKEFNSTKGVESFLRELNENYVVKHDGLMGGKGVKISGEHLCSIEGALSFCKEIINTGGSFLVEEKLVGEEFSLMSFCDGESCAHMPVVQDHKRAFEGDVGPNTGGMGTYSFENHSLPFLFEEEVLDAQKTNELVLKELKNITGEKFKGVLYGGFMATKSGVKVIEYNARLGDPEAMNVLAVLKTDFIDVCDHIINETLSLLPVDFERAATVCKYAVP

SEQ ID NO: 195575 - protein, 260 aa, Unknown
  Bacterial polypetide isolated from the Sargasso Sea
LEGSKAFVKRLCSKFKIPTAKYKVCKNFKDVKLFLKKNNFPVVVKADGLAAGKGVKICNNKSELDSFCKKIFSGKFKTSNKLVLEEFIKGEELSYFVIVDKKTFIFFGSAQDHKRVGEKDTGPNTGGMGAYSPSPLLNKHIEKKIISRIIRPTIKALKTKKNPYTGFLYAGLMIKDDNPYLIEYNVRMGDPECQVILPRLKTDLTTIVLAALNNNLSKLKIKWSTLKCMTIVLCAKGYPGKYQQSKPIKNLRGLNLKKNL

SEQ ID NO: 195576 - protein, 167 aa, Unknown
  Bacterial polypetide isolated from the Sargasso Sea
MQILIIGSGGREHALAWKCAQDINVENVYVAPGNAGTALECKVKNVPIEPSNQQLLLDFCNTRGIDLVIIGPEAPLVEGLADFLGAQGVPTFGPSQHAAQLEGSKTFAKEFFAKYHIPTAAFVTCHNLESAKQYLTTAKMPIVVKADGLAAGKGVIICNNYEEAEAA

SEQ ID NO: 195577 - protein, 292 aa, Unknown
  Bacterial polypetide isolated from the Sargasso Sea
GLLAFAKDNSIDLTIVGPEAPLVEGLVDTFQENGLKCFGPSKAAAQLEGSKAFTKDFLARQNIPTGAYGNFTDMDEALAYVREQGAPIVIKADGLAAGKGVIVAMTLQEAEDAVRDMLDGNKFGDAGHRVVVEEFLEGEEASFIVMVDGKNVLPMATSQDHKRAGDGDTGPNTGGMGAYSPAPVVTDAVYKRIMDEVITPTVEGMAAEGMPYTGFLYAGLMINPDGAPKVIEYNCRFGDPETQPIMMRLQSDLAALCLAALEGKLDQAEIQWDPRPTLGVVMAAGGYPDSYD

SEQ ID NO: 195578 - protein, 294 aa, Unknown
  Bacterial polypetide isolated from the Sargasso Sea
REHALAWKAAQDHAVSEVFVCPGNAGTALENKLSNISINISDFEAIKDFCIEKKVVLVIVGPEQPLVDGLVDYLQNSNIQTFGPSSAAAQLEGSKTFSKDFFVKYGIPTANYATFNNFESAKDHLEKIPYPTVVKADGLAAGKGVIICQTQKEALQALISIFKDNAFGVAGASVVIEEFLIGEEASFIAVVSKDKIIPLATSQDHKAVGDGDVGLNTGGMGAYSPAPIVDKRLHKKIIDEVMQPTMQGLINEGSPYLGFLYAGLMINDGELKVLEFNCRFGDPETQPILLRLKS

SEQ ID NO: 195579 - protein, 161 aa, Unknown
  Bacterial polypetide isolated from the Sargasso Sea
MRVLLIGSGGRENAIAWSVYASPLLEKLYCIPGNPGIKEFAVCINVNIKSNEKIYDIIQQHEIDIVVIGPETPLVDGLTDFLEKKEVKVFGPSSYAAQLEGSKVFARLFCERHSIPQPDFKFYSNPEIAINYLKSSNLKNGYVIKADGLASGKGVLVTRRN

SEQ ID NO: 195580 - protein, 314 aa, Unknown
  Bacterial polypetide isolated from the Sargasso Sea
KLICIPGNAGTESLAKNINIDISDFNSVFETIKNYEIDIVIVGPEQPLVDGIVDFLSAKNVKVFGPDKFASQLEGSKVFMKDLCKKNNIPTAKFGSFDDLNSALDFLNKNKMPIVVKADGLASGKGVTICKSIEEAKIKVIEILNGKYKSSRKVLLEEFLNGEEISYFSIVDGNCYKFFGSAQDHKKVGEGDIGPNTGGMGAYSPSNLLDVKLEEKIKKKIINPTLNAMKNLGHPYRGFLYAGLMISKGEPYLIEYNIRMGDPECQVLMMRLKTDLLEIIDLATKDKLNDFEIEWNEDNCMTIVLCANGYPGNH

SEQ ID NO: 195581 - protein, 263 aa, Unknown
  Bacterial polypetide isolated from the Sargasso Sea
DISNFRAIYQLIKKKSIDIVIIGPEQPLVDGMVDYLKKKNIKVFGPDKFASKLEGSKAFMKNLCEKNKIPTAKFGVFSNFNDASVFIKNNGAPIVVKADGLAAGKGVTVCNSVSEALKNSKEILDGKFSSSKKVVLEEFLVGEELSYFLVVDDNTYHFFGSAQDHKRVGEGDKGPNTGGMGAYSPAPLLTLQLEKKIKKKIIEPTLKAMKNLGHPYKGFLYAGLMIVKNEPYLIEYNIRMGDPECQVLMMRLQSDLLEIINNT

SEQ ID NO: 195582 - protein, 231 aa, Unknown
  Bacterial polypetide isolated from the Sargasso Sea
GEEASFIAVVSKDKIIPLATSQDHKAVGDGDVGLNTGGMGAYSPAPIVNEEIHQKILDKVMFPTMQGLIEEGSPYLGFLYAGLMIKDGEIKVLEFNCRFGDPETQPILLRLNSSLVELCMAAINNNLDSYSIEWSQKHSCGVVIASEGYPETYKSNKEININENKNQDAKLFHAGTKYENEKIITAGGRVFCATALGNDLKEAQENAYNLVQKVEFEGAFHRKDIGFKGIK

SEQ ID NO: 195583 - protein, 304 aa, Unknown
  Bacterial polypetide isolated from the Sargasso Sea
PGIKKFIIEEKIDLVVIGPEDPLVNGLVDYLEDLNILVFGPCSNGARLEGSKIFSKKFLFENDIPTGKASFFSDPESAYSFLDNCEYPIVLKADGLAAGKGVLVSKNSKEAKEWVDSVMNNSLFGVAGENILIEECLYGTELSFMGIMTPSEFIPFETSVDYKPLFDGNMGPNTGGMGCISPSPFMNDVLREKIMKKVVQPTIDGLNNMDVSYYGFMYFGLMVKDDNPKVLEFNCRLGDPETQCLMMQMDSDLVECLEDALDNRKVSISWKQGSSMGVVIASSGYPEKYRTSIPIEIGNLDELK

SEQ ID NO: 195584 - protein, 134 aa, Unknown
  Bacterial polypetide isolated from the Sargasso Sea
MINVLIIGSGGREHAFTWKASQSDLVEKIFVAPGNAGTSLEPKAENINISASDIDALVSFSKKENIDLVIVGPEDPLVNGISDEFNKAGIKCFGPESLGAQLEGSKDFAKAFMKRHNIPTASYESFTNANKAKK

SEQ ID NO: 195585 - protein, 322 aa, Unknown
  Bacterial polypetide isolated from the Sargasso Sea
VGPEQPLVNGIVDYFEKKKVMIFGPSKKASQLEGSKIFMKNFCSRYNIPTAKYLEINSLQQAENGLKNFNTPIVVKSDGLAAGKGVSIFNDKSLALKEIKDILNGKFTSSKKLILEEFLEGEEASYFIITDGNNHLQIGTAQDHKRVGENDTGPNTGGMGAYSPSFLISDDTENKIINKIIKPTLNGMKDLGCPYKGILYAGLMIKNSEPKLIEYNIRFGDPECQILMMRLKNDLIELIISTLNGTLKDKKVSWKNEHGITVVGVSKGYPDKYEKFKELKNINTFTNNKNKQLFHAGTVKKEDGKIYSAGGRVINSTSHLWF

SEQ ID NO: 195586 - protein, 46 aa, Unknown
  Bacterial polypetide isolated from the Sargasso Sea
SEGRTYTGFLYAGLMVTNDGNLKVLEFNCRFGDPETQPIMMRLKSD

SEQ ID NO: 195587 - protein, 228 aa, Unknown
  Bacterial polypetide isolated from the Sargasso Sea
MNVLIVGSGGREHAFTWKASQSDLVEKIFVAPGNAGTSLEPKAENIDISASDIDALISFSEKENIDLVIVGPEDPLVNGITDEFKKVGIKCFGPESLGARLEGSKDFAKAFMKRHNIPTAGYESFTNACKAKKYIQENKLPLVIKADGLAAGKGVVIAEDYETANKTIDQFISETKFGDASKKIIIEDFLVGQELSYIVMVDGTEYLPLATSQDHKTIGDGDVGLNTG

SEQ ID NO: 195588 - protein, 317 aa, Unknown
  Bacterial polypetide isolated from the Sargasso Sea
EKIILKLFGPSKLASKLEGSKIFTKELCDKYNIPTAKFGIFKNSNDANNFVEKCHLPIVVKADGLASGKGVYICNKRDEAEIAIKEIFNGKFGLAKEILVEEFLDGEEMSFFIISDGETYFPFGTAQDHKRVFEGDKGKNTGGMGAYSPSRLENEDLNNKIIKKIINPTLKALKDLNTSFKGFLYAGLMIVKNEPFLIEYNVRMGDPECQTILPKLKTDFVKLINACVNKNLNSINLEWHNDKSLCIVLCSKGYPESYDNNIEIQNLKKVKLNENEFIFHAGTKKEKDKILSNGGRVLNFVIRSNNFKNNRKTAIKL

SEQ ID NO: 195589 - protein, 270 aa, Unknown
  Bacterial polypetide isolated from the Sargasso Sea
AGTFLEEKIENISLNINNNEDVSNFCISNNIELVIVGPEDPLVNGLVDFLESKNIKVFGPRKGAAQLEGSKTFAKDFFIKYGIPTANYKSFDNHHDALKYLDKIDFPSVVKADGLAAGKGVIICDNREAAEKALEDIFESNAFGDAGNRVVIEDFLNGEEASFIAVVSDDQIIPLATSQDHKAVGDGDIGLNTGGMGAYSPAPIVTDEIHKRVIDEVMLPTMNGLKAEGFPYLGFLYAGLMIEGDEIKVLEFNCRFGDPETQPIMLRLES

SEQ ID NO: 195590 - protein, 242 aa, Unknown
  Bacterial polypetide isolated from the Sargasso Sea
IKEKNIEVVVVGPEEPLVNGITDFLKKRSVRVFGPDKFASQLEGSKAFMKNLCKNNNIPTASFGIFDKLTDAENFINKSKSPIVVKADGLAAGKGVVICKSLEEAKIETKEILNGKFKSSSKVVLEEFLKGEELSYFVVVDENSYHFFGSAQDHKRVGEGDKGPNTGGMGAYSPAKNLTDSLEKKIKKKIIEPTLLAMKKLGRPYTGFLYAGLMIVKQEPYLIEYNIRMGDPECQVLMMKLE

SEQ ID NO: 195591 - protein, 160 aa, Unknown
  Bacterial polypetide isolated from the Sargasso Sea
MIVGIIGSGGREHAICAKIKESPKINKIFCIPGNAGTKKIAENIDIKIDDFKSIKEFCNKNKIDLLIVGPEQPLVDGIVDYMEGSKVKVFGPNKIASQLEGSKIFTKKICKKYKIPTANFKIFENLNDAKKYLTNSKYPIGCKSDGLAAGKGVYICKTML

SEQ ID NO: 195592 - protein, 291 aa, Unknown
  Bacterial polypetide isolated from the Sargasso Sea
MNVGIIGSGGREHAICEAINKSQNVNKIYCFPGNAGTALIAENVEINIENFDEFKNFIILNNIKLIIVGPEKPLVDGIVDLLENENIKVFGPNKKASQLEGSKIFTKKLCDKYRIPTAKFGIFKTEKDAKNFINKTNFPIVIKADGLAAGKGVYIINSKDEAINAIQEIFQGKFGRAEKLLIEEFLRGEEMSYFIITDGKTIKSFETAQDHKRVLEGDLGKNTGGMGAYSPSRMINVKLEEKILKKIIEPTINGLKETGINYKGFLYAGLMIKDNEPYLIEYNVRMGDPEC

SEQ ID NO: 195593 - protein, 215 aa, Unknown
  Bacterial polypetide isolated from the Sargasso Sea
MRIAIIGSGGREHAICQKISESKKVDKIFCIPGNGGTEKLAQNVTIDFNDFEKIKFFLLDNKIDFTIIGPEEPLVNGIVDFLNKNNLKVFGPDKFCSKLEGSKIFTKKLCESESIPTAKFNIFNDLDKSINFLKKKKFPLVVKADGLAAGKGVYICNNFLESKIAVEEIFGGKFGKADELLIEDFLTGEEMSFFIIYDNNSFKIFNTAQDHKRVL

SEQ ID NO: 195594 - protein, 231 aa, Unknown
  Bacterial polypetide isolated from the Sargasso Sea
IEGPEISVFVFCDGSNISDAVVACDYKRIGDGDIGPNTGGMGSYSSPGIISDSQLDEIKDRILSPVVKHMAKIGIPYTGVLYAGLMLTNSGPQVLEFNCRFGDPEAQVILPRLESDLSSVMYSCAEGKLLQTQVSWDDKASVGVVLASDGYPNSFETGFPVTGLEHNSPGTYVFCGGVTQGEDNSVVTSGGRVLTVVGHAKNIQDARDLSYARAESIKFTNKFNRKDIGSY

SEQ ID NO: 195595 - protein, 234 aa, Unknown
  Bacterial polypetide isolated from the Sargasso Sea
SKEFSKLFMERNSIPTASFKSFISYKEAESYIKKSELPIVIKADGLASGKGVRVCFEKIEAIDFLKDIMLDKVFSSSGEKVVIESFLEGEEASFFVFSDGENIQMLDSSQDHKRLLDKDEGPNTGGMGAYSPAPIVDTETRANIIEMVVKPVFEGFKKEALIYTGILYIGLMIKDKKPSVVEFNCRFGDPETQPLLFRIDSDIFDLFYLTALGELDKYKLKWKNKTSVSVVLAS

SEQ ID NO: 195596 - protein, 215 aa, Unknown
  Bacterial polypetide isolated from the Sargasso Sea
IPTAKYKSFDDYVLALKHLDEIEYPTVVKADGLAAGKGVIICKNIKEATEALKSIFKENTFGAAGNKVVIEEFLEGEEASFIAVVSKDKIIPLATSQDHKAVGDGDIGLNTGGMGAYSPAPIVTDTINKRIIEEIMYPTMHGLIQESSPYLGFLYAGLMIKGDEIKVLEFNCRFGDPETQPILLRLKSSLVKLCIAAIDDSLDSYSIEWTKKHSC

SEQ ID NO: 195597 - protein, 218 aa, Unknown
  Bacterial polypetide isolated from the Sargasso Sea
MKVLVVGSGGREHALAWKLSKSSLVSEIFVAPGNGGTAIEESIQNIAIDSNDIEGLSNFAKKSGIDLTIVGPEDPLVNGITDKFQDEGLLCFGPSKDAARLEGSKEFMKDFLLRNKIPTASYKTFTDAEKAINYIEEQSCPIVIKADGLAAGKGVTVAFDINQAKEAVNQSLNSKIFGDAGTKIVVEEYLEGEEASFIVLTDGNKVIPFASSQDHKAR

SEQ ID NO: 195598 - protein, 263 aa, Unknown
  Bacterial polypetide isolated from the Sargasso Sea
MHRSKNVLVVGNGGREHALVWKLTRDGANVFAAPGNAGTAEEATNLPIQATDSDALLDAVKQHEIDLVVVGPEAPLVNGLVDKLTEAGVRTFGPSALAAQLEGSKIFCKELLHTNDIPTATYRQFNSLDKARSFLESREDEPVVVKADGLAAGKGVFVCSNREEALDAINQLQRDPQFRTAASGVLIEERLDGVEVSVIAITDGRAIVTLPPLQDHKAALDGDRGPNTGGMGAFCPAPFVTQSLMTEIEEQILVPTVHGMRRR

SEQ ID NO: 195599 - protein, 195 aa, Unknown
  Bacterial polypetide isolated from the Sargasso Sea
MIVGIIGSGGREHAICHALNKSKKIDKIYCFPGNAGTDDIAENINLDINNFEEIKNFIISKKIKLVVIGPEKPLVDGLTDYLESFDIKVFGPSKVASQLEGSKIFTKNICKKYDIPTANFGVFNDIYQAKNFLDKSNFPIVIKADNLAAGKGVYICENKEESYQAIKEIFDGKFGAAENVLIEEFLESEEMSFFI

SEQ ID NO: 195600 - protein, 257 aa, Unknown
  Bacterial polypetide isolated from the Sargasso Sea
KAENIDISVTDIDALVSFSKKEDIDLVIVGPEDPLVNGITDEFKEAGIDCFGPESLGAQLEGSKDFAKAFMKRHNIPTASYKSFADANEAKKYIQENELPQVIKADGLAAGKGVVIVEDYETAYKTIDEFISDTKYGDASRKIIIEDFLKGQEVSYIVMVNGTDYLPLATSQDHKTIGEGDIGLNTGGMGAYSPVPFVDDELDIIINKEIIEPTVRGLSKDGIDFRGFLYAGLMIDSNLNPKVLEYNCRFGDPGDST

SEQ ID NO: 195601 - protein, 184 aa, Unknown
  Bacterial polypetide isolated from the Sargasso Sea
MNILVVGGGGREHAIAWKAAQSTAVKQVWVAPGNAGTAREPRINNININATDIEQLAQFALDNTIELTIVGPELALAAGIVDHFTRLGLNCFGPTKQAAQLESSKQFCKDFLTQHNIPTAKYAHFTNTDKAITYLSSQSYPIVIKADGLAAGKGVVIAENFKQAKQAINHMLSGNSLEQRVIQS

SEQ ID NO: 195602 - protein, 232 aa, Unknown
  Bacterial polypetide isolated from the Sargasso Sea
CFGPTGQAAQLEGSKAFSKDFMRRYNIPTAAHETFSDAATAKAYVRAQGAPIVIKADGLAAGKGVIVAQTEEEAADAIDDMLSGNGFGEAGHRVVIEEFLPGEEASFICLCDGTKAIPFASSQDHKARDDGDRGPNTGGLGAYSPAPVVTEQVHELAMKQVILPTLKGMEAEGSPYRGFLYAGLMVSPEGDIKVVEFNCRFGDPEAQPIMMRLQSNLLPLLQQAAIGDCKRT

SEQ ID NO: 195603 - protein, 287 aa, Unknown
  Bacterial polypetide isolated from the Sargasso Sea
MKSKKVKKIFCIPGNGGTSKIANNIEININNFEEIKSFLINKNIDLTIVGPEEPLVNGIVDFLNNAGLKVFGPDKFCSRLEGSKIFTKKICKSENIPTANFEIFKDELSSLNYLKETKYPTVVKADGLAAGKGVYICENFSEASKAVKEIFKGKFGKAEEVLIENFLVGEEMSFFILYDNDTFKIFNTAQDHKRVFEEDKGKNTGGMGAYSPSRLNNIELEKKIINKIILPTLKYLKSESGKYVGFLYAGLMIKNNEPYLVEYNVRMGDPECQTILPLLKNDLIQVL

SEQ ID NO: 195604 - protein, 272 aa, Unknown
  Bacterial polypetide isolated from the Sargasso Sea
TFSRNFCKRHNIPQPGFTYCNDIETAKKQIKVLNGYCVVKADGLAAGKGVVVCDTVDQAIIASREMLEKNKFGDAGKSILIEERINGIEASVFAVSDGKDAVLIGTAQDHKRAYDNDEGPNTGGMGAISPAPALDQKLKKEIFNDIIMPTINGMNLEGYPYEGILYAGVMITDNGPKVIEFNCRFGDPETQVVLPRLNTDLVSIVQKTIKKNLKDITIDFIPQSAITVVIASKGYPGEFKKEVLLPSLKNLNDETEISVFHSGTTKDKNGKI

SEQ ID NO: 195605 - protein, 245 aa, Unknown
  Bacterial polypetide isolated from the Sargasso Sea
MIICIIGSGGREHAICKTISTSPKVSKIYCLPGNAGTQELAENINLDINDFEKILKFLKESKVDLVIVGPEKPLVNGIVDYLESKNIKVFGPRKIPSQLEGSKTFTKNICKKYNIPTANFGIFEKKEDAINFLKNSKFPIVIKADGLAAGKGVYISKNLSEAIEAVNEVFDGKFGVAKKILVEEFLNGEEMSFFIVCDGKNFKIFKTAQDHKRVNEGDEGKNTGGMGAYSPSGLINEALEIKIID

SEQ ID NO: 195606 - protein, 304 aa, Unknown
  Bacterial polypetide isolated from the Sargasso Sea
TADYDTFTDPGAAHAFIDRLGAPIVIKADGLAAGKGVVVAMTLQEAHDAVDFMLVDNKYGVTHNEGGARVVIEQFLEGEEASFIVLCDGKNVLALATSQDHKRLKDGDEGPNTGGMGAYSPAPVVTADVHARAMREIILPTIRGMEKDGIPYTGFLYAGLMIDAKGHPKTLEFNCRMGDPETQPILMRLKSDLVDVLSAAVDGKLDQIEVQWDRRTALGVVMAAHGYPESPRKGDLITGLPADADDAVVFHAGTQLKDGVVSVTGGRVLCVTVLADSVKQAQQRAYDVARGIHFEGAQYRRDML

SEQ ID NO: 195607 - protein, 296 aa, Unknown
  Bacterial polypetide isolated from the Sargasso Sea
FTSQLEGSKAFMKNLCKKNNIPTAKYMVFTDYIEASTFIKKNGAPIVVKADGLAAGKGVSICKTIDEALKKTKEILDGKFKSSSRVILEEFLEGEELSYFCIVDDNSFVFFGSAQDHKRVGENDTGPNTGGMGAYSPSPLLNNKLEKKILDKIIKPTLEALKNLGHSYKGFLYAGLMIHREEPYLIEYNVRMGDPECQVIMMRLNSDLFQIINHTIENKLHNLKIDWDKKSAITIVLCAKGYPNNYIKNSEIKNLQNVMQDKNNQIFHAGTYKKNKKIYSIGGRVLNVTAMAKNLV

SEQ ID NO: 195608 - protein, 275 aa, Unknown
  Bacterial polypetide isolated from the Sargasso Sea
EAGVKVFGPNAKAAMIEGSKGMMKDLCTKYDIPTATYARFDDCDAAKDYVRLKGAPIVVKADGLAAGKGVILCRNKTEAHAAIDLMMTQDAFGDAGAELVIEEFMVGEEASFFALVDGENALPLVAAQDHKAVGDGDTGPNTGGMGAYSPASVVDEAMAKTIMKTIIEPTIRGMAADGIAYRGVLFAGLMITDAGPKLIEYNCRFGDPECQALMMRLKNDFLEVLEAAVKGELDQVELKWSSDAALTVVMAVNGYPGSYEKGSEIKGIEEAEANG

SEQ ID NO: 195609 - protein, 304 aa, Unknown
  Bacterial polypetide isolated from the Sargasso Sea
EYPIVIKADGLAAGKGFTIAQSFEDAKTALNDCFVNKVFKSAGDCVVIEDFLQGEEASLFAFTDGKTVVPMVSAQDHKAIHDGDKGPNTGGMGAYSPAPVLTDDVEQKVMDQILQPLVDGFRSDGIEYKGILYAGLMIDDFGDPYVVEFNIRFGDPETQIVLPKLRTDLISILEAISTQTLSSIDIEWDARHTVCIVMAANGYPAAYNKGDLIAGIQDSSDPNTWVYHAGTKQTDKGEFITNGGRVLNVCAEGDTLKDAIDSAYQRVKRISFDGAYYRTDIGQKGLARLTKSAYLKLQHYLSKR

SEQ ID NO: 195610 - protein, 241 aa, Unknown
  Bacterial polypetide isolated from the Sargasso Sea
MEGVEEFLGELGDYYVVKYDGLAGGKGVKVAGDHLHSHGEAISYCKELVDSGGTFVIEKKLIGEEFSLMSFCDGSSLSHMPAVQDHKRAYEGDTGPNTGGMGTYSDSDHSLPFLEKSHILAAQKINQMTADALRDKFEEGYKGILYGGFIATRDGVKVIEYNARFGDPEAMNVLSILETDLIDICNAIINEELNTIDIRFNNSATVCKYAVPEGYPDDPIKNKEIDVEDVTDTEKLFYASN

SEQ ID NO: 195611 - protein, 249 aa, Unknown
  Bacterial polypetide isolated from the Sargasso Sea
MGINVLIIGSGGREHAIAWKLTQSPKLKKLWVLPGNAGIEDYAETVDIKETDINAICKFVENNTIDLTIVGPEMPLAAGITDTLNHQGFRVVGPTKAAAQLETSKSFAKKIMHENNIPTAHSETFTDAFLAKEYIHKLESLVVIKADGLAAGKGVTVCDNSKEAEAAIEKILIKKAYGDAGTKILVEERMFGRETSAHAFTDGISVKHMPFSCDHKPVYDNNLGPNTGGMGVYSPPLWLSDEIRKDIET

SEQ ID NO: 195612 - protein, 281 aa, Unknown
  Bacterial polypetide isolated from the Sargasso Sea
MNIGIIGSGGREHALCYKLKQSKIVHKIYCIPGNAGTSLIAENLDIKTNDFEKIKKISIEKKIELLVVGPEKPLVDGISDFFKDTNIKIFGPNKLASQLEGSKTFTKKLCKKYNIPTSKFNIFESKDNAKKFLANSTFPIVIKADGLAAGKGVYICSNDYEAITAVDEIFDGRFGKADCVLIEEFLTGEEMSYFIITDGKTFKMFQTAQDHKRVGEGDIGKNTGGMGAYSPSRLINDELQNKINEKIVKPTLKGLSDLNSEYVGFLYIGLMIIDNEPFLIE

SEQ ID NO: 195613 - protein, 402 aa, Unknown
  Bacterial polypetide isolated from the Sargasso Sea
MKILVIGSGAREHALCYLISKSSLVSSIYAIPGNYGISQLAECEQIDQTDFEKIYDFCKSKMIELVIVGPEVPLVAGIVDFFKETEIKIFGPDKYASQLEGSKGFMKDLCKQNEIPTADYARFDNKEEAINYLNAQPLPIVIKADGLAAGKGVTVADTKKMAEQAINDIFDEKFGANMDVVIEEFMDGEEASYFVCCDGEDFVSLESAQDHKRIGENDTGPNTGGMGAYSPAPIFTPKIKEQVDREIITPTLNALKKNGHPYKGILYAGLMIKNGYARLVEYNIRFGDPECQVLMLRMKNDLIKLVLNCLEGSLSNTKLEWEDDNSATVVVAAKGYPGDYKKNTKIIGYENFDSNDLFQVFHAGTKHDGNNLLANGGRVLSVTAKNKNLRDALNMIYAYIGQ

SEQ ID NO: 195614 - protein, 424 aa, Unknown
  Bacterial polypetide isolated from the Sargasso Sea
MNFAVIGSGGREHSICFKLKQSLKIKRLICIPGNAGTREIAENINININNFDEILAVIKKFEIDVVIVGPEEPLVNGIVDFLKNEGIRVLGPDKFSSQLEGSKAFMKNLCKENNIPTARFGIFKDFKSACDFLSKSKTPIVVKADGLAAGKGVSICNSHNEAKIKIKEIIEGKYKSSNKVVLEEFLHGEELSYFVLADDNCYKFFGSAQDHKKVGEGDIGPNTGGMGAYSPSNLITAELELKIKKEIIEPTLKAMKDLGHPYSGFLYAGLMIREGKPYLIEYNIRMGDPECQVLMMRLKSDLVEIADSTTRNNLQKTKIEWSENKSITIVLCAKGYPGKYIKDSEIKNLKDLKIDKDNQVFHAGTYIKDKKILSNGGRVLNITSSAKELIDAREKILTNLDKIKWDDGFYRKDIGWRAIKNENN

SEQ ID NO: 195615 - protein, 422 aa, Unknown
  Bacterial polypetide isolated from the Sargasso Sea
MKILVIGSGGREHSLVWAFSQNPKCQEIHCIPGNAGIKKLAICKDLNILDNDLIISYCKLNKIDFVVVGPEAPLANGLINSLNKNNILSFGPTKEAAFLESSKSFTKSICDIKNIPTANYILATSKKDALNFIEKFVPPFVIKLDGLAAGKGVFILKKKSEAIEIIKNIYLKKNKKITLLIEEFLVGNEASLFVVCNGKNFKLLGSAQDYKKIYDKDLGANTGGMGAFSPALNISPEVEKEILDKIVTPTLIEMDERGTPFSGILYAGLMITHKGPKLIEYNVRLGDPECQVIAIRLGAQLLDALFYCSTNEFSKIKINYADDFGVTVVMASGGYPNKYETGFKIKGIEKFNNSSDIEIFHSGTKCIDENIVTNGGRVLSITSRSSNLNDARKKTYEVVDKINWENEFHRKDIAKKYTHSFD

SEQ ID NO: 195616 - protein, 237 aa, Unknown
  Bacterial polypetide isolated from the Sargasso Sea
MNLAVIGSGGREHALCYKLRQSKEVKKLYCIPGNAGTKKFADNINQDVSNFEEVYRVLKDKKIDLVIVGPEEPLVNGIVDFLTERKINVFGPNKFSSQLEGSKAFMKNLCKKYDIPTANFGIFDELNTAFNFLEKSELPIVVKADGLAAGKGVSICKSKEEAKTKIKEIIEGKFKSSKKVVLEEFIEGEELSYFCVVDKNTFRFFGSAQDHKRVGEGDTGPNTGGMGAYSPASLLTK

SEQ ID NO: 195617 - protein, 236 aa, Unknown
  Bacterial polypetide isolated from the Sargasso Sea
MNFAVIGSGGREHAICFRLNRSKKIKKLICIPGNAGTKKVAENINADISDFENVYRIIIENKIDFVVIGPEQPLVDGIVDYLSRKKIRVFGPNKFASQLEGSKAFVKKLCQNYNIPTANFGIFDNFLSASNFIKKNKLPIVIKADGLASGKGVYICKSVEEAENKTKEILGGKFKTSKKVVIEEFLEGEEMSYFVIVDKNNYCFFGSAQDHKRVGEGDTGPNTGGMGAYSPSTLLD

SEQ ID NO: 195618 - protein, 330 aa, Unknown
  Bacterial polypetide isolated from the Sargasso Sea
MNILVIGGGAREHAICYAVHQSSKLSKLYAIPGNYGISQLAECHIVDTNDFDELFSFAIKKAIDLIIVGPEVPLVNGIVDFFTSRKIKIFGPDQFAAQLEGSKSFMKDLCNEHRIPTAQYEKFQNSDDAIKYLETQSYPIVIKADGLAAGKGVTIAEDFKTASIAVQDIFNAKFGANMDVVIEEFMYGEEASYFICSDGKNFISLISAQDHKRIGENDTGPNTGGMGAYSPAPVFTEKVKKQVDAEIIKPTLKAMFDKGHPFKGILYAGLMIENEKAKLVEYNIRFGDPECQVLMMSLKSDLIDLIMYSINGSINDYDCDWYDEDCATVV

SEQ ID NO: 195619 - protein, 418 aa, Unknown
  Bacterial polypetide isolated from the Sargasso Sea
MNILVIGQGGREHAIAWKLSQSKKASKIFVSPGNGGTELESDCTNVEIDTNDFSSIKNFVEHNAIEVVIVGPEDPLVNGIKDYLSESNVLVFGPDKKGARLEGSKIFSKKFLFENNIPTGDASFFSSSEDAIKYLKNSIFPIVLKADGLAAGKGVLVAKKFDEAKNWVNEVMNNLKFGDAGSNIVIEECLFGTELSYMGILTPDSFIPFETSLDYKPLLDGNKGPNTGGMGCIAPSPLINESLKKNIFEMVVKPTINGLRNIGVNYFGFMYFGLMIKNDIPKVLEFNCRLGDPETQCLMMQMKSDLLDIILQAFERGEPKITWNKGANLGVVIASAGYPNNYQRNKLIKLSRFDGVKLFHAGTKIVEGKLITNGGRVFSLNASSKTIKSCKEAVYTNIKNVYFEDMIFRKDIGEVYES

SEQ ID NO: 195620 - protein, 455 aa, Unknown
  Bacterial polypetide isolated from the Sargasso Sea
MNFLVIGSGAREHIIGEKIVESGGNLYSVLTNRNPGLLKISRKTVSVSDYSSSDSKKIIMDFAKTNDVECVVIGPEDPLANGFADMFMKTGISTVGPVSNLAQIETSKGFTRDLLSKYGIDCSPRYQRFSSLSGVREFLDLLSDDFVVKYDGLMGGKGVKVSGEHLHSHEEALAYCEHLISNSGTFVVEEKIFGEEFSLMSFCDGNKLIHMPAVQDHKRAYEGDLGPNTGGMGSYSDANHSLPFLLDQEVREAQVINERVATSLKQEFGVGYKGILYGGFMATKDGAKLIEYNARFGDPEAMNLLSLLDTDFAKICFDIGSGNLEIANFRKVASVCKYIVPEGYGSSPNSEATLVVDEAYNDYSNLYYAAVNLENDDTISTTSSRAAGIVSTGESLSAAEESCEMGLSKISGKNLFVRHDIAKAALIQKKNRQYGEYSVMIILDVILLAIGFHVI

SEQ ID NO: 195621 - protein, 316 aa, Unknown
  Bacterial polypetide isolated from the Sargasso Sea
MIVGSGGREHAFTWKASQSDLVDKIFVAPGNAGTSLEPKAENIEISCSDIEGLVSFSKKENIGLVIVGPEDPLVNGITDAFTEAGINCFGPESLGAQLEGSKDFAKSFMKKHNIPTASYESFTDADQAKNYIQENEFPLVIKADGLAAGKGVVIAEDNETANKTIDEFIGETKFGDASKKIIIEDFLLGQELSYIVMVDGTEYLPLATSQDHKTIGEGDVGLNTGGMGAYSPVPFVNDQLDTTIREKVIEPTIRGLSKDGIMFRGFLYAGLMIDSNYNPKVLEYNCRFGDPETQPIMLRLKSDLIDMIQTCFSGGI

SEQ ID NO: 195622 - protein, 420 aa, Unknown
  Bacterial polypetide isolated from the Sargasso Sea
MKIAILGSGGREHALTLSISKSKKIKKIFCIPGNAGTSELAENVSLDINNFKLLKNFLSSNGIKFVIVGPEKPLVDGVVDFLEKFGIKVFGPNKTASQLEGSKIFTKNLCKKYKIPTANYGVFNKENEAIKFLKSAAHPIVIKADNLASGKGVYICQNIVESEKAVFEIFKGKFGFTNKVLIEEFLVGEEMSYFIISDGKKIKSFETAQDHKRVQEGDKGKNTGGMGAYSPSRLYSKKLEQKILKKIIQPTIKGISDLGTKYKGFLYAGLMIVNDEPYLIEYNVRMGDPECQTILPKLKSDLFEILDACVEENLSDIKIKWDKRKSICVVLCSNGYPDIYKKDIKINNFEKLIINKNNFVFHAGTKIKENEIIAVGGRVLNFVSLSDDFSKARINIHNNLKKLNWKKGFYRKDIAFRVID

SEQ ID NO: 195623 - protein, 399 aa, Unknown
  Bacterial polypetide isolated from the Sargasso Sea
MNILLIGGGGREHSIAEALSKSSKINELHCIPGNAGIEKIARCHNYNISNQKEILNFCENNNIDIVFIGPEIPLVEGLADYLNRNSFFTFGPNQKASQLEGSKSFTKDICKKYNIPTAAYETFSNAKDALAYIDNHSIPLVIKVDGLAAGKGVIIAETKDHAINSVNEIFSGKFGNAGDEIVIEEFLDGEEASFFIISDGESFLPLTSAQDHKRIGDGDIGLNTGGMGAYSPAPIMNKDLEEKTINKIIKPTIKAMNDYGSPYIGILYAGLMIKDNEPKLIEYNVRFGDPECQVIIPRLDNDLVELLVNVKEKNLNNYTLKWKENFAITVVLAAKGYPESYETGDEIKGLDAIDNIDGVEIFHAGTKTKNNKIVTSGGRVLNINGYGKNLVDAKEKAYN

SEQ ID NO: 195624 - protein, 426 aa, Unknown
  Bacterial polypetide isolated from the Sargasso Sea
MVSVLIIGSGGREHAFTWKASQSDLVDKIFVAPGNAGTSLESKAVNIEISPNDIESLVSFSKKENIGLVIVGPEDPLVNGITNAFMKAGINCFGPQSLGAQLEGSKDFAKSFMKKYNIPTASYESFTDADQAKNYIQENELPLVIKADGLAAGKGVVIAENYETAIKTIDEFISETKYGEASKKIIIEEFLIGQELSYIVMVDGTEYLPLATSQDHKTIGDGDVGLNTGGMGAYSPVPFVNNELDTTIKKKVIEPTVRGLSKDGISFRGFLYAGLMIDSNMNPKVLEYNCRFGDPETQPIMLRLKSDLIDMIQTCFSGSIRDYNVEWDHKSAMGVVISSHGYPESYETGKEIIGLDTLSDRKDIKVFHSGTRSENDRILTNGGRVLCVTALGDDLNQSNENAYRVVDQIDWDGKYFRKDIGFRVMK

SEQ ID NO: 195625 - protein, 240 aa, Unknown
  Bacterial polypetide isolated from the Sargasso Sea
MNIGIIGSGGREHSLCFKLKESKKVDKIYCFPGNAGTGQIAENINIDVSSFKKIKEECLKKNIKLLVVGPEQPLVDGIVEYFNDTKIKVFGPNKISSQLEGSKTFTKKLCKKYNIPTSNFEIFNDEKSALNYLQDKKYPLVIKADGLAAGKGVYICKNENEANTAIKEIFNGRFGNAKCVLIEEFLFGEEMSYFIICDGSNYKFFQTAQDHKRVGENDTGKNTGGMGAYSPSRLYTSELD

SEQ ID NO: 195626 - protein, 215 aa, Unknown
  Bacterial polypetide isolated from the Sargasso Sea
MKVGVIGSGGREHAICTSLKKSKNIDKIYCFPGNAGTSFIAENIEIKLNNFEELKRVIEELGIDIIIVGPEKPLVDGIVDFLELNKIKVFGPDRISSQLEGSKIFTKNLCKKYNIPTAKFGVFNSIQDSLSFLNECKFPIVVKADGLAAGKGVYICETNDQSKKAVEEIFNGKFGEAKQILIEEFLKGEEMSFFIISDGINYKIFGTAQDHKRAL

SEQ ID NO: 195627 - protein, 404 aa, Unknown
  Bacterial polypetide isolated from the Sargasso Sea
MAWKLSKSKQVSKIFVAPGNGGTANEAKCFNKSINVNNFSALEELVNSENIELIVVGPEDPLVNGINDYFQDSGVKVFGPTKEGAQLEGSKIFSKKFMFENNIPTGAANFFSESKLAKNYLQTVKFPIVLKADGLAAGKGVLVAKELGEAMQWIEDVMEKNKFGDAGNEVLIEECLFGTELSYMGIMTPKGFFPFETSVDYKPLLDGNSGPNTGGMGCMSPSPFMNSELLKNINEQVVEPTAHGLRKAKIDFYGFMYFGLMVKDNQPKVLEYNCRLGDPETQCLMLQLESDILEVLLDALSDNLENISWSKESSMGVVIASGGYPESYKKDQHIEILDLNEVKLFHAGTKKENGELLTSGGRVFSLNAKAPDLEACKKTIYTNIKNIKFNNMVYRKDIGDIYES

SEQ ID NO: 195628 - protein, 390 aa, Unknown
  Bacterial polypetide isolated from the Sargasso Sea
MENSISNVDIKADDIEGLAQFAINEQIDLTIIGPENPLVNGITDKFEESGLRCFGPSKGAAQLEGSKKFMKDFLKKYNIPTAEYSAFTDPVKAIDYVREKGCPIVIKADGLAAGKGVTIVNNIDEAKEAIDLALESEIFGEAGRKIVIEEFLNGEEASFIVMTDGINAIPFPTSQDHKARDEMDRGPNTGGMGAYSPAPVVDSIVHKKIMQDVIYPTLKGLQEEGFKYVGFLYAGMMIDQNKNLKVLEFNCRFGDPETQPIMMRLESDLADLCFKACESNLSNQTLEWNEKKSLGVVIAAEGYPSKYELNKKIKNIPSEKNDLKVFHAGTRLLEGSLTSNGGRVMCVTALGSTIQSAQKKVYNAISEIAYEDAFYRKDIGYRAIAREKEK

SEQ ID NO: 195629 - protein, 438 aa, Unknown
  Bacterial polypetide isolated from the Sargasso Sea
MSTNILLIGSGAREHAIARSCSKSSLNYKIFCIGSGYNPGIMGKCEDLVVANFNDPNVVTNYAKEHKINYAIIGPENPLQAGIADALWKINVKVFGPTQSLARIETSKEFARKMLKDFNIPGGPIFKSFISLKGVEEFCNDLQNEFVIKFDGLAGGKGVKVFGEHLHGMGQALDYCKNIINKGGKFLIEEKFIGEEFSLMSFCDGETIQHMPIVQDHKRAYENDTGPNTGGMGTYSNFDHSLPFLEARDVEAAKRINELTMRALKEKTGMNYMGVLYGGFMAVRDGVRLIEYNARFGDPEAMNVLSLLETDLIEICKAVTEKKLSNIKIQFDKKATVCKYAVPQGYPDSPIKGEKIDTSNVKNIDSLYFASVDEVDGNLIESGSRTLAAIGVADTIVVAEKTAEESISNVKGPLFYRKDIGRQNLLNRRIENMRKLRC

SEQ ID NO: 195630 - protein, 432 aa, Unknown
  Bacterial polypetide isolated from the Sargasso Sea
MKVLVIGGGGREHALAWKAAQSPQVELVYVAPGNAGTALEPKLENLNISATDIPALLDFAKTNQIELTIVGPEAPLVLGVVDAFNAAGLPIFGPTKAAAQLEGSKAFTKDFLARHNIPTAGYKNCTEIQDAKAFVRELTGKTGYPVVIKADGLAAGKGVIIAQDQAEADAAIEDMLAGNKFGDAGSRVVIEEFLKGEEASFIVMVDGKNILAMATSQDHKARDNADHGPNTGGMGAYSPAPVVTQSVHDWTIANVIRPTVDGMAAEGNVYTGFLYAGLMIAPDGSAKVLEYNCRFGDPETQPIMMRLKSDLVELCLAATRGELDKVTAEYDARAAVGVVLAAGGYPDDYRKGDVIQGLSLGNHDAKVFHAGTEMKDGHVVTNGGRVLCATALGHTVTEAQKAAYLLVDEIHWDDVYFRTDIGYRAIAREQQG

SEQ ID NO: 195631 - protein, 266 aa, Unknown
  Bacterial polypetide isolated from the Sargasso Sea
MKIAILGSGGREHAIAMQIAKSHNLDELYCIPGNAGTNSINEVAKVYNVNLDINNFEILGKFIDEYKINLVIVGPEKPLVEGVVDFLSKKKIKIFGPNKNVSQLEGSKIFTKKICEKYNIPTSKFGIFASNEDACRYLENANMPIVVKADGLAAGKGVYICEDIKSAKSAVDEIFNGKFGKANQILIEEFLEGDEMSYFVISDGKTFKRFNTAQDHKRVGEKDKGKNTGGMGAYSPSGLINEDLDSRILERIVKPTFAAIKDMGET

SEQ ID NO: 195632 - protein, 339 aa, Unknown
  Bacterial polypetide isolated from the Sargasso Sea
MNVLIVGSGGREHAFTWKASQSNLVEKIFIAPGNAGTSIEPKAENIDISASDIDSLVTFSKKENIDLVIVGPEDPLVNGITDELKKVGIKCFGPESMGAQLEGSKDFSKAFMKRHNIPTAGYESFTNAYEAKKYIQENELPKVIKADGLAAGKGVVIIDDYEIAFETIDEFISEKKYGDASRKIIIEDFLVGQELSYIVMVNGTEYLPLATSQDHKTIGEGDVGLNTGGMGAYSPVPFVNDELDTIIKKEVIEPTVRGLSEDGIPFRGFLYAGLMIDSNLNPRVLEYNCRFGDPETQPIMLRLKSDLIDMIQTCFTGDIGNYEIEWDERSAMGVVMSSK

SEQ ID NO: 195633 - protein, 264 aa, Unknown
  Bacterial polypetide isolated from the Sargasso Sea
MAISSTRPHALPDLRRVLVVGGGGREHALSWALQRHDAIETVWITPGNAGSDQQALAIAETDSAALIAHCQTQSVDLVVVGPEAPLAAGVADALRQAGIAVFGPGAEGAQLEASKAWAKQLMQEAGVPTAGHWAVTSEAEALAVLAEVGRPLVVKADGLAAGKGVTVADTIEQAEAAIRDAFAGRFGSAGSHLVLEERLQGPEVSVFALCDGERMVLLPPAQDHKRLLEGDRGPNTGGMGAYAPAPLLDAEGLEQVRRLVLEPT

SEQ ID NO: 195634 - protein, 421 aa, Unknown
  Bacterial polypetide isolated from the Sargasso Sea
MKIAILGSGGREHALAVQISKSKKLDKIYCIPGNAGTDSIGKNVNLELDNFDEIYRFIKNEKIDLVIVGPEKPLVDGIVDYLNEKNIKVFGPNQKVAQLEGSKIFTKKICEKYNIPTANFGIFRDKEETFKFLQNSKMPLVIKADGLAAGKGVYICKDIESSKNAVIEIFNGKFGKADQILVEEFLEGDEMSYFVISDGLCFKSFNTAQDHKRVGEGDTGKNTGGMGSYAPSKLINKNLEEKIINRIIKPTLRAIKDMDQIYNGFLYAGLMIKDNEPYLIEYNVRMGDPECQTILPLLKSDLLDLIIASCNNNLKEKNIEWFEKKSLCIVLCSKGYPESYKKNIDIPNLQKIKSSNNNFIYHAGTKISDNAILAVGGRVLNFVSISDNYLDSRNEAINQIEKLNWKNGFYRSDIGFKVIDK

SEQ ID NO: 195635 - protein, 390 aa, Unknown
  Bacterial polypetide isolated from the Sargasso Sea
MKKVLVLGSGAREVAIARSVSQSSIKNAIFCISKDINPQINDLCEDYLVCDVNDVASIVSYAKEKEIDLVIVGPENPLASGVVNALEKTGVGCVGPKKEVAMIETSKAFARMIIDLCCPEKNPQRKEFVSIAGVKNFMETLGGEYVVKFDGLMGGKGVRISGEHLKNLNEGLDYANEIIKDGGRFLVEEKLVGEEFSLMSFVDGKTCKHMPIVQDHKRAFEGDVGPNTGGMGTYSYGNHSLPFLKKEDVLEAQKTNELVAKQLLKHTGSPYVGVLYGGFMLTKDGIKVIEYNARFGDPEAMNVLSILKSDFLSVCISMVEGRLDKESVLFDKLATVCKYVVPVGYPNNPAKGFEVFCDQDDPSLFLASVMLKDKKLIACGSRTAAVVGKT

SEQ ID NO: 195636 - protein, 438 aa, Unknown
  Bacterial polypetide isolated from the Sargasso Sea
MINNFLVIGSGAREHAIVNALYSSRLDSKIYCIGNSYNPGIMKLCFEYVVGDYNSSSFVVNYANKNKIDYAIIGPENPLEAGVSDALWEANIKVVGPKKELAKIETSKAFTRNLQVDYGIPGGPKFQSFTTLNGVAEYFEELNHEFVIKFDGLAGGKGVKVYGEHIETIPDALDYCKSIIDSGGSFLIEEKFIGEEFSLMSFCDGKNIQHMPIVQDHKRAYENDSGPNTGGMGTYSDYNHSLPFLNDTDIESAKKINLLTMEALKNKTGMDYIGILYGGFMAVKNGVRLIEYNARFGDPEAMNVLSILKTDFIDICKRMVSASLDKIKIEFENKATVCKYSVPNGYPDNPVKNQIIDISDIKDKDKLFYASVNIEGDNLIETGSRTLAVISVAETIVDAERSAEDNIKRVKGPVFHRSDIGTKELVDSRKSNMDKIRC

SEQ ID NO: 195637 - protein, 427 aa, Unknown
  Bacterial polypetide isolated from the Sargasso Sea
MKVLVIGSGGREHALAWKLSKSNLVSEIFVAPGNGGTEMEESIKNIDIDSNDINGLLDFAEQSNIDLTIVGPEDPLVCGITDKFQENGLLCFGPSKDAARLEGSKEFMKNFLQRHKIPTAIYKTFTDSKKAIRYVKEKGCPIVIKADGLAAGKGVTVAFNIDQANEAINQSLNSHAFGDAGSKIVIEEFLEGEEASFIVLTDGNTVIPFASSQDHKARDDGDLGPNTGGMGAYSPAPVVTESVHQRILKEVIHPTIQGLKSEGIDYCGFLYAGVMVDSNDNIKVLEFNCRFGDPETQPIMMRLKTDLAELCLQACLKDLSNQDLDWDDRKSIGVVMASGGYPSDYEKGKIIEGITDESEDLKVFHAGTTYEEGKIITNGGRVLCVTTLGESVLLARKKAYDAISQIEWKDCFYRNDIGYRAIEREQN

SEQ ID NO: 195638 - protein, 435 aa, Unknown
  Bacterial polypetide isolated from the Sargasso Sea
MNILIIGSGAREHAIARALHKSPKSKFIYCLASNNNPGIKKLCYDMQVIDINNNELVVQYSKKNNISLAIIGPENPLANGVVDMLGKAGVQAVGPTKEMAKIEASKSFARDLLLEYNIPACPKYKVFKSTEGVKAFLTDLGEGFVVKYDGLAGGKGVKVSGDHLNSHEEAMKYCDEIIQKGGKFVVEEKLVGEEFSLMSFSDGKTLIHMPAIQDHKRALDGDLGPNTGGMGTYSAANHSLPFLNKNEVKKAQEINSLTAAALKKKFGYGYKGILYGGFIATSNGVKLIEYNARFGDPEAMNVLSLLQSDFVDICTSIANSNLKNTDISFLNKASVCKYAVPSGYPNKPIKGEEINVDNVFEPDMLFYASVTKEGDRLILAGSRAVAVVAVEESISEAEKVAENEICSIKGPLFHRKDIGKESLIQNRINHMKSIR

SEQ ID NO: 195639 - protein, 420 aa, Unknown
  Bacterial polypetide isolated from the Sargasso Sea
MVNVLVVGAGGREHALSWKLSTSEKIDQVYTAPGNGGTLQNVELSVTDIEGLAKFAQEKNCFTVVGPEDPLAAGIVDAFVEKGLPIFGPSKNAAKLESSKIWAKEFMKRNSIPTADFEIFDDAQKAKDFVKSYEKPVVIKADGLAAGKGVIVCKNKDEANDAIDTILTKKSFGDAGSKIIIEERIDGVEASYIALCDGKIGIPMATSQDHKRVFDNDEGPNTGGMGAYSPTPIIDEKLGTEIQEKIIDKTIHAMRDEGFEFKGFLYAGIMIKDGIPYVLEYNVRMGDPECQPILMRLDSDLYDYLHASYEGKLNELPEISWKNQYSVCVVLASKGYPSSYPTGDEITGFENISSDAFVFHAGTKKQDDKIKSNGGRVLGVTALGSSLEDAINNAYDACNHIHWTNKYHRTDIGKKGLSNL

SEQ ID NO: 195640 - protein, 390 aa, Unknown
  Bacterial polypetide isolated from the Sargasso Sea
MNVLVIGSGGREHALCYGIKRSPNCSNLYCIPGSDAISKIASSINIDINDQNAILQFCAESKIDLVVIGPELPLTKGLSNLLMDNSILVFGPDQMGAELEKSKKFTKDICKKLNIATAVYEVFDNYDDGLNFCQNQSYPLVIKADGLAEGKGVIICQTKEDAKDALIKCFKDNSFGDAGSVVVIEEFLVGEEVSLFSLVDKNGFVLPLTTAQDHKKILEGEKGLNTGGMGAYTPVPSISSNKMNKLSKTFVEPIIQHLAEQGIYYQGMFYAGLILTDKGPNLLEINVRFGDPETQAIIPLLETDLLELLHASAIGTLNEIEKIKWKNDYAMTVVMAANGYPEDYKKFTSINNLENLSLTKDEYLFHAGTTLKENQWLSNGGRVLNISSTG

SEQ ID NO: 195641 - protein, 398 aa, Unknown
  Bacterial polypetide isolated from the Sargasso Sea
MNILLIGGGGREHSIAEALSKSSKINELHCIPGNAGIEKIASCHNYDISNQQEILNFCENNNIDIVFIGPEIPLVEGLADYLNRNSFFTFGPNQKAAKLEGSKSFTKDMCKKYNIPTATYETFSNAKDALVYIDNHSIPLVIKVDGLAAGKGVIIAETRDHAINSVNEIFSGKFGNAGDEIVIEEFLDGEEASYFIISDGESFIPLTSAQDHKRIGDGDIGLNTGGMGAYSPAPIMNKELEEKTINKIIKPTIKAMNDYGSPYIGILYAGLMIKDNEPKLIEYNVRFGDPECQVIIPRLENDLVELLVNVKEKNLDNYTLKWKENFAITVVLAAKGYPESYETGDEIKGLDAIDNIDDVEIFHAGTKTKNNKIVTSGGRVLNINGYGKNLVDAKEKAY

SEQ ID NO: 195642 - protein, 422 aa, Unknown
  Bacterial polypetide isolated from the Sargasso Sea
MKVLVIGSGGREHALAWKSAQDKSVEQVFVAPGNAGTAMEEKISNVPLNIDKFDSVKDFCIKKDIELVIIGPEQPLVNGLADYLQNNGINAFGPSKYAAQLEGSKTFSKNFFIKHGIPTAQYASFSNFYDAVDHLKKIDYPTVVKADGLASGKGVIICDDQTQAEKALKSMFKEKAFGRAGNRVVIEDFLEGEEASFIAVVSKDKVLPLVTSQDHKPVGEGDIGLNTGGMGAYSPAPIVTQELNKKIMDEVMYPTVNGLIEEGHPYLGFLYAGLMIKDNEVKVLEFNCRFGDPETQPIMIRLKSSLVQLCLSALKDELDSHTIDWTDKHSCGVVIASNGYPEAYESNKEVSIQDYDDSDVKLFHAGTKIQDDKVVTSGGRVFCATALGTDLKDAQKKAYNLVDKINFEGAFCRKDIGYKGIK

SEQ ID NO: 195643 - protein, 415 aa, Unknown
  Bacterial polypetide isolated from the Sargasso Sea
MYILVVGSGGREHALAWKCAQDKSVSEVFVCPGNAGTALENKVSNVSINVDNFAVVKDFCIEKNIALVIVGPEQPLVDGLVDYLHSNDIKTFGPSSAAAQLEGSKTFSKDFFIKYGIPTATYAAFDNFDSAKDHLKNISYPTVVKADGLAAGKGVIICQTENEALEALVSIFKDQAFGDAGTSVVIEDFLIGEEASFIAVVSKDKIIPLATSQDHKAVGDGDVGLNTGGMGAYSPAPIVDEKLHQKIIDEVMHPTMQGLIAEGSPYLGFLYAGLMINDGELKVLEFNCRFGDPETQPILLRLKSSLVELCLAAIDDQLNDYQIQWTDEHACGVVIASQGYPEDYIKNNEVTFEFSNMEGKKLFHAGTKLQDDKVLTSGGRVFCATALGKNLHEAQSKAYDLVESVSFDGAFYRKD

SEQ ID NO: 195644 - protein, 429 aa, Unknown
  Bacterial polypetide isolated from the Sargasso Sea
MKVLIIGNGGREHALAWKAKQSPLVTRVFVAPGNAGTAHEGSIENVAISATDIPALLAFAKEQRIGLTIVGPEAPLVKGVVDAFRAEGLAIFGPTAAAAQLEGSKAFAKDFLARHAIPTAEYQNFTEVEPALAYLREKGAPIVIKADGLAAGKGVIVAMTLSEAEEAVRDMLSGNAFGDAGARVVIEEFLDGEEASFIVMVDGEHVLPMATSQDHKRVGDGDTGLNTGGMGAYSPAPVVTADVHRKVMEQVIMPTVRGMAAEGNVYTGFLYAGLMIDGQGNPKVIEFNCRFGDPETQPIMLRMRSDLVELCLAACAGKLDQVEAIYDPRVAIGVVLAAGGYPGDYQQGKPISGLPVEEASGEKVFHAGSQLEGDTVVTAGGRVLCATALGHSVAEAQKRAYQLAGRIKWDGVFYRHDIGWRAIEREQQQ

SEQ ID NO: 195645 - protein, 388 aa, Unknown
  Bacterial polypetide isolated from the Sargasso Sea
MKIAILGNGGREHALAVNISKSSRVKKLYCIPGNAGTNLIAENVKLDFYDFEKLEKFVKENDISLVIVGPEKPLVEGVVDFLTNKGIKVFGPNKASAQLEGSKIFTKKICEKYEIPTAQFGVFDSIEAANKYLEKANKPIVIKADGLAAGKGVYICEDTESAKNAVVEIFNGKFGKAEQVLVEEFLQGEEMSYFVISDGKTFKKFNTAQDHKRVGEGDNGKNTGGMGAYCPSGLINEELDAKIVEKIIKPTFKAINDMGAVYKGFLYVGLMIKNNNPYLVEYNVRMGDPECQTILPLLKSDLLEIILSCCEENLENSIVEWKNKKSICVVLCAKGYPDNYKENIEISNLDKIKNDKNSLVYHAGTQLINNKVCSTGGRVLNFVSISDD

SEQ ID NO: 195646 - protein, 178 aa, Unknown
  Bacterial polypetide isolated from the Sargasso Sea
MNVLVIGGGGREHALAFKAAQSSDVSTVFVAPGNAGTATEPKLENVAIDVNDIAGLVSFAQGNDVELTIVGPEAPLVAGVVDAFTNAGLMIFGPTQAAAQLEGSKAFTKDFLARHNIPTAEYQNFTEIDPAIAYVHEKGAPIVVKADGLAAGKGVIVAMTLEEAEDAIRDMLAGNAFG

SEQ ID NO: 195647 - protein, 410 aa, Unknown
  Bacterial polypetide isolated from the Sargasso Sea
MAWKCSTDKFVEKVYVAPGNAGTLLEEKIENISLDINNNEDVSKFCISNNIELVIVGPEDPLVNGLVDFLESKNIKVFGPRKGAAQLEGSKTFAKDFFIKYGIPTANYKSFDNYHDALKYLDKIDFPSVVKADGLAAGKGVIICNDREAAEKALEDIFESNAFGDAGNRVVIEDFLNGEEASFIAVVSDDQIIPLATSQDHKAVGDGDVGLNTGGMGAYSPAPIVTDEIHKRVIDEVMLPTMNGLKAEGFPYLGFLYAGLMIEGDEIKVLEFNCRFGDPETQPIMLRLESSLTNLCLDAINKKLDEHQIEWSSMHSCGVVLASSGYPEDYETDMEIDIKNHFSENEKLFHAGTKFVDNKILTSGGRVFCMTALGETLEIAIDNAYNALPKINFEGMFFRSDIGKKGLKND

SEQ ID NO: 195648 - protein, 305 aa, Unknown
  Bacterial polypetide isolated from the Sargasso Sea
MKIAILGNGGREHAIASKISKSPKLEKLYCIPGNAGTVSLAENVELDFYNFESLLQFLKENKIDLVIVGPEKPLVDGVVDFLLKENIKVFGPNKKVSQLEGSKIFTKKICEKYNIPTAQFGVFRTDTEAYSYLKNANMPIVVKADGLAAGKGVYICEDLESSNKAVQEIFNGKFGLAEQVLIEEFLQGDEMSYFVLSDGKTYKRFNTAQDHKRVGEGDIGKNTGGMGAYSPSGLINAELDKKIISKIVNPTFQAIKDMGENYKGFLYVGLMIKNNNPYLIEYNVRMGDPECQTILPLLANDLLDL

SEQ ID NO: 195649 - protein, 408 aa, Unknown
  Bacterial polypetide isolated from the Sargasso Sea
MAWKAAQDQFVLEVFVCPGNAGTTLENKLSNISIDINEFEAVKNFCIEKDIALVIVGPEQPLVDGLVDYLQKSNIKTFGPSSAAAQLEGSKTFSKDFFVKYGIPTANYAAFSNFESAKDHLDKIPYPTVVKADGLAAGKGVIICQTKAEALQALVSIFKDNTFGIAGASVVIEEFLSGEEASFIAVVSKDKIIPLATSQDHKAVGDGDVGLNTGGMGAYSPAPIVDERLHKKILDEVMQPTMHGLIKEGSPYLGFLYAGLMIKDGELKVLEFNCRFGDPETQPILLRLKSSLVELCIAAIDDDLDNHEIEWTKQHACGVVIASEGYPENYTKNNEVKIQATDLDGVKLFHAGTKLDQNKIFTSGGRVFCATALGNNLREAQQKAYNLVESVAFNGAFCRKDIGDKGIR

SEQ ID NO: 195650 - protein, 425 aa, Unknown
  Bacterial polypetide isolated from the Sargasso Sea
MKLLVVGSGGREHALAWKLAQSPRVQMVYVAPGNGGTAQDERLKNVDITALDELADFAEREGVAFTLVGPEAPLAAGIVNLFRARGLKVFGPTREAAQLESSKDFAKAFMKRHGIPTAEYETFSDVAAAHAYIDAKGAPIVVKADGLAAGKGVVVAMTLEEAHEAVDMMLSGNKLGDAGARVVIEEFLDGEEASFIVMVDGKHALALASSQDHKRLLDEDRGPNTGGMGAYSPAPIVTPQMHARVMREIIMPTVRGMEKDGIRFTGFLYAGLMIDKEGNPRTLEFNCRMGDPETQPIMARLKSDFSKVVEQAIAGTLDTVELDWDRRTALGVVLAAHGYPDAPRKGDRINGIPAETEQAVTFHAGTTLDGDKLTTSGGRVLCVVGLADSVREAQQHAYETINQINFEGMQYRRDIGFRALNRKSA

SEQ ID NO: 195651 - protein, 361 aa, Unknown
  Bacterial polypetide isolated from the Sargasso Sea
MNILIIGSGGREHALAWRCAQDNFVKNVFVCPGNAGTYLENKVSNVEMDSNDFDAIEKFCVKENIELVIIGPEQPLVMGLTDFLQSKNIKTFGPSKDAAQLEGSKTFSKDFFVKYNIPTAGYKSFNNYEESIHHLDLISYPTVVKADGLAAGKGVIICENKDEAVDALNSIFKDKAFGSAGNKVVIEDFLDGEEASFIAVVSKDKIIPLVTSQDHKAVGDGDVGLNTGGMGAYSPAPIVTDEIHKKILDEVMYPTMQGLIDEGTPYLGFLYAGLMINNDEIKVLEFNCRFGDPETQPILLRLNSSLVELCLSAINDDLDRYSIEWTNKHSCGVVIASEGYPESYESNKEVSFESFEEENTK

SEQ ID NO: 195652 - protein, 419 aa, Unknown
  Bacterial polypetide isolated from the Sargasso Sea
MKVLLIGSGGRENAIAWSVYASPLLEKLYCIPGNPGIKEFAVCIDVNIKNYEKIYDIIQKYEIDIVVIGPEAPLVDGLTDFLEKKQVKVFGPSSYAAQLEGSKVFARLFCERHSIPQPDFKFYSNPEIAINDLKSSNSKNGYVIKADGLASGKGVLVTEKIEEAISFVDDLYNKEIFGHSGKQFLIEEKVFGTEASIFTLIDGKNYVFLSTAQDYKRVFENNLGPNTGGMGAISPSPLVDEKILEKIENEIIIPVINGMDQEGKPFKGVLYTGVMLTDNGPKVIEFNVRLGDPEAQVILPRLKSDFLTAILATIDGGLKHLNLRWHEEIALNVVLTSSGYPGNFIKGKRITGLNNISNNSLIFHSGTKSDKLGNLLTNSGRVLSLTSLAKNIDEARKKVYGDIKKIKFDKAFYRKDIGL

SEQ ID NO: 195653 - protein, 174 aa, Unknown
  Bacterial polypetide isolated from the Sargasso Sea
MINVLIVGSGGREHAFTWKASQSDRVEKIFVAPGNAGTSLEPKAENINISASDIDALVSFSVKEHIDLVIVGPEDPLVNGITDEFKKVGIKCFGPESQGASLEGSKDFAKAFMKRHNIPTACYESFTDANEAKKYIQKNELPQVIKADGLAAGKGVVIVEDYETAFKTIDEFIS

SEQ ID NO: 195654 - protein, 164 aa, Unknown
  Bacterial polypetide isolated from the Sargasso Sea
MIAEGSSYLGFLYAGLMIKDDEINVLEFNCRFGDPETQPIMMRLESSLVELCLAAINNTLGSHKVRWSSNHACGVVIASEGYPGNYETDKEVVINNHSEDDVKLFHAGTKIQDNQLVTSGGRVFCATGTGADLATAQKNAYNLVSKISFKGAVNRKDIGNKGIS

SEQ ID NO: 195655 - protein, 265 aa, Unknown
  Bacterial polypetide isolated from the Sargasso Sea
MIKVLIIGSGGREHAFTWKASQSNLVDKIFVAPGNAGTSLEPKAENIEISSSDIEGLVSFSKTENIGLVIVGPEDPLVNGITDAFTEAEINCFGPESLGAQLEGSKDFAKSFMKKHNIPTASYESFTDADQAKNYIQENDLPLVIKADGLAAGKGVVIVEDHETANKTIDQFIGETKFGDASKKIIIEDFLVGQELSYIVMVDGTEYLPLATSQDHKTIGEGDVGLNTGGMGAYSPVPFVNDQLDITIREKVIEPTIRGLSEEGI

SEQ ID NO: 195656 - protein, 422 aa, Unknown
  Bacterial polypetide isolated from the Sargasso Sea
MNILVIGSGGREHALAWKCAQDNFVNHVYVCPGNAGTFLEDKVSNINLDTNDFKSIEDFCLEENIELVIIGPEQPLVEGLTDYLHSKNIKAFGPSKNAAQLEGSKTFSKDFFVKYDIPTAGYKSFIDFESSVNYLDEIDYPTVVKADGLAAGKGVIICQNKKEAIKALNSIFNDKAFGSAGNKVVIEEFLEGEEASFIAVVSKDKIIPLVTSQDHKAVGDGDVGLNTGGMGAYSPAPIVSDEIHQKILEQVMQPTMKGLIEEGSPYLGFLYAGLMIKNNEIKVLEFNCRFGDPETQPILLRLKSSLVNLCLAAINNTLDSYDIEWTQEHSCGVVIASKGYPENYESNKEIQININDENDAKLFHAGTKYENNKILTSGGRVFCATALGVDLKEAQQNAYNLVNKVDFQGAFYRKDIGYKGIK

SEQ ID NO: 195657 - protein, 214 aa, Unknown
  Bacterial polypetide isolated from the Sargasso Sea
MVSLLIIGSGGREHAFTWKASQSDLVDKIFVAPGNAGTSLESKAVNIEISPNDIEGLVSFSKKENIGLVIVGPEDPLVDGITDAFMKAGINCFGPQSIGAQLEGSKDFAKSFMKKHNIPTASYESFTDADHAKKYIQENELPLVIKADGLAAGKGVVIAENYETAIKTIDEFISETKYGEASKKIIIEEFLIGQELSYIVMVDGTEYLPLATSQ

SEQ ID NO: 195658 - protein, 422 aa, Unknown
  Bacterial polypetide isolated from the Sargasso Sea
MNVLIIGSGGREHALAWKCAQDDFVEHVFVSPGNAGTHLETKVSNIELNLNEFNSIEKFCLIEKVGLVIIGPEQPLVDGLTDYLQSKNIKTFGPSKHAAQLEGSKTFSKDFFVKYNIPTARYKSFDNFESSVEYLNETSFPTVVKADGLAAGKGVIICQNIEEAKQALDSIFNDKTFGTAGNRVVIEEFLEGEEASFIAVVSKDKIIPLATSQDHKAVGDGDIGLNTGGMGAYSPAPIVTDEIHEKILNQVMYPTMNGLIEEGSPYLGFLYAGLMIKDSEIKVLEFNCRFGDPETQPILFRLNSSLVELCNLAIDDKLDNYSIEWTEKHSCGVVIASAGYPEKYESNKEVSIKENNNEDLKLFHAGTKYENGMILTNGGRVFCATALGCDLKDAQKNAYNLVNNVKFEGAFFRSDIGFKGIK

SEQ ID NO: 195659 - protein, 418 aa, Unknown
  Bacterial polypetide isolated from the Sargasso Sea
MNILVIGQGGREHAIAWKLQKSEKVTEVFVAPGNGGTELEARCTNVDISSDDFPMIKSFVEQNSIELVVVGPEDPLVNGIKDYLSDSNVLVFGPDAKGAQLEGSKIFSKEFLFENNIPTGEAEFFSSSNKALDYLEKSNFPIVLKADGLAAGKGVLVTNELEEAKNWIKEVMVDSKFGVAGKNILIEECLFGTELSFMGILTPDFFIPFETSIDYKPLYEGNKGPNTGGMGCMSPSPFMNEDLKNNIIDTVVKPTISGLKNKGINYYGFMYFGLMVKDNVSKVLEFNCRLGDPETQCLMMQMESDLLDAILQALNGEEPKITWKDGATMGVVIASGGYPNSYKNRVPINIGALKNGKLFHAGTKSINGKLVTNGGRVFSLNYSSDSMDDCKRYIYDNIGEVNFNGMTFRTDIGEIYES

SEQ ID NO: 195660 - protein, 422 aa, Unknown
  Bacterial polypetide isolated from the Sargasso Sea
MNILIIGSGGREHALAWKCAQDNSVKHVFVCPGNAGTYLENKVSNVEIDSNDFDAIENFCVKENIELVIIGPEQPLVMGLTDFLQSKNIKTFGPSKEAAQLEGSKTFSKDFFVKYNIPTAGYKSFNNYEESINHLDLISYPTVVKADGLAAGKGVIICENKDEAIDALNSIFKDKAFGSAGNKVVIEDFLDGEEASFIAVVSKDKIIPLVTSQDHKAVGDGDVGLNTGGMGAYSPAPIVTDAIHKKILDEVMYPTMQGLIDEGTPYLGFLYAGLMIKDDDLKVLEFNCRFGDPETQPILLRLNSSLVDLCLSAINDELDTYSIKWSDKHSCGVVIASEGYPEGYESNKEVSFKSSEEENTKLFHAGTIFDNDKVLTSGGRVFCATALGNNLKEAQQNAYNLVSKVNFEGAFFRKDIGNKGIK

SEQ ID NO: 195661 - protein, 281 aa, Unknown
  Bacterial polypetide isolated from the Sargasso Sea
VKADGLAAGKGVIICDDREAAEKALEDIFESNAFGDAGNRVVIEDFLNGEEASFIAVVSDDQIIPLATSQDHKAVGDGDVGLNTGGMGAYSPAPIVTDEIHKRVIDEVMLPTMNGLKAEGFPYLGFLYAGLMIEGDEIKVLEFNCRFGDPETQPIMLRLESSLTNLCLDAINKKLNAHQVEWSSMHSCGVVLASSGYPEDYETDMEIDIKNHFSENEKLFHAGTKFVDNKILTSGGRVFCMTALGETLEIAIDNAYNAIPKINFEGMFFRSDIGKKGLKND

SEQ ID NO: 195662 - protein, 415 aa, Unknown
  Bacterial polypetide isolated from the Sargasso Sea
SGGREHALAGKCAQDDIVKHVFVCPGNAGTHLEDKVSNIELNLNEFSSIEKFCLEEKVELVIIGPEQPLVDGLTDFLQSKNIKTFGPSKNAAQLEGSKTFSKDFFVKYNIPTAKYKSFDNFESSLEYLNEISFPTVVKADGLAAGKGVIICQNSEEAIKALDSIFNDKAFGTAGNRVVIEEFLEGEEASFIAVVSKDKIIPLATSQDHKAVGDGDVGLNTGGMGAYSPAPIVTEEIHKKILNEVMYPTMNGLINEGSPYLGFLYAGLMIKDNEIKVLEFNCRFGDPETQPILLRLNSSLVELCKAAIDDELDTYSIQWTEKHSCGVVIASEGYPEDYESNKKISLKENNIKDSKLFHAGTKYENETILTSGGRVFCATALGNDLKDAQKNAYNLVNNVEFDGAFFRKDIGFKGIK

SEQ ID NO: 195663 - protein, 241 aa, Unknown
  Bacterial polypetide isolated from the Sargasso Sea
MKILVIGSGAREHALCYLISKSSLVSSIYAIPGNYGISQLAECEQIDQTDFEKIYDFCKIKMIELVIVGPEVPLVAGIVDFFKETEIKIFGPDKYASQLEGSKGFMKDLCKQNRIPTADYARFDNKEEAINYLNAQPLPIVIKADGLAAGKGVTVADTKKMAEQAINDIFDEKFGANMDVVIEEFMSGEEASYFVCCDGEDFVSLESAQDHKRIGENDTGPNTGGMGAYSPAPIFTPKIKE

SEQ ID NO: 195664 - protein, 288 aa, Unknown
  Bacterial polypetide isolated from the Sargasso Sea
APIVVKADGLAAGKGVILADTVAEACAAVEDMLAGNAFGEAGSRVVVEEFLVGEEASFIVMVDGKNILPLASSQDHKARDDGDTGPNTGGMGAYSPAPVVDAQLHDRIMAEVIRPTVDGMQADGYEYTGFLYAGIMVTADGTPKVLEFNCRFGDPETQPIMLRLKSSIVDLCLSAERKELDQIEAEWDPRAAVGVVLAAGGYPDSYAKGDVISLPVSTASGSKIFHAGTATKDGQVVTNGGRVLCATALGNSVTEAQQAAYALVDQISWQDMYCRRDIGHRAIGREQS

SEQ ID NO: 195665 - protein, 389 aa, Unknown
  Bacterial polypetide isolated from the Sargasso Sea
NAGIEEEAQCIPIQVEDLESLVKFCSKESIDFVVVGPEAPLVGGLIDKLTIAGIKAFGPSADAAKLEGSKSFTKEFCLRHKIPTAAFKRFSSANAAIRYVEEIGAPIVIKADGLAAGKGVTVAQTLGQAKDAIEEALNDNKFGEAGKEIVVEECLIGEEASFHVLVDGENVIPLASAQDHKPVGEGDTGPNTGGMGTYSPAPILNEDLTQEIMQNFIIPTVEGMKKEGHTYKGVLYAGLMITDNGPKLIEYNARFGDPETQVLLMRLKSDLLPALIACADGTLDKINLNWDKSAAVCVVMAAKGYPGDYNKGTSIKGLHRVNQIKNTHVFHAGTLLNQHGELIANGGRVLGITSMGENIADAQTKAYEAVDLIDWTDGFCRRDIAWRAI

SEQ ID NO: 195666 - protein, 425 aa, Unknown
  Bacterial polypetide isolated from the Sargasso Sea
MNVLVIGNGGREHALCYGIKQSPDCSNLYCIPGSDSISEIASSIVTDVNDHDAILQFCLESKIDLVVIGPELPLTKGLSNLLMNNSILVFGPDQMGAELEKSKKFTKDICKKLNIATAAYDVFDNYDDAFIFCQNQSYPLVIKADGLAAGKGVIICQTLEDAKDALIKCFKDNSFGDAGSVVVIEEFLVGEEVSLFSLVDKNGFVLPLTTAQDHKKILEGEKGLNTGGMGAYTPVPSISSNKMNELSKTFVEPIVQHLAEQGINYQGMFYAGLILTDKGPNLLEINVRFGDPETQAIIPLLETDLLELLHASAIGTLNEMEQIKWKNDYAMTVVMAAEGYPEDYKKFTSINNLENLTLTKDEYLFHAGTTLKENQWLSNGGRVLNISSTGKDLKIIRENIYNIINQINWDEGYYRKDIGWRYIDE

SEQ ID NO: 195667 - protein, 435 aa, Unknown
  Bacterial polypetide isolated from the Sargasso Sea
MKNVLVVGSGAREVAIARCVSQSSIKNSLFCVSKDINPQILDLCKDYFVTDLTNISDIVSYSRKTKVDLAIIGPENPLANGIVNELENVGVECIGPRKEVALIETSKSFARKIIDLCCPEKNPQRKEFSSVDGVRSFIEQLGGEYVIKFDGLMGGKGVRVSGEHLKNIDEGIAYANEIINIGGTFLIEEKLVGEEFSLMSFVDGKVCKHMPIVQDHKRAYEGDTGPNTGGMGTYSFANHSLPFLSEKDIKEAQKTNELVAKQLFEETGTPYVGILYGGFMLTKGGVKVIEYNARFGDPEAMNVLSILESDFLSICISMVDGNLKNQGVSFERLSTVCKYVVPVGYPDKPAKNFEVFCDQNNPSLFLASVMLKDQRLIACGSRTAAVVGKNKNVFQAELFAEAGIANISGNLFHRKDIGTKKLVESRIKRMKELLQ

SEQ ID NO: 195668 - protein, 422 aa, Unknown
  Bacterial polypetide isolated from the Sargasso Sea
MNILIIGSGGREHALAWKCAQDNSVKHVFVCPGNAGTYLEKKVSNVEIDSNDFDAIENFCVKENIELVIIGPEQPLVMGLTDFLQSKDIKTFGPSKEAAQLEGSKTFSKDFFVKYNIPTAGYKSFNNYEESINHLDLISYPTVVKADGLAAGKGVIICENKNEAVDALNSIFKDNAFGSAGNKVVIEDFLDGEEASFIAVVSKDKIIPLVTSQDHKAVGDGDVGLNTGGMGAYSPAPIVTDAIHKKILDEVMYPTMQGLIDEGTPYLGFLYAGLMIKDNEIKVLEFNCRFGDPETQPILLRLNSSLVDLCLSAINDELDKYSIEWNDKHSCGVVIASEGYPESYESNKEVSFASSEEENTKLFHAGTIFDNDKVLTSGGRVFCATALGNNLKEAQQNAYNLVSKVNFEGAFFRKDIGNKGIK

SEQ ID NO: 195669 - protein, 371 aa, Unknown
  Bacterial polypetide isolated from the Sargasso Sea
MIIGVIGSGGREHAICEKILKSKKVEKVYCFPGNAGTSLIATNVEIKINEFDKIKEFVIKNKVDFLVVGPEKPLVEGIVDYFQKHSIKIFGPDKIASQLEGSKIFTKKICEKYNIPTAKFGIFSKLEDANSFLKNSKLPIVIKADGLAAGKGVYICEDIKSAIDAVEEIFNGKFGIAKNVLIEEFLKGEEMSYFVISDGKIFKKFQTAQDHKRVLEGDKGKNTGGMGAYSPSKLINNSLDKKIVEKIIKPTLKGLNEMGSKFKGFLYAGLMIVKNEPYLIEYNVRMGDPECQTILPRLKSDIVDILYSCCEEKLGSTNIEWDEKKTICVVLCSKGYPDKFKNNLLIENFEKINLQKNEFIFHAGTIIKNNK

SEQ ID NO: 195670 - protein, 424 aa, Unknown
  Bacterial polypetide isolated from the Sargasso Sea
MAGIEVLVVGSGGREHALALGLSKSDSVSKVHCTPGNAGTSMVAVNHQVPDTDIEGIVDLATQLSVSLVVVGPEAPLVHGLSDRLRANSIPSFGPHSEGALLEGSKIHAKMLMQSLGVPTGSFHRVENQDEIEGSLDSFEPPWVIKRDVLAGGKGVTVTTSREDAREALKYGIEEDGFVLIEEHLSGEEASILVIMDESGYVMLPPSQDHKRVGNNDTGPNTGGMGAYAPAPIVTPSVLARAREEIIEPMHHYLRNSSTPYRGCLYVGLMIDSQGSPSVVEFNVRLGDPEAQVTIPLVQSDLGELLLAAAEGRVSETQVEFKKLHASTVVLASEGYPGEVVTGREIFGWNTEIDEGLVRGFVHLAGASMDEGDKLTSNGGRVLSATGLAPSLSESLEASYQIIGGITLDGSHYREDIGFRALSG

SEQ ID NO: 195671 - protein, 435 aa, Unknown
  Bacterial polypetide isolated from the Sargasso Sea
MKNVLVLGSGAREVAIVRSISQSLIENSIFCISKDINPQISRLCKDYFVSDVEAVSSIVAYSKEKEIDLAIIGPENPLASGVVNELELVGVRCVGPKKEVAMIEASKSFARTIIDLCCPEKNPKRREFSSAEGVEEFIKQLGGEYVIKFDGLMGGKGVRVSGEHLKDIKEALDYVGEIVKVGGKFLIEEKLVGEEFSLMSFVDGKVCKHMPVVQDHKRAYEGDSGPNTGGMGTYSFENHSLPFLSKKNISDAQKTNELVAKQLFKETGTPYVGVLYGGFMLTKSGVKVIEYNARFGDPEAMNVLSILKSDFLSVCMSIVGGSLEKQEVCFERLATVCKYVVPVGYPNKPSRGFEVVCNQNDSSLFLASVMLKNKKIIACGSRTAAVVGKSSDIKQAESFAEDKISKISGNLFHRKDIGTKKLIDSRTKRMKGLLG

SEQ ID NO: 195672 - protein, 435 aa, Unknown
  Bacterial polypetide isolated from the Sargasso Sea
MKNVLVVGSGAREVAIARCISQSSIKNSLFCVSKDINPQIFDLCKDYFVTDLANISDIVSYSRKNKVDFAIIGPENPLANGIVNELENVGVGCVGPKKEVALIETSKSFARKIIDLCCPEKNPQRKVFSSTEGVESFIKQLGGEYVIKFDGLMGGKGVRVSGEHLKNIDEGVAYANEIVSIGGKFLIEEKLVGEEFSLMSFVDGKVCKHMPIVQDHKRAYEGDTGPNTGGMGTYSFGNHSLPFLSEKDIKDAQKTNELVAKQLFEATGTPYVGILYGGFMLTGGGVKVIEYNARFGDPEAMNVLSILKSDLLSVCISMVDGSLKNQDVSFERLATVCKYVVPVGYPDKPTKNFEVFCDQNDPSLFLASVMLKDQKLIACGSRTAAVVGKNKDVFQAELFAETGIANISGNLFHRKDIGTKKLIESRIKRMKELLQ

SEQ ID NO: 195673 - protein, 432 aa, Unknown
  Bacterial polypetide isolated from the Sargasso Sea
MKVLVIGGGGREHALAWKAAQSPQVELVYVAPGNAGTALEPKLENLNISATDIPALLDFAKTNQIELTIVGPEAPLVLGVVDAFNAAGLPIFGPTKAAAQLEGSKAFTKDFLARHNIPTAGYKNCTEIQDAKAFVRELTGKTGYPVVIKADGLAAGKGVIIAQDQAEADAAIDDMLAGNKFGDAGSRVVIEEFLKGEEASFIVMVDGKNILAMATSQDHKARDNADHGPNTGGMGAYSPAPVVTQSVHDWTIANVIRPTVDGMAVEGNVYTGFLYAGLMIAPDGSAKVLEYNCRFGDPETQPIMMRLKSDLVELCLAATRGELDKVTAEYDERAAVGVVLAAGGYPDDYRKGDVIDGLSLGNHDAKVFHAGTEMKGGHVVTNGGRVLCATALGNTVTEAQKAAYQLVDEIHWDDVYFRTDIGYRAIAREQQS

SEQ ID NO: 195674 - protein, 292 aa, Unknown
  Bacterial polypetide isolated from the Sargasso Sea
MNVLIVGSGGREHAFTWKASQSDLVEKIFVAPGNAGTSLEPKAENINISASDIDALISFSKKENIDLVIVGPEDPLVNGITDEFKKVGINCFGPESPGAQLEGSKDFAKAFMERHHIPTASYESFTDANEAKKYIQQNKLPQVIKADGLAAGKGVVIAEDYETAYKTIDEFISETKYGDASRKIIIEDFLEGQELSYIVMVNGTEYLPLATSQDHKTIGEGDIGLNTGGMGAYSPVPFVNDELDIRIKKEVIDRTVRGLADDGISFRGFLYAGLMIDSNLNQRYLSINCRFG

SEQ ID NO: 195675 - protein, 425 aa, Unknown
  Bacterial polypetide isolated from the Sargasso Sea
MNVLVIGNGGREHALCYGIKQSPNCSNLYCIPGSDSISEIASSIITDVNDHDAILQFCIESKIDLVVIGPELPLTKGLSNLLMNNAILVFGPDQMGAELEKSKKFTKDICKKLNIATAAYDVFDNYDDALNFCQNQSYPLVIKADGLAAGKGVIICQKKDDAKDALIKCFKDNSFGDAGSVVVIEEFLVGEEVSLFSLVDKNGFVLPLTTAQDHKKILEGEKGLNTGGMGAYTPVPSISSNKMNELSKTFVEPIVQHLAQQGIKYQGMFYAGLILTDKGPNLLEINVRFGDPETQAIIPLLETDLLELLYASAIGTLNEIKKIKWKNDYAMTVVMAAHGYPENYKKLTPINNLENLTLTTDDYLFHAGTMLKENKWLSNGGRVLNISNTGKDLKTIRENIHNIINQINWDEGYYRKDIGWRYINE

SEQ ID NO: 195676 - protein, 206 aa, Unknown
  Bacterial polypetide isolated from the Sargasso Sea
MNIALIGSGGREHSLCKKLRESAKVNKIFCIPGNAGTSKIATNLNTDYNNFPKLLKNLKENKIKLVVVGPEEPLVNGLVNFLNKNKIRAFGPNKFAAKLEGSKSFMKKICRDYGIPTAKFKTCKNLQELNKSIKNFSFPVVIKADGLAAGKGVTICKSKQQVFKVSNEIFSGKFKSSKKLVIEEFLDGEEASYFLVVDKKNFINFG

SEQ ID NO: 195677 - protein, 384 aa, Unknown
  Bacterial polypetide isolated from the Sargasso Sea
QDDFVKHIYVCPGNAGTYLEDKVSNIDIDTKKFNLIEEFCLKEQIDLVIIGPEQPLVDGLTDYLQNKGIKTFGPSKSAAQLEGSKTFSKDFFVKYDIPTAEYKSFEDFDSSVNYLDEISYPTVVKADGLAAGKGVIICENKESAIEALNSIFNDKAFGKAGNRVVIEEFLEGEEASFIAVVSKDKIIPLVTSQDHKAVGDGDVGLNTGGMGAYSPAPIVTEEMQKKILEKVMYPTMKGLINEGFPYLGFLYAGLMIKDGDLKVLEFNCRFGDPETQPILIRLKSSLVELCLAAIDDKLNSYSINWSKKHACGVVIASKGYPESYDVDKEVRIKLNEDNDLKLFHAGTKYVDDKIITSGGRVFCATALGNDLKEAQEKHIISSTV

SEQ ID NO: 195678 - protein, 421 aa, Unknown
  Bacterial polypetide isolated from the Sargasso Sea
MKIAIIGSGGREHALVHHLSNSKKITKIYSIPGNAGTEEISVNIDLNLENFQDLYKFIKKEQIELVIVGPEKPLVEGLVDFLESKNIKVFGPRKKVAQLEGSKIFTKQICEKFNIPTAKFKICKSKEDSFIFLSSSNFPLVVKADVLAAGKGVYICQNVNEAKTAVNEIFDGKFGKADQVLIEEFLEGDEMSFFIISDGISYKTFNTAQDHKRVGEGDTGKNTGGMGAYSPSSLINDDLENKILNKIIEPTLKAISEMKEKYVGFLYAGLMIKSNEPYLIEYNVRMGDPECQTILPLIDSDLLEIINSCCISKLKTHEIKWKNKKSMCIALCSKGYPEKYNKNVEIKNLKEFKSTKDNFIFHAGTKSSGNKIVAVGGRVINFVNISDSYLSSRKEIINQINKLNWEDGFYRSDIGHKVIDK

SEQ ID NO: 195679 - protein, 420 aa, Unknown
  Bacterial polypetide isolated from the Sargasso Sea
MNILILGSGGREHSLAWAIKQNPKCDNIFVAPGNAGIAQIAKCISVDILNATQIVNTVKEYNIDFVLIGPEAPLAEGVSDILKREGILTFGPSKASSQLETSKKFTKEICDACGAPTAEYRSFDSLEPALTYVEAKGAPLVVKADGLAAGKGVIVATDIEMAISAVHEIFSGSFGNAGASVVIEEFMEGEEASLFVLVDGETILPIGTAQDHKRVGDGDTGLNTGGMGAYSPAPILNEEILKKTVERIIRPTMREMVRRGMPFTGVLYAGLMIKESDPRLVEYNVRFGDPECQVLMMRLGGQILDALLSTAKGKLSDVKINWATDHSITVVMASNGYPGSYETGTEIVGLANLPSDSNFMCFHAGTEEKNGKVLANGGRVLNITTRAETLVKAQKNAYEMIETIDWPEGFYRKDIGWRAL

SEQ ID NO: 195680 - protein, 304 aa, Unknown
  Bacterial polypetide isolated from the Sargasso Sea
MIVGVIGSGGREHAICSKLYISKKISKIYCFPGNAGTSKIAQNIDIDLNDFSKLKKLISKYKIELLVVGPEEPLVNGITDFFEKEKIKVFGPNKQCSRLEGSKIFTKKICEKYNIPTAKFGTFSNLNDCIFFLNKNKFPIVVKADGLAAGKGVSICKNLVEAKKSVQEIFSGKFGKAKEVLIEEFLDGEEMSFFIISDGVTYKKFGTAQDHKRVFVGDKGPNTGGMGAYSPSRLTDKNLEQKIIEKIIEPTLLALNNMGSKYIGFLYAGLMVKNNEPYLIEYNVRMGDPECQTILPTLETDLLE

SEQ ID NO: 195681 - protein, 432 aa, Unknown; identical to SEQ ID NO: 195630
  Bacterial polypetide isolated from the Sargasso Sea

SEQ ID NO: 195682 - protein, 211 aa, Unknown
  Bacterial polypetide isolated from the Sargasso Sea
MKVLVVGAGGREHALSWKISQSTLVTSVFVAPGNGGTELEDHLTNVDIQVNDIEGLASFALEQGIDLTIVGPEDPLVNGITDRFNDLGLKCFGPSKGAAQLEGSKEFMKDFLQRHHIPTAEYSSFSDTERAIEYVEQKGCPIVIKADGLAAGKGVTIAHTVEEAKEAIYQSLESEVFGEAGKKIVIEEFLDGEEASFIVMTDGTNVIPFAS

SEQ ID NO: 195683 - protein, 435 aa, Unknown
  Bacterial polypetide isolated from the Sargasso Sea
MKKVLVLGSGAREVAITRSVSQSSIKNTIFCISKDINPQISNLCEDYHVCDVNDVASVVSYSKKKEVDLVIVGPENPLAGGVVNALEQAGISCVGPKKEVAMIETSKSFARMIVDFCCPEKNPQRKEFVSIEGVKSFMEALEGKYVIKFDGLMGGKGVRVSGEHLKNISEGLNYANEIIEDGGKFLIEEKLVGEEFSLMSFVDGKTCKHMPAIQDHKRAFEGDKGPNTGGMGTYSFENHSLPFLTEENILEAQKTNELVAKQLLKHTGLPYVGVLYGGFMLTKDGIKVIEYNARFGDPEAMNVLSILKSDFLSICISLVEGKLEKEEVLFDELATVCKYVVPLGYPNNPMKGFEVFCDQNDSSLFLASVMFKNKELIACGSRTAAVVGKNRDIQKAEAFAEQGVSNISGKLFHRKDIGTKDLIDLRVKRMKELLS

SEQ ID NO: 195684 - protein, 425 aa, Unknown
  Bacterial polypetide isolated from the Sargasso Sea
MNVLVIGNGGREHALCYGIKQSPNCSNLYCIPGSDSISEIASSIITDVDDHDAILQSCLENKIDLVVIGPELPLTNGLSNLLMNNAILVFGPDQMGAELEKSKKFTKDICKKLHIATAAYEVFDNYNDAFIFCQNQSYPLVIKADGLAAGKGVIICQTMEDAKDALIKCFKDNSFGDAGSVVVIEEFLVGEEVSLFSLVDKNGFVLPLTTAQDHKKILEGEKGLNTGGMGAYTPVPSISSNKMNELSKTFVEPIVQHLAEQGIKYQGMFYAGLILTDKGPNLLEINVRFGDPETQAIIPLLETDLLELLHASAIGTLNEIKKIKWKNDYAMTVVMAAHGYPEDYKKLTPINNLENLNLTTDDYLFHAGTMLKEKKWLSNGGRVLNISSTGKDLKTIRETIHNIINQINWDEGYYRKDIGWRYIDE

SEQ ID NO: 195685 - protein, 435 aa, Unknown
  Bacterial polypetide isolated from the Sargasso Sea
MNILLIGSGAREHAVARAIDNSEHNTNLYCIASNMNPGIAELCSEIIIDNINDPKLIVEYAKHSKASLAIIGPENPLSVGVSDALWDAKIKVVGPKRSLAQIETSKAFTRELLSEYRIPGGPKYQTFDSMNGVTEFLNELGEAYVVKYDGLAGGKGVKVAGDHLQSHQEAIDYCQDIINKNGQFVIEEQFFGEEFSLMSFCDGETLKHMPAIQDHKRAYENDTGPNTGGMGTYSDANHSLPFLDSSDIEEAHNINTQTARALKDKFDEGYKGILYGGFMATKDGVRLIEYNARFGDPEAMNALSLLETDLIELCSAMADGTLNNIDIRFANKATVCKYAVPEGYPDKPVKGENIDTSKISDPDKLFYASVDIKDGALIESGSRTVAVVGVADSISEAEKIAENEIASVSGPLFHRKDIGTDAIIQRRVEHMRALR

SEQ ID NO: 195686 - protein, 407 aa, Unknown
  Bacterial polypetide isolated from the Sargasso Sea
SYVFISKSNKVKRIYCLPGNAGTSSLAENISIDINNFETVYEFLKKNNIDFVVVGPEDPLVNGIVDYLEKLNIKVFGPNKVASQLEGSKIFTKNLCKKYNIPTAEFGIFKNAEESYDYIDSAKHPLVIKADNLAAGKGVYICREKKESYLAVKEIFDGKFGIAKNILFEEFLEGEEMSYFIVSDGKTFKYFGSAQDHKRVGEGDKGKNTGGMGAYSPSRLFNKELERKILEKIIKPTLKGINDLGTKYKGFLYAGLMIVKDEPFLIEYNVRMGDPECQTILPTLDTDIIKIFQSCINEKLDEIEIKWINKKSLCVVLCSNGYPDKYEKNLIIDNFEKLNLDENNYLFHAGTEMKNNKIYAVGGRVLNFISLSNTYSEAKKNIHENLKKLNWEKGFFRKDIGYKVINK

SEQ ID NO: 195687 - protein, 408 aa, Unknown
  Bacterial polypetide isolated from the Sargasso Sea
FSLECAQDESVSVVFVCPGNAGTALENKVSNVSINVNDFSEVKDFCIEKNIALVIVGPEQPLVNGLVDYLHSNDIKTFGPSSAAAKLEGSKTFSKDFFVKYGIPTATYAAFDNFDNAKEHLKHILYPTVVKADGLAAGKGVIICQTKSEALEALVIIFKEQAFGDAGTRVVIEDFLVGEEASFIAVVSKDKIIPLATSQDHKAVGNGDVGLNTGGMGAYSPAPIVDEALHQKIIDEVMKPTMQGLITEDSPYLGFLYAGLMINNGELKVLEFNCRFGDPETQPILLRLKSSLVELCIAAIDDKLNDYQIQWTDEHACGVVIASKGYPEAYTQSHEVTFESSDADGKKLFHAGTKLQGDKVLTSGGRVFCATALGKDLREAQSKAYNLVESVSFDGAFYRKDIGNKGLK

SEQ ID NO: 195688 - protein, 421 aa, Unknown
  Bacterial polypetide isolated from the Sargasso Sea
MNIVILGSGGREHALCKKIYLSKKVKKIYSIPGNAGTSDISENINLPLNDFSKIEKFIKDKNIDLIVVGPEQPLVDGIVDYFENKNINIFGPNKIASQLEGSKIFTKKLCEKYNIPSANFGIFDDVEKALNFLSKANFPLVVKADGLAAGKGVYICKDLEAAKLGISEIFNGKFGKANNVLVEEFLEGEEMSYFVISDGKTYKKFETAQDHKRVGEGDQGKNTGGMGAYSPSALINEELDKKIINKIIEPTLKGLKDIGTDFKGFLYAGLMIVKNEPYLIEYNVRMGDPECQTILPRLKNDMLDLLLSCCKKDLSKIELNWHEDKSLCVVLCSKGYPENYDNNIEITGLDKIKVSGKKNIYHAGTLKNNNITYSNGGRVLNFSVLSDDLKDARTKAIKMIQELDWNNGYYRKDIGFKAIKD

SEQ ID NO: 195689 - protein, 234 aa, Unknown
  Bacterial polypetide isolated from the Sargasso Sea
ASFIVMVDGTHALAFASSQDHKARDDGDKGPNTGGMGAYSPAPVVTPAVHDWVMQNVIYPTVNGMASEGHIYTGFLYAGLMVSPDGTCKVLEFNCRFGDPETQPIMMRLQSDLVELCQAAVEGKLAQQEIKFDSRAAVGVVLAAGGYPDDYRKGDVISGLPTEDSREAKVFHAGTVLKDGQVLTAGGRVLCATALGANVTAAQKAAYELTDKVQWDGVFSRRDIGYRAIKRENS

SEQ ID NO: 195690 - protein, 247 aa, Unknown
  Bacterial polypetide isolated from the Sargasso Sea
MNIGIIGSGGREHALCFKLKQSKIIDKIYCIPGNAGTNLIAENIDIKINDFEKIKKFSIKKKIELLVIGPEKPLVDGISDYFKNSNIKIFGPNKIASKLEGSKTFTKKLCKKYNIPTSKFHIFENKDSAKKFLANSIFPLVIKADGLAAGKGVYICNTNSEALTAVDEIFDGRFGKADCILIEEFLNGEEMSYFIITDGKTFQPFQTAQDHKRVGEGDVGKNTGGMGAYSPSQLINNELQSKIDEKI

SEQ ID NO: 195691 - protein, 270 aa, Unknown
  Bacterial polypetide isolated from the Sargasso Sea
MKVGIIGSGGREHALCYAFKKSKRVKKIYCIPGNAGTHEIAENVDLDLNNFELLKKFIKKNNIDIIMVGPEKPLVEGIVDFLEREKIKVFGPNELASKLEGSKIFTKNLCKQYNIPTAKFGVFENREKALNFLNQCKFPLVIKSDGLAAGKGVYICETIRNGEQAIKEIFNGKFGKADELLIEEFLKGEEMSFFVISDGINIKNFGTAQDHKRVGEGDVGLNTGGMGAYSPSRLESDELNKKILDKIIKPTLKALKDLDTSFRGFLYAGL

SEQ ID NO: 195692 - protein, 366 aa, Unknown
  Bacterial polypetide isolated from the Sargasso Sea
MKVGIIGSGGREHAICHSLKKSKKIREIYCFPGNAGTSKIAKNIDINVNDLNKLKEFITSEKIELVVVGPEKPLVEGIVDFFEKNNIKTFGPNKIASQLEGSKIFTKKICEKYNIPTAKFGIFNNSQDAILFTNKTKFPLVVKADGLASGKGVYICENKNEADNSIKEIFDGKFGEAKNILIEEFLKGEEMSYFVVSDGKTIKSFQTAQDHKRVLEGDKGKNTGGMGAYSPSRLINYDLEKKILNKIINPTIKGLSDIGCVYKGFLYAGLMIINNEPYLIEYNVRMGDPECQTILPKLKSDLFEIIYASCTENLLHTKIEWHDKKSLCIVVCSKGYPEKYKKNILLKNIDKITLDKNDYCYHAGTK

SEQ ID NO: 195693 - protein, 227 aa, Unknown
  Bacterial polypetide isolated from the Sargasso Sea
IAVVSDDQIIPLATSQDHKSVGDGDVGLNTGGMGAYSPAPIVTDEIHKRVIDEVMLPTMNGLKAEGFPYLGFLYAGLMIEGDEIKVLEFNCRFGDPETQPIMLRLESSLTNLCLDAINKKLDAHQIEWSSMHSCGVVLASSGYPEDYETDMEIDIKNHFSENEKLFHAGTKFVDNKILTSGGRVFCMTALGETLEIAIDNAYNAIPKINFEGMFFRSDIGKKGLKND

SEQ ID NO: 195694 - protein, 306 aa, Unknown
  Bacterial polypetide isolated from the Sargasso Sea
MNIAIIGSGGREHALCFKLSESKKVKKIFCFPGNAGTENIAKNININLSDFEELKKIIFKNKIEMVIVGPEKPLVEGVVDYLEKNNILVFGPNKIAAQLEGSKTFTKELCKKHNIPTAEFEIFYKSEDAKKFLKTSKYPVVIKADNLAAGKGVYICENELSGQNAIEEIFGGKFGKPEKLLIEEFLQGEEMSFFIISDGKSFKILETAQDHKRVGEGDIGKNTGGMGAYSPSLLINPDLQKKIINKIIQPTLKSLNKIGCSYKGFLYAGLMIIKNEPYLIEYNVRMGDPECQTIIPRLKTDLFEII

SEQ ID NO: 195695 - protein, 286 aa, Unknown
  Bacterial polypetide isolated from the Sargasso Sea
MKVLVIGGGGREHAMAWKLSQSPKVTKVYVAPGNGGTALNPKLENVAISDVRELRTWAQSEKIALTVVGPEAPLAAGVVDEFRAHGLRIFGPTKAAAQLESSKAFSKAFMRRHGIPTADYDTFTDPAAAHAFVDRLGAPIVIKADGLAAGKGVVVAMTLQEAHDAVDFMLVDNKYGVTHNEGGARVVIEEFLEGEEASFIVLCDGKNVLALATSQDHKRLKDGDEGPNTGGMGAYSPAPVVTADVHARAMREIILPTIRGMEKDGIPYTGFLYAGLMIDAKGQPKT

SEQ ID NO: 195696 - protein, 422 aa, Unknown
  Bacterial polypetide isolated from the Sargasso Sea
MKVMVVGSGAREHAIIWRLSKDINVDEIICLGQNAGVSEIAKTIQVDIEDIAQIREIIIENNPDLVVIGPEGPLSNGITDVLSDENIKVFGPTKSAAQIESSKIFSKKLMLDNNIPTAYAEFFNNAEKAISYGKNKGFNNLVIKADGLAAGKGVFLPSSNEEMEEIIKMLLVEKKLGASGEMILLEDRIYGPEVSVFSFTDGTNFSSPIAICDYKRVHDNDIGPNTGGMGCYTPPEFWDESLSNEIINKIISPTLNSMKKNQTPFQGILYAGIMITESGPQVIEFNCRFGDPECELIMPMFKGNLSEVFLDIANQKFDSKKVSWKNKKGVCVVLCSGGYPNSYKKGLEISGIDKIKYNLLFHAGTKKTENKIITDGGRVLVLSNLDENIMKSRSNIYKEIDKIKFEGSFYRKDIGLRAENNE

SEQ ID NO: 195697 - protein, 410 aa, Unknown
  Bacterial polypetide isolated from the Sargasso Sea
GGTELDSSLLNVNLNINDHDSLVNFAKQNNITMTIVGPENPLAAGIVNSFLNAGLKIFGPKKQYALLESSKVFSKEFMKNFNIPTSEYQMFSSNQEAKDFCSTKKHPIVIKADGLAAGKGVVVSASIDESYEAIDSLLKSEHSDYIVVEEFLNGQELSAIYIVNYQGISYEIGLPWTKDYKSRDEYNSGPNTGGMGAVSHPLSFENKNSLFKLHLDIEKILIKTLTSINNYNKDDGVGYLGFLYMGLMINNKDEINVLEYNCRLGDPETQNIMLTLHNKDVDLLDLILGRKNNKKDFNLDRIDNEDNGYCCTLVLAAKGYPESYKKGFYLDLSSIKETDQLVIFHSGTDIENGKIVSKGGRILSVNVYANDRQKAIDMAYEKIKEIKVFEDKDFKHQNQDLVFFREDIGN

SEQ ID NO: 195698 - protein, 366 aa, Unknown
  Bacterial polypetide isolated from the Sargasso Sea
SLTIVGPEAPLVGGIVDYFHDQGLPCFGPTSKAAKLEGSKAFTKDFCSKYGIPTASYETFTNVEAAAEYIKKQRMPIVIKADGLAAGKGVVIAATVSEALETIHDMLSGNAFGDAGQEVVIEEFLTGEEASFISIVDGETVVPMATSQDHKAQKDGDLGPNTGGMGAYSPAPVVTGSIHEKIMNEVMLPTVSGMAAEGRRYVGFLYAGLMISPQGDVNVIEFNCRFGDPEAQPIMLRLKSDLPALCLKALSQELRSESADWDVRPAVGVVMASAGYPGSYPKGERIRGLEHKLRENEKIFHAGTVERKGEIMTNGGRVLCATSLGDTVTEAQKNAYELAKYVSWESLFFRTDIAYRAIERENTSNE

SEQ ID NO: 195699 - protein, 199 aa, Unknown
  Bacterial polypetide isolated from the Sargasso Sea
MIVGIIGSGGREHAICNALNKSKKIDKIYCFPGNAGTDAIADNINLDINKFEELKNFILAKKIKLVVIGPEKPLVDGLTDYLESFNIKVFGPSKVASQLEGSKIFTKNICKKYNIPTANFGVFNDINQAKNFLDKSNFPIVIKADNLAAGKGVYICENKEESYQAVKEIFDGKFGVAENVLIEEFLEGEEMSFFILSDG

SEQ ID NO: 195700 - protein, 154 aa, Unknown
  Bacterial polypetide isolated from the Sargasso Sea
FLYAGLMIKDNEIKVLEFNCRFGDPETQPILLRLNSSLVELCKAAIDDELDTYSIQWTKKHSCGVVIASKGYPEDYESNKKISLKENNIKDSMLFHAGTKYENETVLTSGGRVFCATALGSDLKDAQKNAYNLVNNVEFDGAFFRKDIGFKGIK

SEQ ID NO: 195701 - protein, 437 aa, Unknown
  Bacterial polypetide isolated from the Sargasso Sea
MKHKILVVGSGAREHAIIRALNRSVHKKEIYCIASNMNPGIVNSCENFTMGDINDPTFVTNYARHVSATIAIIGPENPLAAGVADVLWSIGIKTVGPTRDLAQIESSKAFTRNLLKEYHIPGGPEYKTFSSMRGVEAFLNTLEDNYVVKYDGLMGGKGVKVAGEHLHSHTEALAYCKELLDSDAQFVIEEKFIGEEFSLMSFCDGDNLKHMPAVQDHKRAYEGDTGPNTGGMGTYSDSNHSLPFLTKQDIDDAKTINQATAKAIKNKFDLSYRGILYGGFMATANGVKLIEYNARFGDPEAMNVLSILESDFVDICYAIVNGNLDDVPVKFSTKATVCKYAVPNGYPDNPVKGQEIDVSKISNHNGLYYASVNIQKEKLVESGSRTIAYVGIADSIFDAETIAENEIISIEGPLFHRKDIGKKEIIQKRIDHMKSLR

SEQ ID NO: 195702 - protein, 366 aa, Unknown
  Bacterial polypetide isolated from the Sargasso Sea
MEYRILIVGSGAREHAIARSINKTQIDHQLFCIASNKNPGIMNICDELILGDIENVDFIVKNAIQKKCNLTIIGPENPLSKGVVDRLKENNIPSIGPTKDLAQIETSKSFARDLMKEYNIDGLPIYQSFTTMNGVKECLASHGENYVLKYDGLAGGKGVKVSGEHIFNHEEALDYCQGIISSNGKFVIEEKFIGEEFSLMSFSDGKTLKHMPVIQDHKRAYEGDEGPNTGGMGTYSDKDHSLPFLNKEDVNKAKETNEKIIRALYKKFGERYIGVLYGGFMVTEDGVKVIEYNARFGDPEAMNALTLLETDLLTIFKSMVSGDLDSADVKFRNQATVCKYAVPIGYPNDPVKGSSIDVSMIADDEV

SEQ ID NO: 195703 - protein, 184 aa, Unknown
  Bacterial polypetide isolated from the Sargasso Sea
MNILVIGQGGREHAIAWKLQQSEKVTQVFVAPGNGGTELEASCINIDISSNDFPMIKSFVEENNIELVVVGPEDPLVNGIKDYLSDSNVLVFGPDAKGAQLEGSKIFSKEFLFENNIPTGKAAFFSSSNKAIDHLEKSNFPIVLKADGLAAGKGVLVANKLEEAKKWVKEVMEDSKFGVAGKNI

SEQ ID NO: 195704 - protein, 218 aa, Unknown
  Bacterial polypetide isolated from the Sargasso Sea
QDHKARDDGDKGPNTGGMGAYSPAPIVDDSIHSRIMEEVIQPTLKGLNDLGYQYCGFLYAGMMINKQKELKVLEFNCRFGDPETQPIMMRLKSDLADLCYKACEKKLAGESLEWDQRKSLGVVMAAKGYPHKYEKNNEIRNIPEESEEFKVFHAGTKLKDGSLKTNGGRVLCVTALGDSVQSAQAKVYSEIENILWDDGFFRRDIGYRAIDREQNESS

SEQ ID NO: 195705 - protein, 316 aa, Unknown
  Bacterial polypetide isolated from the Sargasso Sea
KRNNIPTASFESFTNYENARSYLENSPIPIVIKADGLASGKGVKVCFSKDEAFSFLKEVMQDKVFSTSGDKVVIESFLKGEEASFFVFSDGKNILTLDSSQDHKRLLDGDKGPNTGGMGAYSPAPIIDEITRQNILNEIVYPVFEGFKKEDFEYTGILYIGLMIDDKKPSVVEFNCRFGDPETQPLLFRINSDIFDLFYFTALKKISDYKLEWKSKTAVSVVLASKGYPASPITGDEIKNLKEIDLSSDEFIFHAGTKLDGNKIIISGGRVLNVTALGDTLEEAIDKSYECINKIETKNLQYRNDIGVKGLLKKAK

SEQ ID NO: 195706 - protein, 377 aa, Unknown
  Bacterial polypetide isolated from the Sargasso Sea
GCTNIDISSNDFPMIKSFVEENNIELVVVGPEDPLVNGIKDYLSDSDVLVFGPDAKGAQLEGSKIFSKEFLFENSIPTGEAAFFSSSNKAIDHLEKSNFPIVLKADGLAAGKGVLVTSKLEEAKEWVKEVMEDSKFGVAGKNILIEECLFGTELSFMGILTPDSFIPFETSIDYKPLLEGNKGPNTGGMGCMSPSPFMNEDLKNNIVETVVKPTISGLKNKGINYYGFMYFGLMVKNNISKVLEFNCRLGDPETQCLMMQMESDLLDAILQALNGEEPKITWKAGATMGVVIASGGYPNSYKNEVPINIGNIKNAKLFHAGTKSINDKLVTNGGRVFSLNYSSDSIDDCKRYIYDNIEKINFDSMTFRTDIGEIYES

SEQ ID NO: 195707 - protein, 374 aa, Unknown
  Bacterial polypetide isolated from the Sargasso Sea
DFLNFLELLLKNIKKNKINMVIVGPEQPLVDGIVDFLKKNKINVFGPNKYAAQLEGSKAFMKSICKKNNIPTANFKICKKKSDVINFLKKNNMPIVVKADGLAAGKGVAICNSKKEVINLSAEIFAGKFKSSKKLVLEEFLEGEEASYFLIVDKKSFSFIGSAQDHKRVGENETGPNTGGMGAYSPAPIINNELEKKIISKIIKPTLSALKKSRKPYTGFLYAGLMIKNGEPYLIEYNVRMGDPECQVIMPRLKTDIVKLFILATKNKLNKIKIKWKNRKCMTIVLCTKGYPGKYKKNLLIKNLNKISTQKNSQIFHAGTQMINKKYFSIGGRVLNITSSGHSFLKIRKNIFKLIKKINWKYGFFRKDIGWRVI

SEQ ID NO: 195708 - protein, 241 aa, Unknown
  Bacterial polypetide isolated from the Sargasso Sea
IVEEFLSGKEASYFVITDGKNYFPIGTAQDHKRIGEKDTGPNTGGMGAYSPSKLITRDVENKIKKKIIEPTLRGLSKKGCPYKGILYAGLMIENSNPKLIEYNIRFGDPECQIIMMRLKNDLLDLIEASIYKKLKRKKITWTNEKAITIVAASKGYPGNYKKFKEIKNIKKIKLNKKKQLFHASTIKKNNKYFSSGGRVLNSTVLNKNLKVARSQALKILDNLDWENKYYRRDIGYQVIDK

SEQ ID NO: 195709 - protein, 398 aa, Unknown
  Bacterial polypetide isolated from the Sargasso Sea
KVKKIYCIPGNAGTSSLAENISIDINNFEKVYEFLKKNNIDFVVVGPEDPLVNGIVDYLEKFNIKVFGPNKVASQLEGSKIFTKKLCKKYNIPTAQFGVFKNDKESYNYIDNAKHPLVIKADNLAAGKGVYICREKKESYLAVKEIFEGKFGTAKNILFEEFLEGEEMSYFIVSDGKTFKYFGSAQDHKRVGEGDKGKNTGGMGAYSPSRLFNKELEQKILEKIIKPTLKGISDLGTKYKGFLYAGLMIVKDEPFLIEYNVRMGDPECQTILPTLDTDIIKIFQSCINEKLDEIEIKWINKKSLCVVLCSNGYPEKYEKNIIISNFEKLNLNENNYLFHAGTQKQDDKIYAVGGRVLNFISLSNTYSEAKKNIHKNLEKLNWQKGFFRRDIGYKVIDK

SEQ ID NO: 195710 - protein, 212 aa, Unknown
  Bacterial polypetide isolated from the Sargasso Sea
MKVLIIGSGGREHALAWKCAQDDIVKHVFVCPGNAGTHLEDKVSNVELNLNEFSSIEKFCSEEKVELVIIGPEQPLVDGLTDFLQSKNIKTFGPSKNAAQLEGSKTFSKDFFVKYNIPTAKYKSFDNFESSLEYLNEISFPTVVKADGLAAGKGVIICQNSEEAIKALDSIFNDKAFGTAGNRVVIEEFLEGEEASFIAVVSKDKIIPLATS

SEQ ID NO: 195711 - protein, 385 aa, Unknown
  Bacterial polypetide isolated from the Sargasso Sea
NGGTELEASCINIDISSNDFPMIKSFVEENNIELVVVGPEDPLVNGIKDYLSDSNVLVFGPDAKGAQLEGSKIFSKEFLFENNIPTGKAAFFSSSNKAIDHLEKSNFPIVLKADGLAAGKGVLVANKLEEAKKWVKEVMEDSKFGVAGKNILIEECLFGTELSFMGILTPDSFIPFETSIDYKPLLEGNKGPNTGGMGCMSPSPFMNEDLKKNIIETVVKPTISGLKNKGINYYGFMYFGLMVKNNISKVLEFNCRLGDPETQCLMMQMESDLLDAILKALNGEKPKITWKTGATMGVVIASGGYPNSYKNEVPINIGNIKNAKLFHAGTRSINDKLVTNGGRVFSLNYSSDSMDDCKRYIYDNIGEIDFDGMTFRTDIGEIYES

SEQ ID NO: 195712 - protein, 179 aa, Unknown
  Bacterial polypetide isolated from the Sargasso Sea
HKKILNEVMYPTMNGLINEGSPYLGFLYAGLMIKDNEIKVLEFNCRFGDPETQPILLRLNSSLVELCKAAIDDELDTYSIQWTEKHSCGVVIASEGYPEDYESNKKVSIKENNIKDSKLFHAGTKYENEMVLTSGGRVFCATALGSDLKDAQKNAYNLVNNVEFDGAFFRKDIGFKGIK

SEQ ID NO: 195713 - protein, 144 aa, Unknown
  Bacterial polypetide isolated from the Sargasso Sea
LKIKKAGSTELDRKCYPVIGLINEWDKDGKIIKGTDKDLGGTMRLGLYEAKLRNNSAINRIYKSSSIKERHRHRYEVNNKLKNQFENKGLIFSGMSPDNKLPEIIELQNHPWFIGVQFHPEFKSRPLSPHPLFSSFIKASKNYK

SEQ ID NO: 195714 - protein, 143 aa, Unknown
  Bacterial polypetide isolated from the Sargasso Sea
MTTRYIFVTGGVVSSLGKGIAAASLAAILEARGLNVTIMKLDPYINVDPGTMSPTQHGEVFVTEDGAETDLDLGHYERFIRTKMNRRNNFTTGRIYEEVLRKERRGDYLGATIQVIPHITNAIKEKVIAGGEGHDVAIVKSAV

SEQ ID NO: 195715 - protein, 322 aa, Unknown
  Bacterial polypetide isolated from the Sargasso Sea
RIKEFIKKDITKEDFVICEIGGTVGDIESLPFLEAIRQFSNDNGRSKSLFIHLTFVPFLKSSDEIKTKPTQHSVKELRSIGIQPDIVICRSQQSIPIDQRRKISLFCNVDIDNVIETVDVKTIYEAPISFFNQKLDKQVLKFFKIKSRKRPNLLPWKKITNIVLKTKRTVNIAIIGKYVNLKDAYKSLDEALTHGGISNKVKVNLVRIESDKLGSKEIKSKLKNVSGILIPGGFGKRGTEGKIEAIKYAREKKIPFLGICFGMQMAMIEFARNILKIKKAGSSELDKNCFPVIGLIDEWNKDGKIIKGTDKNLGGTMRLGLY

SEQ ID NO: 195716 - protein, 216 aa, Unknown
  Bacterial polypetide isolated from the Sargasso Sea
MSKFVFVTGGVVSSIGKGIVAASLGRLLKSRGYTVSILKLDPYLNVDPGTMSPFQHGEVFVTEDGAETDLDLGHYERFTDTAMTRLNSVTTGSIYQAVINKERRGNYNGGTVQVIPHITGEIRERIHRVAANSNADIIITEIGGTVGDIESLPFLEAIREFKNDVNRNDVAYIHVTLLPYIKTSGEIKTKPTQHSVKELRSIGIQPDLLVCRSDKS

SEQ ID NO: 195717 - protein, 299 aa, Unknown
  Bacterial polypetide isolated from the Sargasso Sea
MSDYIFVTGGVVSALGKGVTSASLGAILESRGLKVGMMKLDPYLNVDPGTMSPYQHGEVFVTEDGTETDLDLGHYERYVSTITGKHSNYTAGKIYETVIAKERRGDYLGATVQVIPHVTDEIRKSIVKGSQGYDVTIVEIGGTVGDIESLPFIEAIRQMGIYKDGYEVAYVHLTLVPYIKASSEIKTKPTQHSVRELRAIGIQPDALVCRSELPLPKEHFDKIALFTNVEKKAVISAHDAEDIYQIPLILREQCLDDIIVEKLKLDVPKADLTPWENVFKESKNSDSKVTIAMVGKYVD

SEQ ID NO: 195718 - protein, 91 aa, Unknown
  Bacterial polypetide isolated from the Sargasso Sea
MHFVFITGGVASSLGKGIASASLATLLKSRKFKVRIRKLDPYLNVDPGTMSPYQHGEVYVTDDGAETDLDLGHYERFTNQSAKKSDSGLQV

SEQ ID NO: 195719 - protein, 284 aa, Unknown
  Bacterial polypetide isolated from the Sargasso Sea
FKYFKIKPKKKINLSPWKNVTKIVTDKNLKVINIAIVGKYVDLKDAYKSLDEALVHGGIKNNVKIKIIRIESDKLKISEIRKKLIDASGILIPGGFGKRGTEGKIACINYARKNNIPFLGICFGMQMAVIEFARNVLKIKKAGSSELDKKCFSVVGLIEEWSKNGKIVKGTSTKLGGTMRLGLYTAKLQHNSRIKDIYKSKIIHERHRHRYEVNIKMKKKFEKKGMLFSGLSPDNNLPEIIELKNHPWFIGVQFHPEFKSRPLNPHPLFSSFISAAKNNEKSNN

SEQ ID NO: 195720 - protein, 84 aa, Unknown
  Bacterial polypetide isolated from the Sargasso Sea
IYGRSLIKERHRHRYEVNINFKEKFEKKGLIFSGLSPDGKLPEIIELNNHPWFIGVQFHPEFKSRPLSPHPLFSSFIKAAKNHK

SEQ ID NO: 195721 - protein, 306 aa, Unknown
  Bacterial polypetide isolated from the Sargasso Sea
HGEVFVTNDGTETDLDLGHYERFVRFQASKKNNFTAGKVYETVIRNERKGEYLGGTVQVIPHITNEIKKRIKEGGQNKDVAIVEVGGTVGDIESQPFVEALRQMALELPGSSWAFVHLTLVPYINASGELKTKPTQHSVKELRSLGISPDVLICRSDQELPSDEKNKIALFCSVPNDSVISMHDVETVYSVPLLLHSQKVDKTILKKLKINTKQAQLNDWKRVVKAKLLPEKEVTVSFVGKYTELKDSYKSINEALEHAGIKNKTRVNINFVEAETLTPKNIHKTLKNSDAILVPGGFGERGIEGM

SEQ ID NO: 195722 - protein, 302 aa, Unknown
  Bacterial polypetide isolated from the Sargasso Sea
RPDAVIAALDVGSIYDVPLSYHEQGFDTEVCRHFGLLEKEVGPDLGVWQRISDIVAKPEGSVKIAIVGKYTSLLDSYKSLAEALTHGGIANKIKVELVWIDSEIFEREDTVQHLEGVNGILVPGGFGERGAEGKISAVKFARERNVPYFGICFGMQMAVIEAARNLGGLEGAGSSEFGECEQAVVGLLTEWVKGNEKEQRSDKDDLGGTMRLGAYECLLAKNSKVREVYGSEKISERHRHRYEVNIDYRSELEKVGLNFSGMSPDQRLPEIVEIPNHPWFVGVQFHPELKSKPFDPHPLFTS

SEQ ID NO: 195723 - protein, 196 aa, Unknown
  Bacterial polypetide isolated from the Sargasso Sea
MSDYIFVTGGVVSALGKGVTSASLGAILESRGLKVGMMKLDPYLNVDPGTMSPYQHGEVFVTEDGTETDLDLGHYERYVSTITGKHSNYTAGKIYETVIAKERRGDYLGATVQVIPHVTDEIRKSIVKGSQGYDVTIVEIGGTVGDIESLPFIEAIRQMGIYKDGYEVAYVHLTLVPYIKACSEIKTKPTQHSVRE

SEQ ID NO: 195724 - protein, 62 aa, Unknown
  Bacterial polypetide isolated from the Sargasso Sea
MARYVFVTGGVVSSLGKGLSSASLAALLQLRGFKVRIRKLDPYLNVDPGTMNPFQHGEVFVT

SEQ ID NO: 195725 - protein, 66 aa, Unknown
  Bacterial polypetide isolated from the Sargasso Sea
MARYIFVTGGVVSSLGKGLSSASLAYLLKSQGYKVRLRKMDPYLNVDPGTMSPFQHGEVFVTDDGA

SEQ ID NO: 195726 - protein, 270 aa, Unknown
  Bacterial polypetide isolated from the Sargasso Sea
MGIYKDGYEVAYVHLTLVPYIKASSEIKTKPTQHSVRELRAIGIQPDALVCRSELPLPKEHFDKIALFTNVEKKAVISAHDAEDIYQIPLILREQCLDDIIVEKLKLDVPKADLTPWENVFKESKNSDSKVKIAMVGKYVDFKDSYISLSEALRHAGFKNSKGVEIVYVESEDIQENGTDCLSGMDAILIPGGFGDRGIEGMIQSIEYARKNDIPFLGICLGMQAAVIEYARNVLNHKDANSTEFNSSTSAPVIAMITEWMNDDGSKENR

SEQ ID NO: 195727 - protein, 184 aa, Unknown
  Bacterial polypetide isolated from the Sargasso Sea
RGSEGKIAAIKYARLNNIPFFGICFGMQMAIIEAARNLLNIKNASTSEFGNNCTPVVGLLEEWQKGKRKMKGSEKNLGGTMRLGLYDAILKNNSLISKIYSDKKIKERHRHRYEVNIDYKEQFEKKGLIFSALSPDGSLPEIIELKNHPWFVGVQFHPEFKSRPFTPHPLFASFVKAANNRRSN

SEQ ID NO: 195728 - protein, 298 aa, Unknown
  Bacterial polypetide isolated from the Sargasso Sea
KKKGEYLGKTVQVIPHITDRIKEFIKHDTSKEDFVICEIGGIVGDIESLPFVEAIRQFSNDVGKKNTLFIHLTLVPYLKASDEIKTKPTQHSVKELRSIGIQPDIIICRSERSIPLEHRKKISLFCNVDIKNVIETVDVKTIYEAPISFAREKLDIQVLNYFKIKSKKSCNLTPWRKINKIILETDKEANIAIIGKYVELKDAYKSLDEALTHGGIANNIKVKLVRIDSEKLKASEIKAKLKNISGILIPGGFGKRGTSGKIEAIRYARVNKIPFLGICYGMQMAIIEFARNKLKIKN

SEQ ID NO: 195729 - protein, 328 aa, Unknown
  Bacterial polypetide isolated from the Sargasso Sea
QHGEVFVLDDGSETDLDLGHYERFIDVDMTKNNNATAGQIYGTVLDRERKGEYLGETVQVIPHITDEIKNRIKTLNVPRKKYDVVIVEVGGTVGDIESLPFMEAIRQLSLEVGYHNHMIVHVTLLPFVKASGELKSKPTQHSVMKLREIGLAPDMILCRSEHSIDQSVREKIALFCNVRADHVIEGRDVPSIYEVPLAMHEQNAGHLIKERLKIEKTPKLNDLERFIHSYKNPKHEITIAMCGKYTELIDSYKSVMEAFVHAGVENDSRVNIKWVQTEKIKNKKSADSAFSNVQGILLLPGFGSRGGEGKVLSSEYARENKIPFLGIC

SEQ ID NO: 195730 - protein, 322 aa, Unknown
  Bacterial polypetide isolated from the Sargasso Sea
KIYQNVIEKERKGEFLGKTVQVIPHITNEIKENIRNLDYKNNLDIIITEIGGTVGDIESLPFIEAVRQVIYEEGPENSMVIHLTLIPYLSATGELKTKPTQHSVKTLMELGLKADVLVCRSERDLSDEVKNKLALFCNVKLDCVIQSIDVETIYDVPIKMRDEGLDKVTLQKLKIKESEPDLDKWKNFLHKLKNPTHQINIGLVGKYVELNDSYKSILESLIHAGTENEVKVNVKSIHSEYLDKENINKKLVDLDGIIVAPGFGQRGLDGKILAVEYARVNKIPFLGICLGMQMAVIEYARNVKKIRYANSTEISEKCKDPV

SEQ ID NO: 195731 - protein, 298 aa, Unknown
  Bacterial polypetide isolated from the Sargasso Sea
ESLPFLEAIRQIRNNKNISSSMIHMTYVPYISSADEIKTKPTQHSVKELLNAGIQPDIIMCRCEKEISIEAKNKISLFCNVIKKNVISALNAESIYEVPSLYYKAGLDKALLEQLGYDYKKFPLNLSPWNKVVKKINNYKKEVTIGVVGKYTDLKDSYKSLNEALVHGGINNNIKVHIKWINAEKLKQKDIIKELKKIDGILVPGGFGDRGVEGKISSIKFARERNIPFFGICLGMQLAVIEIARNVLKIRDANSTEFKKTKNPVVGLMTEWNQNNIKIKRTKDSNKGGTMRLGSYPC

SEQ ID NO: 195732 - protein, 91 aa, Unknown
  Bacterial polypetide isolated from the Sargasso Sea
MRKKVTKYIFVTGGVMSSLGKGLASACIGALLEARGMRVSLQKLDPYLNIDPGTMNPYQHGEVFVTNDGAETDLDLGHYERFTNAPLSQEN

SEQ ID NO: 195733 - protein, 354 aa, Unknown
  Bacterial polypetide isolated from the Sargasso Sea
TDLDLGHYERFTGVNLRKDSNVTTGSIYRKVIESERKGDYLGATVQVIPHITDEIKRRIKGISNDVDVQITEIGGTVGDIEILPFLEAARQIRKELGTENVMFIHVTLVPFIGPSTELKTKPTQHSVSLLRAAGISPDLIVLRSDRELNDEIKSKVSLFCDVAVNNVINAPDLDDIYAVPLRMRDEGLDKAVDERLNLQTNEPSLDEWKTMVNLKLEANDSVKIAILGKYFGLPDSYLSVVESLNHACLHNKVKLDLHWIDADNFEVENLQDMDGVIVPGGFGYRGIEGKISAIEYIRKNDIPFLGICLGLQCAVIEFARNVCGIDDANSSEFSKNTKNYVIDLLPNQDLEKDD

SEQ ID NO: 195734 - protein, 36 aa, Unknown
  Bacterial polypetide isolated from the Sargasso Sea
MTKYIFVTGGVVSSLGKGIVSASIGRILKNKGINVP

SEQ ID NO: 195735 - protein, 178 aa, Unknown
  Bacterial polypetide isolated from the Sargasso Sea
MIQAARFCRENQLPYLGLCLGMQIMVIEFSKNVLNLSDANSTEFDPETSNPVIDIIESQKGLEETGGTMRLGGYRCNLSSGTLAKKIYQKDIITERHRHRYEFNDYYKEELNSKGFITSGVCPDNNLVEISEISDHPFMIGSQFHPEFGSRLDRPHPLFDHFIKASANQKKTGAQFQL

SEQ ID NO: 195736 - protein, 356 aa, Unknown
  Bacterial polypetide isolated from the Sargasso Sea
DEIKTKPTQHSVKELRSMEFQPDIVICRSQQSIPLDQRKKISLFCNIPIKRVIETVDVKTIYEAPISFFNEGLDKQVFEYFNIKPRKKINLKPWKEVTKIVTNKNIRTVNIAIVGKYVDLKDAYKSLDEALVHGGIHNNVKVNLIRIESDLLKVSDVQKKLSNVSGIIIPGGFGKRGTEGKIACINYARTKKIPFLGICFGMQMAVIEFARNVLKIKNAGSSEFDKNCYPVIGLIEEWNKNGRKIKGTLKNLGGTMRLGLYPAKLQHNSLIKEIYKSGQIKERHRHRYEVNINLRKKFETHGLNFSGMSPDNSLPEIVEIKNHPWFIGVQFHPEFKSRPLQPHPLFSSFIGAAKNK

SEQ ID NO: 195737 - protein, 317 aa, Unknown
  Bacterial polypetide isolated from the Sargasso Sea
ITRKGLSSASLAYLLQSRGFKVRLRKLDPYLNVDPGTMSPFQHGEVFVTDDGAETDLDLGHYERFSGVTAKKTDNITTGKIYNDVLRKERKGKYLGKTVQVIPHITDRIKEFIKHDTSKEDFVICEIGGIVGDIESLPFVEAIRQFSNDVGKKNALFIHLTLVPYLKASDEIKTKPTQHSVKELRSIGIQPDIIICRSERSIPLEHRKKISLFCNVDIKNVIETVDVKTIYEAPISFANEKLDVQVLNYFKIKSKKTNNLTPWRKINKIILNTKKQVNIAIIGKYVELKDAYKSLDEALTHGGIANNIKVKLVRIDS

SEQ ID NO: 195738 - protein, 46 aa, Unknown
  Bacterial polypetide isolated from the Sargasso Sea
MARYIFVTGGVVSSLGKGLSSASLAYLLQSRGFKVRIRKLDPYLNV

SEQ ID NO: 195739 - protein, 263 aa, Unknown
  Bacterial polypetide isolated from the Sargasso Sea
FISNDLDDEDFVICEIGGTIGDIESLPFIEAIRQFHNDNGHQNSIFIHVTLVPYIASSGELKTKPTQHSVKELRSLGIQPNILLCRSDRIIPEGERKKIGLFCNVQNNCVIQAINANSIYEVPINFYNEGLDKRVLEYFNLDTNKNIDLKMWSQVSKHVLEPDGKVLIGIVGKYTGLADAYKSLNEALSHGGIFNNVRVELKWIESEELDHLNASTLLSDCNGILVPGGFGERGSEGKITAIRFARENNIPYFGICFGMQLAV

SEQ ID NO: 195740 - protein, 255 aa, Unknown
  Bacterial polypetide isolated from the Sargasso Sea
AHYIFVTGGVVSSLGKGLSSASLAYLLKSQGYKVRIRKMDPYLNVDPGTMSPFQHGEVFVTDDGAETDLDLGHYERFTNISSKKSDNITTGKIYSDIIKKERKGEYLGKTVQVIPHVTDRIKKFISGDITNEDFVICEIGGTVGDIESLPFVEAIRQFSNEVGRKRSLFIHLTFVPFLKSSDEIKTKPTQHSVKELRSLGIQPDIIICRSQKSIPLDQRKKISLFCNVSIDNVIETVDVRTIYEAPISFYNEKLD

SEQ ID NO: 195741 - protein, 155 aa, Unknown
  Bacterial polypetide isolated from the Sargasso Sea
MNDTTTPDLPTRPVKYIFVTGGVVSSLGKGLAAASIGALLEGHGYRVTLQKLDPYVNVDPGTMSPYQHGEVYVTTDGAETDLDLGHYERFTNTITTKNHNWTTGKIYLSVIQKERRGDYLGRTVQVIPHVTNEIKESMQLVASDGDVDIVLIEVG

SEQ ID NO: 195742 - protein, 227 aa, Unknown
  Bacterial polypetide isolated from the Sargasso Sea
NIDIEWIQAEEVEGLLAAGRLKDLDGIVIPGGFGERGVEGKIAAVGFARENEIPCLGLCLGMQVMTIEYARNVLGMTGANSTEFDPTTSYPVIDLMESQRDITDMGGTMRLGAYVAELLEDSQVAEAYGRTVVSERHRHRYEFNPKFRSKFDDSEFLCSGESPDGRLVEFIELPTHPFWVGTQAHPEFKSRPDRPAPLFAGLVTAAITRASGRNPQLLDITEPSMAD

SEQ ID NO: 195743 - protein, 79 aa, Unknown
  Bacterial polypetide isolated from the Sargasso Sea
MARYIFVTGGVVSSLGKGLSSASLAYLLKSQGYKVRLRKMDPYLNVDPGTMSPFQHGEVFVTDDGAETDLDLGHYERFT

SEQ ID NO: 195744 - protein, 227 aa, Unknown
  Bacterial polypetide isolated from the Sargasso Sea
MTRYIFITGGVVSSLGKGIVTSSLASLLKLSKFKLRIRKLDPYLNIDPGTMNPAQHGEVFVTDDGAETDMDLGHYERFTGIISKKNDNITTGKVYSEVLRKERKGDYLGSTVQVIPHVTEEIKKFIKKDLRNEDFVICEIGGTVGDIESLPFLEALRQLRNELGTERSLFIHITLVPFISSANEFKTKPTQHSVKELLGLGISPDLLICRTEKKFSLDSKKKNISFF

SEQ ID NO: 195745 - protein, 238 aa, Unknown
  Bacterial polypetide isolated from the Sargasso Sea
AKTKYIFITGGVVSSLGKGIAAASIGALLEARGLSVSLIKVDPYINVDPGTMSPFQHGEVFVTNDGTETDLDLGHYERFVRFQASKKNNFTAGKVYEAVIRNERKGKYLGGTVQVIPHITNEIKKRIKEGGQNKDVAIVEIGGTVGDIESQPFVEAIRQMALELPNSSWAFVHLTLVPFINASGELKTKPTQHSVKELRSLGISPDVLVCRSEQELPKDEKKKIALFCSVPNEKVLYQ

SEQ ID NO: 195746 - protein, 312 aa, Unknown
  Bacterial polypetide isolated from the Sargasso Sea
SSDEIKTKPTQHSVKELRSIGIQPDIIICRSQQSIPLDQKKKISLFCNVPIENVIETVDVRTIYEAPISFFNQKLDKQVLKYFKLKSKKKPNLSPWKKITKITLNTKKFVNIAIIGKYVNLKDAYKSLDEALIHGGISNKIKVNLVRIESDKLKVNEIKKKLKNVSGLLIPGGFGKRGTEGKISAIKFARENNIPFLGICFGMQMAILEFARNILKIKKAGSSELDKNCYPVIGLITEWNKNGKIIKGTDKNLGGTMRLGSYEAKLRNNSAIKKIYKTNLIRERHRHRYEVNNNLKNEFERKGINFFRNVAK

SEQ ID NO: 195747 - protein, 191 aa, Unknown
  Bacterial polypetide isolated from the Sargasso Sea
MARFIFVTGGVVSSLGKGLSSASLAYLLQSRGYKVRLRKLDPYLNVDPGTMSPFQHGEVFVTDDGAETDLDLGHYERFSGVIAKKTDNITTGKIYNDVLKKERKGEYLGKTVQVIPHITDRIKEFIKYDTSKEDFVICEIGGIVGDIESLPFVEAIRQFSNDIGKKNTLFIHITLVPYLKASDEIKTKPTQ

SEQ ID NO: 195748 - protein, 257 aa, Unknown
  Bacterial polypetide isolated from the Sargasso Sea
MARYIFVTGGVVSSLGKGLSSASLAYLLKSQGYKVRLRKMDPYLNVDPGTMSPFQHGEVFVTDDGAETDLDLGHYERFTNISSKKSDNITTGRIYSDIIKKERRGGYLGKTVQVIPHITDRIKEFIKKDITNEDFVICEIGGTVGDIESLPFVEAIRQFSNEHGKLKTLFVHLTFVPFLKSSDEIKTKPTQHSVKELRSIGIQPDIIICRSQKSIPFDQRKKISLFCNVPIENVIENCDVRTIYEAPISFFYQKTDK

SEQ ID NO: 195749 - protein, 69 aa, Unknown
  Bacterial polypetide isolated from the Sargasso Sea
MARFIFVTGGVVSSLGKGLSSASLAYLLQSRGYKVRLRKLDPYLNIDPGTMSTFQHGEVYVTDDGAETD

SEQ ID NO: 195750 - protein, 286 aa, Unknown
  Bacterial polypetide isolated from the Sargasso Sea
IFLHLTLVPALQTAGEIKTKPTQHSVKELRSIGIQPDIVLCRAHDPLPADARRKISLFTNVEEASVISAEDVDNIYSIPRRYHEQSLDDAVVKHLALGGRESDLEEWDEVVGIMQSPEAELTIAMVGKYVSLTESYKSLSEAIIHAGIRNHVRPVVKYVDAEELTSFEEATEVLSDVDAVLVPGGFGARGTEGMINAARFARTSGTPYLGICLGLQIAVIEFARHVAGMESANSTEFNDKGNFPVVALVTEWTAGDGQLMERSDGDDLGGTMRLGAQEAHLNPESL

SEQ ID NO: 195751 - protein, 185 aa, Unknown
  Bacterial polypetide isolated from the Sargasso Sea
MSTKLKDTKYIFVLGGVMSGLGKGIAASSIGYILKNSGLKVTILKLDPYLNVDPGTMNPYQHGEVFVLDDGSETDLDLGHYERFIDVSMTRNNNATAGQIYSTVLEKERKGEYLGQTVQVIPHVTDEIIKRIKSVNKPKKYDVVICEVGGTVGDIESLPFMEAIRQLSINVGPQNHLIMHVTLLP

SEQ ID NO: 195752 - protein, 280 aa, Unknown
  Bacterial polypetide isolated from the Sargasso Sea
MTAFVFVTGGVVSNLGKGITSACLGAILESRGLSISMIKLDPYINVDPGTMSPFQHGEVFVTSDGTETDLDLGHYERFVRTETGRNSNYTAGRIYESVIAKERRGDYLGATVQVIPHITDEIKNGIKKGSNDADICLVEIGGTIGDIESLPFMEAIRQMGIELGPEKVVYVHLTLVPYIASSSEIKTKPTQHSVKEMRSIGIQPDILVCRSEQELPDEQRKKIALFTNVNEEAVISAYDVDDLYKIPEMMHQQSLDSIVIKKLKLKTPEANLNEWKSMLV

SEQ ID NO: 195753 - protein, 266 aa, Unknown
  Bacterial polypetide isolated from the Sargasso Sea
GGIYSDIIKKERKGDYLGGTVQVVPHVTDRIKKFISHNVKNEDFIICEIGGTVGDIESLPFLEAIRQFSNDVGKKNSLFIHLTLVPYLKSSGELKTKPTQHSVKELRSLGIQPDIIICRSEREIPKAERKKISLFCNVDIDNVIETVDVRTIYEAPISFHKEKLDGRVLSYFNIKNKKTPNLSKWKNITSKVLNPKKDVNIGIIGKYVNLKDAYKSLDEALIHGGISNNVRVNLKRIDSENLKPETIKKLLHNVSGVLIPRRFGKR

SEQ ID NO: 195754 - protein, 298 aa, Unknown
  Bacterial polypetide isolated from the Sargasso Sea
DFNSYLSATGELKTKPTQHSVKTLMELGLKADVLVCRSERDLSDEVKNKLALFCNVKLDCVIQSIDVETIYDVPIKMRDEGLDKVTLRKLKIKESEPDLDKWKNFLHKLKNPTHQINIGLIGKYVELNDSYKSILESLIHAGTENEVKVNVKSIHSEYLDKENIKKQLIDLDGVIVAPGFGQRGLDGKIQAVEYARVNKVPFLGICLGMQMAVIEYARNVKKLRYANSTEISEKCKDPVIDLMISQKEISNKGGTMRLGAWDCEILKNTISYKIYSKKVISERHRHRYEFNNEYSKKI

SEQ ID NO: 195755 - protein, 50 aa, Unknown
  Bacterial polypetide isolated from the Sargasso Sea
MSKFIFITGGVVSSLGKGLASAALGALLQSRGYKVRLRKLDPYLNVDPGT

SEQ ID NO: 195756 - protein, 244 aa, Unknown
  Bacterial polypetide isolated from the Sargasso Sea
MARYIFVTGGVVSSLGKGLSSASLGYLLRSQGYKVRIRKMDPYLNVDPGTMSPFQHGEVFVTDDGAETDLDLGHYERFTNISARQSDNITTGRIYSDILKKERKGGYLGKTVQVIPHVTDRIKEFIKKDITNEDFVICEIGGTVGDIESLPFLEAIRQFSNDKGRSKSLFIHLTFVPFLKSSDEIKTKPTQHSVKELRSIGIQPDIVICRSQQSIPIDQRKKISLFCNVDIDNVIETVDGQNDL

SEQ ID NO: 195757 - protein, 241 aa, Unknown
  Bacterial polypetide isolated from the Sargasso Sea
SLLESKKIKVTIMKLDPYINLDPGTMSPFQHGEVFVTEDGAETDLDLGHYERFLDEKMSQNNNFTAGQVYDSVLKKERKGEFLGATVQVIPHITDEIKKRIMKGAKGYDLAIVEIGGTVGDIESQPFLEAIRQLKIELGDQRTLFLHLTLVPFLSTSGETKTKPTQHSVKNLLSYGLQPDILICRSEKELQSSDKRKIALFTNVGLDSVFSLPDLPSIYAIPVFLSKEKLDEVVTRKMGIK

SEQ ID NO: 195758 - protein, 222 aa, Unknown
  Bacterial polypetide isolated from the Sargasso Sea
KLVIDWIESSALDEETKKSDSDSHNAAWELLRSADGILVPGGFGIRGIEGKIKAAEYARENKIPYLGVCLGLQVATIEFCRNVLGMEGANSAEFDEEAAHAAVVFMPEISKTHMGGTMRLGTKPTPFLVDDCKIRRLYGGGEHVDERHRHRYEVNPELIGEIEGAGLVYVGKDETGERCEIMELDGHPYYVGTQYHPEFKSRPDRPSPPFLGLLMAASGMEI

SEQ ID NO: 195759 - protein, 256 aa, Unknown
  Bacterial polypetide isolated from the Sargasso Sea
MARYIFVTGGVVSSLGKGLSSASLAYLLKSQGYKVRLRKMDPYLNVDPGTMSPFQHGEVFVTDDGAETDLDLGHYERFTNISSKKSDNITTGRIYSDIIKKERQGGYLGKTVQVIPHITDRIKDFIKKDITNEDFVICEIGGTVGDIESLPFVEAIRQFSNEHGKSKTLFIHLTFVPFLKSSDEIKTKPTQHSVKELRSIGIQPDIIICRSQQSIPIDQKKKISLFCNVPIDNVIETVDVRTIYEAPISFFNQKLD

SEQ ID NO: 195760 - protein, 266 aa, Unknown
  Bacterial polypetide isolated from the Sargasso Sea
KLDVQVLNYFKLKTKKPVNLNPWKKITKIILQNKRQVNIAIIGKYVELQDAYKSLDEALTHGGIDNKIKVNLVRIDSEKLKISEIKKKLKNISGILIPGGFGKRGTDGKIEAIKHARINKIPFLGICYGMQMAIIEFARNQLNLKNATSSEFDKKGLPIIGLLNEWSKDGKTIKGTDKDLGGTMRLGSYDAKLQNNTKIRKIYKSKLIKERHRHRYEVNIAYREKFEKKGMIFSGLSPDNQLPEIIELKNHPWFIGVQFHPEFKSR

SEQ ID NO: 195761 - protein, 178 aa, Unknown
  Bacterial polypetide isolated from the Sargasso Sea
MQYVFITGGVASSLGKGIASAALASLLQQRKFKVRIRKLDPYLNVDPGTMSPYQHGEVFVTDDGAETDLDLGHYERFTNRSAKKTDSTSSGKIYSNVLKKERKGDYLGATIQVIPHVTDEIKLFIKSNFEDEDIIIYEIGGTVGDIESLPFLEAIRQIRNDKNISSALIHMTYVPYLS

SEQ ID NO: 195762 - protein, 276 aa, Unknown
  Bacterial polypetide isolated from the Sargasso Sea
ICRSEREIPNNERKKISLFCNVPIDNVIETVDVRTIYEAPISFHKEKLDDRVLSYFNIKSKKSPNLSKWKDITSRVLNPKKDVSIGIIGKYVDLKDAYKSLDEALIHGGISNNVKVNLKRIDSENLKPENVKSLLNDVTGVLIPGGFGKRGTEGKIAAIKYARLNHIPFFGICFGMQMAVIEAARNLLNIKDASTSEFGNNCTPVVGLLEEWQKGEKKIKGTKKNLGGTMRLGLYDAIIKNNSLISKIYSEKKIKERHRHRYEVNIKYKNDLKKKD

SEQ ID NO: 195763 - protein, 206 aa, Unknown
  Bacterial polypetide isolated from the Sargasso Sea
DIKSDQDAEKTFKNMDGLLLLPGFGSRGSEGKILSCKFARENEIPFLGICLGLQCAVIEFARNICGLKNANSTEFNKNTPHPVIELMESQKAIKRKGGTMRLGAYDCKIEPGTKTYAAYRKKQISERHRHRWEVNNRYRDRLEKNGMKISGLNEELNLVEIIELTDHPWYVAGQFHPELKSRVSKAHPLFREFIKASVNNLKRKNK

SEQ ID NO: 195764 - protein, 243 aa, Unknown
  Bacterial polypetide isolated from the Sargasso Sea
MQTKYIFITGGVVSGLGKGIAAASIGALLEARGLTVSLMKLDPYINVDAGTMNPFQHGEVFVTVDGAETDLDLGHYERYTNAVLTRKHNRTTGQIYDTVIRKERAGDYLGATVQVVPHVIDEIKNTITEASRIFDKETKTFTAPNADICIVEIGGTVGDIESLPFLEAIRQFRHDHGKEHTLFVHLTLIVQTAEMKTKPTQHSVGKLREIGIQPDILICRTPEMLSEKVRSKISLFTNVPEDS

SEQ ID NO: 195765 - protein, 262 aa, Unknown
  Bacterial polypetide isolated from the Sargasso Sea
MAKTKYIFITGGVVSSLGKGIAAASIGALLEARGLSVSLIKVDPYINVDPGTMSPFQHGEVFVTNDGTETDLDLGHYERFVRFQASKKNNFTAGKVYEAVIRNERKGKYLGGTVQVIPHITNEIKRRIKEGGQNKDVAIVEIGGTVGDIESQPFVEAIRQMALELPNSSWAFVHLTLVPFINASGELKTKPTQHSVKELRSLGISPDVLVCRSEQELPKDEKKKIALFCSVPNESVISMHDVDTVYSVPILLNKQKVDKTHY

SEQ ID NO: 195766 - protein, 105 aa, Unknown
  Bacterial polypetide isolated from the Sargasso Sea
MQYVFITGGVASSLGKGIASAAVASLLQQRNFKVRIRKLDPYLNVDPGTMSPYQHGEVFVTDDGAETDLDLGHYERFTNRSAKKTDSTSSGKIYSNVLKKERKGD

SEQ ID NO: 195767 - protein, 279 aa, Unknown
  Bacterial polypetide isolated from the Sargasso Sea
LNLSTNEPDFEKWKNMLHLKSDIKKTVEIAILGKYFGLPDSYLSVVESLNHASLHNQVKLNLHWEDSDNFNIEDLNKFDGVVIPGGFGYRGIEGKIAAIEILRKQKIPFLGICLGLQCAVIEFARNECGIKDANSSEFSQNTNNFVIDLLPNQNLEKDDVGASMRLGTYPCKIKEGTKTSTIYKDEIIYERHRHRYEVNNKFKEELEKAGLIISGMSPDNNLIEMIEVKDHPFFIASQFHPEFISRPWEPAPMFNYFIEAATNHEKINKNSDKVQKVRD

SEQ ID NO: 195768 - protein, 224 aa, Unknown
  Bacterial polypetide isolated from the Sargasso Sea
MAQTKYIFITGGVVSSLGKGIAAASIGALLESRGLSVSLIKVDPYINVDPGTMSPFQHGEVFVTNDGTETDLDLGHYERFVRFEASKKNNFTAGKVYETVIRNERKGKYLGGTVQVIPHITNEIKKRIKSGGQGKDVAIVEVGGTVGDIESQPFVEALRQMALELPNSSWAFVHLTLVPFINASGELKTKPTQHSVKELRSLGISPDVLICRSDKELPKEKEIR

SEQ ID NO: 195769 - protein, 145 aa, Unknown
  Bacterial polypetide isolated from the Sargasso Sea
MARYIFVTGGVVSSLGKGLSSASLGYLLRSQGFKVRIRKMDPYLNVDPGTMSPFQHGEVFVSDDGAETDLDLGHYERFTNISAKQSDNITTGRVYSDIIKKERKGGFLGKTVQVIPHVTDRIKEFIKKDITNEDFVICEIGGTVG

SEQ ID NO: 195770 - protein, 57 aa, Unknown
  Bacterial polypetide isolated from the Sargasso Sea
MARYIFVTGGVVSSLGKGLSSASLGYLLRSQGYKVRIRKMDPYLNVDPGTMSPFQHG

SEQ ID NO: 195771 - protein, 157 aa, Unknown
  Bacterial polypetide isolated from the Sargasso Sea
MHYVFITGGVASSLGKGIASASLASLLQLRNFKVRIRKLDPYLNVDPGTMSPYQHGEVFVTDDGAETDLDLGHYERFTNQSAKKSDSISSGKIYSNVLTKERKGDYLGSTIQVIPHVTNEIKLFINSDLNNEEIVIYEIGGTVGDIESLPFLEAIRQ

SEQ ID NO: 195772 - protein, 190 aa, Unknown
  Bacterial polypetide isolated from the Sargasso Sea
MARYIFVTGGVVSSLGKGLSSASLAYLLKSQGYKVRVRKMDPYLNVDPGTMSPFQHGEVFVTDDGAETDLDLGHYERFTNISAKKSDNITTGKIYSDIIKKERKGKYLGKTVQVIPHVTDRIKEFIKGDISNEDFVICEIGGTVGDIESLPFVEAIRQFSNEVGRNNSLFIHLTFVPFLKSSDEIKTKPT

SEQ ID NO: 195773 - protein, 190 aa, Unknown
  Bacterial polypetide isolated from the Sargasso Sea
MHYVFITGGVASSLGKGLASASLASLLQLRNFKVRLRKLDPYLNVDPGTMSPYQHGEVYVTDDGAETDLDLGHYERFTNQSAKKSDSISSGKIYSNVLSKERKGDYLGATIQVIPHVTNEIKLFINSDIKNEDIIIYEIGGTVGDIESLPFLEAIRQIRNDKSISSALIHMTYVPFLSSAGELKTKPTQH

SEQ ID NO: 195774 - protein, 283 aa, Unknown
  Bacterial polypetide isolated from the Sargasso Sea
DVRVLDYFKLKSKKSNNLSPWKKITQITLNAKKQIDIAIIGKYVELKDAYKSLDEALTHGGISNNLKVNLVRIDSEKLKVLQIKSKLQDVSGILIPGGFGKRGTIGKIEAIKYARVNKIPFLGICYGMQMAIIEFARNQLKIKNATSSEFDKTGVHIIGLMHEWEQSGRKVKGTDKDLGGTMRLGSYDAILKDNTKIRGIYKSRLIKERHRHRYEVDISYKERFEKKGLIFSGLSPNNKLPEIIELKNHPWFIGVQFHPEFKSRPLSPHPLFSSFIKAAKNHR

SEQ ID NO: 195775 - protein, 271 aa, Unknown
  Bacterial polypetide isolated from the Sargasso Sea
IHLTLLPYIAAVGEIKTKPTQHSVKELRSIGIQPDCLICRTDKVIPENEKNKMALFTNVEESAIISAIDVDSIYKIPKLLHQQNLDEIVIKKFNLDLPSADLTEWNNVVDAIDNPKDEVNIAMVGKYIGLADSYKSLSEALIHAGIQTRTKININYIDSEEIENKGMNCLQGMDAILVPGGFGNRGIGGKINAVKYARENGVPYLGICLGMQVAVIEIARNLAGLSDADSTEFNKDTNYPVIALITEWQDAKGTKEKRTKASDLGGTMRLG

SEQ ID NO: 195776 - protein, 273 aa, Unknown
  Bacterial polypetide isolated from the Sargasso Sea
KNKILKGAGSADVAIVEIGGTVGDIESQPFLEAIRQMKLELGSNQTLFIHLTLVPFLKSAGETKTKPTQRSVKEMLSHGLQPDILICRSDGVLADEERGKIALFTNVEEGSVISMPDVNSIYKIPVELNNQKVDEIVVNKLNLICRKASLVDWKRVISEDLNPKDSVTVSMVGKYTELADAYKSLNEALRHGGLKNSLKVNIKYVDSELINARNAKSLLKNSHAILVPGGFGERGIEGMIAAVKYARINKIPYLGICLGLQIAVIEYARNVVG

SEQ ID NO: 195777 - protein, 251 aa, Unknown
  Bacterial polypetide isolated from the Sargasso Sea
MARYVFVTGGVVSSLGKGLSSASLAALLQLRGYKVRIRKLDPYLNVDPGTMNPFQHGEVFVTDDGAETDLDIGHYERFTGISATKSDNITTGGIYSDIIKKERKGDYLGGTVQVVPHVTDRIKKFISHDVKKEDFIICEIGGTVGDIESLPFLEAIRQFSNDIGKNNSLFIHLTLVPYMKASGELKTKPTQHSVKELRSLGIQPDIIICRSEKKIPLAERKKISLFCNVDIKNVIETVDVRTIYEAPISFH

SEQ ID NO: 195778 - protein, 109 aa, Unknown
  Bacterial polypetide isolated from the Sargasso Sea
DHTSEKGGTMRLGAYKAILKKNSKVSEIYNTNEIAERHRHRYEVDLSLTKDFEKKGFVFSGMSPDNVLPEILESMNHKWFIGVQYHPELKSRPLAPHPLFSSFIKHCIK

SEQ ID NO: 195779 - protein, 110 aa, Unknown
  Bacterial polypetide isolated from the Sargasso Sea
MARYIFVTGGVVSSLGKGLSSASLGYLLRSQGYKVRIRKMDPYLNVDPGTMSPFQHGEVFVTDDGAETDLDLGHYERFTNISAKQSDNITTGRIYSDIIKKERRGGYLEK

SEQ ID NO: 195780 - protein, 186 aa, Unknown
  Bacterial polypetide isolated from the Sargasso Sea
MARFIFVTGGVVSSLGKGLSSASLAYLLKSQGYKVRVRKMDPYLNVDPGTMSPFQHGEVFVTDDGAETDLDLGHYERFTNISAKKSDNITTGKIYSDIIKKERRGKYLGKTVQVIPHVTDRIKEFIKGDVTNEDFVICEVGGTVGDIESLPFVEAIRQFSNEVGRNKSLFIHLTLVPFLKSSDEIK

SEQ ID NO: 195781 - protein, 240 aa, Unknown
  Bacterial polypetide isolated from the Sargasso Sea
RYIFVTGGVVSSLGKGLSSASLAYLLQSRGFKVRIRKLDPYLNVDPGTMSPFQHGEVYVTDDGAETDLDLGHYERFSGVSAKKSDNITTGKIYNDVLKKERKGEYLGKTVQVIPHITDRIKKFIKNDSSKEDFVICEIGGIVGDIESLPFVEAIRQFANDVGKKNALFIHLTLVPYLKASDEIKTKPTQHSVKELRSIGIQPDIIICRSERSIPLEHRKKISLFCNVDIKNVIETVDVKT

SEQ ID NO: 195782 - protein, 251 aa, Unknown
  Bacterial polypetide isolated from the Sargasso Sea
SIYEVPSLYSKYGLDEALLKQLGYKPKNHKLNLKPWINLQEKIKKRKHKVKIAVVGKYTNLKDSYKSLNEALVHGGIENFADVDIQWINSEKEKNLSLMKKLKGCDGILIPGGFGIRGINGKINAIKYARENNIPFFGICLGMQLAVIEIAQNVIKIKNAHSSEFKNTTKSVVGLMTEWVNKNKIEKRDKNSDKGGTMRLGAYKAILKKNSKIFSIYKNTVISERHRHRYEVNQKFLSKFENKGYYFSGMS

SEQ ID NO: 195783 - protein, 304 aa, Unknown
  Bacterial polypetide isolated from the Sargasso Sea
IFSLSFKSQGYKVRIRKMDPYLNVDPGTMSPFQHGEVFVTNDGAETDLDLGHYERFTNISAKKSDNITTGKIYSDIIKKERKGKYLGKTVQVIPHVTDRIREFIKDDISNEDFVICEIGGTVGDIESLPFVEAIRQFSNEVGRNKSLFIHLTFVPFLKSSDEIKTKPTQHSVKELRSLGIQPDIIICRSQKSIPLDQRKKISLFCNVDINNVIETVDVRTIYEAPISFYNEKLDKQVLKYFKLKPRKKVNLLPWKKITQTVLNTKKIINIAIIGKYVNFKDAYKSLDEAFIHGGIKHNVKVNFI

SEQ ID NO: 195784 - protein, 199 aa, Unknown
  Bacterial polypetide isolated from the Sargasso Sea
KKLKKASAILIPGGFGKRGTEGKISAINFARRKKIPFLGICFGMQMAVIEFARNVLKMKKAGSTEFDINCYPVIGLIDEWNKNGKIIKGTRKDLGGTMRLGLYEAKLKHNSMIKNIYKSNSIKERHRHRYEVNNNLKNKFEDKGMIFSGMSPDNNLPEIIELKNHPWFVGVQFHPEFKSRPLSPHPLFSSFVKAAKNYK

SEQ ID NO: 195785 - protein, 211 aa, Unknown
  Bacterial polypetide isolated from the Sargasso Sea
MHFVFITGGVASSLGKGIASASLAALLKSRNFKVRIRKLDPYLNVDPGTMSPYQHGEVYVTDDGAETDLDLGHYERFTNQSSKKNDSISSGKIYSTVLSKERKGDYLGATIQVIPHVTNEIKSFINSDLKNEDFAIYEIGGTVGDIESLPFLEAIRQIRNDKKISSALIHMTYIPYLSFAGELKTKPTQHSVKELLNARIQPDIIMCRSEK

SEQ ID NO: 195786 - protein, 279 aa, Unknown
  Bacterial polypetide isolated from the Sargasso Sea
RFIFITGGVVSSLGKGLSSASLGALLQSHGYKVKLRKLDPYLNVDPGTMNPIQHGEVFVTDDGAETDLDLGHYERFTDVSATKFDNITSGKIYQDIIQKERKGDYLGGTVQVIPHVTDAIKEFITQYTDDVDFLLCEIGGTVGDIEALPFFEAIRQLRNELNPENCLFIHLTLLPFIAAAGELKTKPTQHSVKELTSIGIQPDIIILRCDRDIPEDERKKISSFCNVPFSRIIPAVDVGNIYDVPMNLHQNGLDSEVLSIFNLKQKNKPNFIKWKKISS

SEQ ID NO: 195787 - protein, 202 aa, Unknown
  Bacterial polypetide isolated from the Sargasso Sea
MSDYIFVTGGVVSALGKGVTSASLGAILESRGLKVGMMKLDPYLNVDPGTMSPYQHGEVFVTEDGTETDLDLGHYERYVSTITGKHSNYTAGKIYETVIAKERRGDYLGATVQVIPHVTDEIRKSIVKGSQGYDVTIVEIGGTVGDIESLPFIEAIRQMGIYKDGYEVAYVHLTLVPYIKASSEIKTKPTQHSVRELRAIGI

SEQ ID NO: 195788 - protein, 291 aa, Unknown
  Bacterial polypetide isolated from the Sargasso Sea
MSPYQHGEVYVTDDGAETDLDLGHYERFTNQSAKQTDSVSSGKIYSNVLLKERKGDYLGSTIQVIPHVTNEIKSFINSDLKNEDIAIYEIGGTVGDIESLPFLEAIRQIRNDKNISSALIHMTYIPYLSSAGELKTKPTQHSVKELLNAGIQPDIIMCRSEQPIDNDSISKISLFCNVKKESVIPALNAKSIYEVPSLYSKYGLDEALLKQLGYKPKNHKLNLKPWIDLQKKIKKRKHKVKIAVVGKYTNLKDSYKSLNEALVHGGIENSADVDIQWINSEKENNASLIKK

SEQ ID NO: 195789 - protein, 295 aa, Unknown
  Bacterial polypetide isolated from the Sargasso Sea
KSSWAFVHLTLVPFINASGELKTKPTQHSVKELRSLGISPDVLVCRSEQELPKDEKNKIALFCSVPAKSVISMHDVDTVYSIPILLNKQKVDDTILKKLNLKIKKPNLNDWKRVVKAKLLPEKEVNVSFVGKYTELKDSYKSINEALEHAGIQNKAKVNINFVEAEQITSKNVRRVLKKSHAILVPGGFGERGIEGMILACKYARENNVPYLGICLGMQIAIIEYARNVLKLKSANSTEFDSSTKFPVIGLITEWSDISGKKEKRTKNSDLGGTMRLGGQVCKLKKKSNSYKMYK

SEQ ID NO: 195790 - protein, 165 aa, Unknown
  Bacterial polypetide isolated from the Sargasso Sea
LCLGMQTAVIEWARNLAGLTEATSAELDAGTPHPVIHLCPEQQDVVDLGGTMRLGVYPCRIAPETLAHRLYDDEVVYERHRHRYEFNNAYRNLFLESGYVVSGTSPDGRLVELIELKGHPFFTACQYHPEFLSRPGRPHPLFRGLIEAAQQRLPASPVEALKTQR

SEQ ID NO: 195791 - protein, 206 aa, Unknown
  Bacterial polypetide isolated from the Sargasso Sea
GEVFVTEDGAETDLDLGHYERFTDTAMTRLNSVTTGSIYQAVINKERRGSYDGGTVQVIPHITGEIRERIHRVAANSNAEIIITEIGGTVGDIESLPFLEAIREFKNDVNRNDVAYIHVTLLPYIKTSGEIKTKPTQHSVKELRSIGIQPDLLVCRSDKSINEALKKKLSGFCGVSINSVIEALDEDSIYSVPLSLKKEGLCKETL

SEQ ID NO: 195792 - protein, 298 aa, Unknown
  Bacterial polypetide isolated from the Sargasso Sea
IISASLARLLQAQGLKVSIQKLDPYINVDPGTLNPYEHGECYVTDDGAETDLDLGHYERFLSINTSQKNNITTGKIYQNVIEKERKGEFLGKTVQVIPHITNEIKENIRNINHKNNLDIIITEIGGTVGDIESLPFLEAVRQVIYEEGPENSMVIHLTLIPYLSATGELKTKPTQHSVKTLMELGLKADVIVCRSERELTDEIKNKLALFCNVRFDCVIQSIDVETIYDVPIKMMDEGLDKVTLEKFKIKESEPDLDKWKNFLHKLKNPTHQINIGLVGKYVELDDSYKSILESLIHA

SEQ ID NO: 195793 - protein, 204 aa, Unknown
  Bacterial polypetide isolated from the Sargasso Sea
MSPFQHGEVFVTDDGAETDLDLGHYERFSGVTAKKTDNITTGKIYSDVLRKERKGQYLGKTVQVIPHITDRIKEFIKHDTSKEDFVICEIGGIVGDIESLPFVEAIRQFSNDIGKINALFIHLTLVPYLKASDEIKTKPTQHSVKELRSIGIQPDIIICRSERPIPLEHRKKISLFCNVDIKNVIETVDVKQFMKHRLVLQKKN

SEQ ID NO: 195794 - protein, 246 aa, Unknown
  Bacterial polypetide isolated from the Sargasso Sea
IIGKYVNLKDAYKSLDEALVHGGINNNLKVNLIRIESDNLKPSEIKKKLKNVSGILIPGGFGKRGTEGKIEAIKYARKNKIPFLGICYGMQMAIIEFARNVLKINKASSTELNPKCVPVIGLIHEWKKNGKTIKGTDKDLGGTMRLGLYEAELLNNSLIKSIYKSKSIKERHRHRYEVNVNYKNQYEKKGLLFSGNSPDKNLPEIIELKNHPWFIGVQFHPEFKSRPLSPHPLFSSFIKAAKNHKK

SEQ ID NO: 195795 - protein, 244 aa, Unknown
  Bacterial polypetide isolated from the Sargasso Sea
APISFYNQKLDKQVLKFFKINSKKRPNLLPWKKITKIVLNTKKIVNIAIIGKYVNLKDAYKSLDEALTHGGISNKVKVNLIRIESDKLKSKEIKSILKNVSGILIPGGFGKRGTEGKIEAIKYARERKIPFLGICFGMQMAMIEFAKNILKIKKAGSSELDKNCFPIIGLIDEWNKDGKIIKGTDKNLGGTMRLGLYQAKLRNNSAIKKVYKSSVIKERHRHRYEVNINLMQKFEKKGLMFSGI

SEQ ID NO: 195796 - protein, 261 aa, Unknown
  Bacterial polypetide isolated from the Sargasso Sea
KYEAVIQSIDVDTIYDVPLKMLEEGLDKVVIDRLNLKPKEKINLTQWNEFLSKYKNPKSKIKIGLVGKYVELQDSYKSILEAFIHSGAVNEVEIEVVSIHSEHISNKNYETLLDGLHGLLVAPGFGERGIEGKIKSVEYVRKNKIPFFGICLGMQMAVIEYSRNVLGLHGANSTEMTKDATYPVIDLMESQKKIKNKGGTMRLGSWKCSLSENTLVYDIYGKSNISERHRHRYEFNNKFSKIIFSESFKPSGINPDTGLIE

SEQ ID NO: 195797 - protein, 272 aa, Unknown
  Bacterial polypetide isolated from the Sargasso Sea
MARYIFVTGGVVSSLGKGLSSASLAYLLKSQGFKVRVRKMDPYLNVDPGTMSPFQHGEVFVTDDGAETDLDLGHYERFTDISSTKNDNITTGKIYSDIIAKERKGDYLGKTVQVIPHVTNRIKEFIKNGIKNEDFVICEIGGTVGDIESLPFLEAIRQFANDIGKEKTLFIHLTLVPFLKSSDEIKTKPTQHSVKELRSIGIQPDMVICRSQQSIPLDQRKKISLFCNIPIKRVIETVDVKTIYEAPISFFNEGLDKQVFEYFNIKPRKKIN

SEQ ID NO: 195798 - protein, 335 aa, Unknown
  Bacterial polypetide isolated from the Sargasso Sea
AHPLLSAAGELKTKPTQHSVKSLQESGVFPDVLVCRTEYKLNEGIRRKLALFCNVQTDSVIQSIDAATIYDVPKLMKEEQLDKVVLKKLGLSHSGEADITNWEEFVYHLNNPKHTVDIALVGKYVELKDSYKSISESFIHASSFSRCKVNLHWICSEKLDAASAIESLKNMDGVLVAPGFGPRGIEGKLYAVQYARENKIPFFGICLGMQASVIEYARNVLHYESAHSTEMNPKSSYPVIDIMETQKKVTNMGGTMRLGSCACKLKKGSIAHAVYGSDIIDERHRHRYEFNNSYLNDFENSGMKATGINPQTGLVEIIEIPNHTWFVGVQFHPRI

SEQ ID NO: 195799 - protein, 234 aa, Unknown
  Bacterial polypetide isolated from the Sargasso Sea
MARYIFVTGGVVSSLGKGLSSASLAYLLQSRGYKVRLRKLDPYLNVDPGTMSPFQHGEVFVTDDGAETDLDLGHYERFSGVSAKKSDNITTGKIYSDVLKKERKGKYLGKTVQVIPHITDRIKEFIKNDSSKEDFIICEIGGTVGDIESLPFVEAIRQFANDIGKKNALFIHLTLVPYLKSSDEIKTKPTQHSVKELRSIGIQPDIIICRSERPIPLEHRKKISLFCNIDIKNI

SEQ ID NO: 195800 - protein, 233 aa, Unknown
  Bacterial polypetide isolated from the Sargasso Sea
KYFKIKSKKRANLNPWKKITKIVLNTKRTVDIAIIGKYVNLKDAYKSLDEALIHGGISNKVKVNLIRIESDNLKTNEIKKKLKNVSGLLIPGGFGKRGTEGKISAIKYARENKIPFLGICFGMQMAIIEFARNKLNIKKAGSSELDKKCYPVIGLIDEWDKNGKIIKGTDKDLGGTMRLGLYEAKLRNNSAINRIYNSKTIKERHRHRYEVNNNLKNQFEKKKLVFSGMSPDN

SEQ ID NO: 195801 - protein, 113 aa, Unknown
  Bacterial polypetide isolated from the Sargasso Sea
VKGTDKDLGGTMRLGSYDAILKDKSRIKDIYKTRLIKERHRHRYEVDISFKEKFEKKGLIFSGLSPDHKLPEIIELKNHPWFIGVQFHPEFKSRPLSPHPLFSSFIKAAKNHR

SEQ ID NO: 195802 - protein, 275 aa, Unknown
  Bacterial polypetide isolated from the Sargasso Sea
KIYSDIIAKERKGDYLGKTVQVIPHVTNRIKEFIKNGIKNEDFVICEIGGTVGDIESLPFLEAIRQFANDIGKEKTLFIHLTLVPFLKSSDEIKTKPTQHSVKELRSIGIQPDMVICRSQQSIPLDQRKKISLFCNIPIKRVIETVDVKTIYEAPISFFNEGLDKQVFEYFNIKPRKKINLKPWKDVTKIVTNKNIRTVNIAIVGKYVDLKDAYKSLDEALVHGGIHNNVKINLIRIESDLLKISDVQKKLSNVSGIIIPGGFGKMRYRKVRLHV

SEQ ID NO: 195803 - protein, 305 aa, Unknown
  Bacterial polypetide isolated from the Sargasso Sea
MKASDEIKTKPTQHSVKELRSIGIQPDIIICRSERTIPLDQRKKISLFCNVAIEDVIETVDVKTIYEAPISFNKEKLDERVLKYFKIKSKSKVNLKPWKKITNLVLKAKKIVHIAIIGKYVELKDAYKSLDEALTHGGIDNNLKVNLIRIESDKLKPVEIKNKFKNASGILIPGGFGKRGTEGKIAAINFARKNNIPFLGICFGMQMAVIEFARNKLNIKNATSSEFGPSKASVVGLMSEWTKDGKLMKGSDKNLGGTMRLGSYEARLKKDTKVSKIYNSLKINERHRHRYEVNINYKEDLKIKV

SEQ ID NO: 195804 - protein, 164 aa, Unknown
  Bacterial polypetide isolated from the Sargasso Sea
MARYIFVTGGVVSSLGKGLSSASLAYLLQSRGYKVRLRKLDPYLNVDPGTMSPFQHGEVFVTDDGAETDLDLGHYERFSGVTAKKTDNITTGKIYSDVLKKERKGEYLGKTVQVIPHITDRIKEFIKHDTSKEDFVICEIGGIVGDIESLPFIEAIRQFSNDIG

SEQ ID NO: 195805 - protein, 211 aa, Unknown
  Bacterial polypetide isolated from the Sargasso Sea
SDYLKPKQIKNKLKNVSGILIPGGFGKRGTEGKIAAINYARKNKIPFFGICFGMQMAVIEFARNKLKIKKATSSEFGPSKASVVGLMSEWSKDGRLIKGTDKNLGGTMRLGSYEARLKKDTKISKIYKSLIIEERHRHRYEVNINFKEKFENKGMIFSGLSPDNKLPETIELKDHPWFIGVQFHPEFKSRPLVPHPLFSSFIRAARINSKK

SEQ ID NO: 195806 - protein, 219 aa, Unknown
  Bacterial polypetide isolated from the Sargasso Sea
MTRFIFITGGVVSSLGKGLTTAALGALLQARGYKVRLRKLDPYLNVDPGTMSPFEHGEVFVTDDGAETDLDLGHYERFTGVAAKKTDSISSGKIYSNVLDKERKGDYLGKTIQVIPHVTDEIKKFIEIGEEEVDFMLCEIGGTVGDIEGLPFFEAIRQFSQEKGVGSCIFMHLTLVPFIQTSGELKTKPTQHSVKELRSIGLTPDILVCRAKERIPEEE

SEQ ID NO: 195807 - protein, 66 aa, Unknown
  Bacterial polypetide isolated from the Sargasso Sea
MGKGDPTKFIFVLGGVMSGLGKGIAASSIGYLLKNSGLRVTILKLDPYLNVDPGTMNPYQHGEVFV

SEQ ID NO: 195808 - protein, 216 aa, Unknown
  Bacterial polypetide isolated from the Sargasso Sea
ARVNVHWVATEDIKSDKDAEQIFGKMDGILLLPGFGSRGSEGKILSCKYARENNIPFLGICLGLQCAVIEFARNVCGLKNANSTEFNKKTPYPVIDLMESQRAIKAKGGTMRLGAYDCEIKPGTKTYTAYRQKKISERHRHRWEVNNRYRERLEKNGLKISGKNRELNLVEIIELPDHPWYVAGQFHPELKSRVSKAHPLFRDFIKASVKNLKKRT

SEQ ID NO: 195809 - protein, 71 aa, Unknown
  Bacterial polypetide isolated from the Sargasso Sea
MAKTKYIFITGGVVSSLGKGIAAASIGALLEARGLKVSLLKLDPYINVDPGTMSPFQHGEVFVTNDGTETD

SEQ ID NO: 195810 - protein, 211 aa, Unknown
  Bacterial polypetide isolated from the Sargasso Sea
MTRFIFVTGGVVSSLGKGLASASLASLLQHHGYKVRIRKLDPYLNVDPGTMSPYQHGEVYVTDDGAETDLDLGHYERFTGVVSKKSDNITSGRVYQKIITKERKGEYLGATVQVIPHVTNEIKEFISYDLEQEDFVICEIGGTIGDIESLPFIEAIRQFHNDNGHENSLFIHVTLVPYIASSGELKTKPTQHSVKELRSLGIQPKYFIVQI

SEQ ID NO: 195811 - protein, 129 aa, Unknown
  Bacterial polypetide isolated from the Sargasso Sea
YLGKTVQVIPHITNRIKEFIKKDSTNEDFIICEIGGIVGDIESLPFIEAIRQFANDVGKKNTLFVHLTLVPYLKASDEIKTKPTQHSVKQLRSIGIQPDIIICRSERSIPLEHRKKISLFCNVDIKNVI

SEQ ID NO: 195812 - protein, 222 aa, Unknown
  Bacterial polypetide isolated from the Sargasso Sea
MSFRWGNKQTRFLFVTGGVVSSLGKGVAAASLGAVLESRGLSVTILKLDPYINLDPGTMSPFQHGEVFVTEDGSETDLDLGHYERFLTSKMSKSNNFTTGQVYEEVLRKERKGDYLGGTVQVIPHITDEIKERIIKGAGNSDVAIVEIGGTVGDIESQPFLEAIRQMKIDLQSYQTLYMHLTLLPFLKSAGETKTKPTQRSVKEMLSHGLQPDILVCRSDEP

SEQ ID NO: 195813 - protein, 237 aa, Unknown
  Bacterial polypetide isolated from the Sargasso Sea
MARYIFVTGGVVSSLGKGLSSASLAYLLKSQGYKVRIRKMDPYLNVDPGTMSPFQHGEVFVTNDGAETDLDLGHYERFTNISAKKSDNITTGKIYSDIIKKERKGKYLGKTVQVIPHVTDRIREFIKGDISNEDFVICEIGGTVGDIESLPFIEAIRQFSNEVGRSKSLFIHLTFVPFLKSSDEIKTKPTQHSVKELRSLGIQPDIIICRSQKSIPMDQRKKISLFCNVSIENVMKL

SEQ ID NO: 195814 - protein, 270 aa, Unknown
  Bacterial polypetide isolated from the Sargasso Sea
PHVTDRIKKFISQDVKNEDFIICEIGGTVGDIESLPFLEAIRQFSNDVGKKNSLFIHLTLVPYLKASGELKTKPTQHSVKELRSLGIQPDIIICRSEREIPKTERKKISLFCNVPIDNVIETVDVRTIYEAPISFHKEKLDERVLSYFNIKNKKNPDLSKWKNITSRVLNPKKDVNIGIIGKYVDLKDAYKSLDEALIHGGISNNVKVNLKRIDSENLKPENIKPLLKEVTGVLIPGGFGKRGTEGKIAAIKYARLNHIPFFGICFGMQM

SEQ ID NO: 195815 - protein, 190 aa, Unknown
  Bacterial polypetide isolated from the Sargasso Sea
MARFIFVTGGVVSSLGKGLSSASLAYLLQSRGYKVRLRKLDPYLNVDPGTMSPFQHGEVFVTDDGAETDLDLGHYERFTDVSAKKSDNITTGKIYNDVLKKERKGKYLGKTVQVIPHITDRIKEFIKNDSSKEDFIICEIGGIVGDIESLPFIEAIRQFANDVGKKNTLFIHLTLVPYLKSSEEIKTKPT

SEQ ID NO: 195816 - protein, 281 aa, Unknown
  Bacterial polypetide isolated from the Sargasso Sea
TMSPFEHGEVFVTDDGAETDLDLGHYERFTGVAAQSTDSVSSGRIYSTVLERERKGDYLGETIQVIPHVTNEIKKFLEQHEDEVDFMLCEIGGTIGDIEGLPFFEAIRQFSQEKKSNSCIFVHLTLLPFLSSSGELKTKPTQHSVKELRSIGISPDILVCRSEVPIPSKEKEKIALFCNVNKKNIIAANDLETIYEAPIAFFKEGLDEAVLQVLGLKSKSRPDLSIWQDVSSRYRNSEGLVKIAVVGKYTKLEDAYKSLSEALIHGGLANKTNVEITWLES

SEQ ID NO: 195817 - protein, 282 aa, Unknown
  Bacterial polypetide isolated from the Sargasso Sea
KGLSSASLAYLLQSRGFKVRIRKLDPYLNVDPGTMSPFQHGEVYVTDDGAETDLDLGHYERFSGISAKRSDNITTGQIYSDVLKKERKGKYLGKTVQVIPHVTNRIKEFIKNDIRNEDFVICEIGGTVGDIESLPFVEAIRQFSNDIGKKNSLFIHLTLVPYMKASDEIKTKPTQHSVKELRSIGIQPDIIICRCERSIPLDQKKKISLFCNVDIKNVIQTIDVKTIYEAPISFNNEKLDKQVLDYFKVKSRRNVNLNPWRKITKTVLHPKKYVNIGIIGKY

SEQ ID NO: 195818 - protein, 68 aa, Unknown
  Bacterial polypetide isolated from the Sargasso Sea
MARYIFVTGGVVSSLGKGLSSASLAYLLQSRGFKVRIRKLDPYLNVDPGTMSPFQHGEVYVTDDGAET

SEQ ID NO: 195819 - protein, 86 aa, Unknown
  Bacterial polypetide isolated from the Sargasso Sea
MTRYVFITGGVVSSLGKGIAAASLASLFKLRGYKVSLQKLDPYINLDPGTMSPIQHGEVFVTEDGAETDLDLGHYERFVGIQMSQD

SEQ ID NO: 195820 - protein, 308 aa, Unknown
  Bacterial polypetide isolated from the Sargasso Sea
KEKGDYLGATIQVIPHVTNEIKNFINSDLKKEDIVIYEIGGTVGDIESLPFLEAIRQIRNDRNTSSALIHMTYIPYLSSAGELKTKPTQHSVKELLNAGIQPDIIMCRSEMPIDKESISKISLFCNVKKDSVIPALNAKSIYEVPSLYSKHGLDKTLLKHLNYNPKKHPLNLNPWDNLIKKINSLSHVVTIGVVGKYTNLKDSYKSLNEALIHGGIENSTKVDIRWINAEKLNKKNIFNNLKKCDGILVPGGFGLRGIAGKIAAINYARENNVPYFGICLGMQLAVIEIARNVLNLKNANSSEFKSTS

SEQ ID NO: 195821 - protein, 294 aa, Unknown
  Bacterial polypetide isolated from the Sargasso Sea
IQPDIIICRSQQSIPYDQRKKISLFCNVPIENVIETVDVRTIYEAPISFFNQKLDKQVLKYFKLKSKKRANLLPWKKITKITLNTKKTINIGIIGKYVNLKDAYKSLDEALTHGGISNKVKVNLVRIESDKLKANEINKKLKNISGLLIPGGFGKRGTEGKISAIRYARERKIPFLGICFGMQMAIIEFARNKLKIKKAGSTELDKKCYPVIGLINEWKKDGKIIKGTDKNLGGTMRLGLYEAKLRNNSAIKKIYKSSSIKERHRHRYEVNNNLKSQFEKQGLIFSGNVSQIMN

SEQ ID NO: 195822 - protein, 303 aa, Unknown
  Bacterial polypetide isolated from the Sargasso Sea
YERFVRCGISSDSNYTAGQIYENVIQKERRGDYLGATVQVIPHVTDEIIRCIKRGAADAEVALVEIGGTVGDIESLPFLEAIRQMRVELGSENTLFIHLTLVPYIASAGEVKTKPTQHSVKELRSIGIQPDILLCRAQESISSSERRKIALFTNVGERAVISALDASNIYQIPENLHAEGLDDIVVDKLNLTVPPANLTNWKKVVSALENPSNHVSIAMVGKYVDLTEAYKSLSESLVHAGIHTDTKVEICYVDAEAIEKNGTNILEKVDGILVPGGFGERGIDGKVMAVTFARERQIPFLGI

SEQ ID NO: 195823 - protein, 124 aa, Unknown
  Bacterial polypetide isolated from the Sargasso Sea
MHFVFITGGVASSLGKGIASASLATLLKSRKFKVRIRKLDPYLNVDPGTMSPYQHGEVYVTDDGAETDLDLGHYERFTNQSAKQSDSVSSGKIYSNVLMKERKGDYLGSTIQVIPHVTNEIKSF

SEQ ID NO: 195824 - protein, 216 aa, Unknown
  Bacterial polypetide isolated from the Sargasso Sea
MPRFIFITGGVVSSLGKGIVSSSIASLLQLGSYNVRVRKLDPYLNIDPGTMNPSQHGEVFVTQDGAETDMDLGHYERFTGIISKKSDNITSGKIYSEVLRKERKGDYLGSTVQVIPHVTNEIKKFIKADLKKEDFVICEIGGTVGDIEGLPFLEAIRQLRNELGRSRTLFIHLTLIPFIRAANEFKTKPTQHSVKELLSVGIQPDLLVCRTIENIS

SEQ ID NO: 195825 - protein, 222 aa, Unknown
  Bacterial polypetide isolated from the Sargasso Sea
VNLRYIDSEDIENQGTGLLEGVDAILVPGGFGLRGVEGKIKTVQYARENKIPYLGICLGMQVAVIEYARNVVGWTDANSSEFDMASAHPVVGLITEWQDATGATEQRSESSDLGGTMRLGAQDCQLLGGSKVHDCYGKDVIVERHRHRYEVNNNLLPKLTEAGLKVTGRSGDGALVEVVEAPDHPWFVACQFHPEFTSTPRDGHPLFSGFVNAALAQKAKKA

SEQ ID NO: 195826 - protein, 298 aa, Unknown
  Bacterial polypetide isolated from the Sargasso Sea
TDLDLGHYERFVRFQASKKNNFTAGKVYETVIRNERKGRYLGGTVQVIPHITNEIKKRIKEGGQGKDIAIVEIGGTVGDIESQPFVEAIRQMALDLPSSSWAFIHLTLVPYIKASGELKTKPTQHSVKELRSLGIGPNLLICRSEQELPKDEKEKIALFCSVHKNNVISMHDVETVYSIPILLNKQKADQIILKKLNIHSKNPNLLDWKGVVKAKLQPRGETNIAFVGKYTELKDSYKSINEALDHAGIKNKIKVNINFVEAETITKRNVKTILKDCDGVLIPGGFGLRGVEGMINAL

SEQ ID NO: 195827 - protein, 134 aa, Unknown
  Bacterial polypetide isolated from the Sargasso Sea
KKCYPVIGLIHEWNKNGKVFKGTEKNLGGTMRLGLYTAKLKNNSAIKKIYKSKEIKERHRHRYEVNNNQRSKFEKKGLIFSGMSPDNKLPEIIELKNHPWFIGVQFHPEFKSRPLSPHPLFKSFIKASKNYHGK

SEQ ID NO: 195828 - protein, 281 aa, Unknown
  Bacterial polypetide isolated from the Sargasso Sea
DPYLNVDPGTMSPFQHGEVFVTDDGAETDLDLGHYERFTNISAKQSDNITTGRIYSDIIKKERRGGYLGKTVQVIPHVTDRIKEFIKKDITNEDFVICEIGGTVGDIESLPFLEAIRQFSNDNGRSKSLFIHLTFVPFLKSSDEIKTKPTQHSVKELRSIGIQPDIVICRSQQSIPLDQRRKISLFCNVDIANVIETVDVKTIYEAPISFFNQKLDKQVLKFFKIKSRKRPNLLPWKKITNTVLKTKKTVNIAIIGKYVNLKDAYKSLDEALTHGGISNKV

SEQ ID NO: 195829 - protein, 280 aa, Unknown
  Bacterial polypetide isolated from the Sargasso Sea
LVGLKVTMLKLDPYINVDPGTMSPLQHGEVYVTADGTETDLDLGHYERFVKSCSNLTRNNNFTTGRIYADVIAKERRGDYLGATIQVIPHITDEIKLRIVEASQGFDVTLVEIGGTVGDIESQPFLEAARQLKFELGSTCALLMHLTLVPFIATAGETKTKPTQHSVKELRSIGLQPDILVVRSDHEIPKSAIDKIALFTNVEPSAVIPLTDSDTIYKIPVMLNDEGLDQIILKKFGLDAQLADLDDWKSVVQNQLKAENVVKLKMVGKYMDLSDAYKSL

SEQ ID NO: 195830 - protein, 145 aa, Unknown
  Bacterial polypetide isolated from the Sargasso Sea
MTKFIFITGGVVSSLGKGLTSASLGALLQSRGFTVRLRKLDPYLNVDPGTMSPFEHGEVFVTDDGAETDLDLGHYERFTGVAARSTDSISSGRIYSTVLEKERKGDYLGETIQVIPHVTNEIKSFLEKKEEEVDFMLCEIGGTIG

SEQ ID NO: 195831 - protein, 300 aa, Unknown
  Bacterial polypetide isolated from the Sargasso Sea
MARYIFVTGGVVSSLGKGLSSASLAYLLKSQGYKVRLRKMDPYLNVDPGTMSPFQHGEVFVTDDGAETDLDLGHYERFSNISAKKTDNITTGKIYSDIIKKERTGKYLGKTVQVIPHVTDRIKEFIKGDIKNEDFVICEIGGTVGDIESLPFVEAIRQFANDVGKKRSLFIHLTLVPFLKSSDEIKTKPTQHSVKELRSLGIQPDIVICRSQKSIPLDQRKKISLFCNVPIDNVIETVDVRTIYEAPISFHKEKLNRQVLKYFNIRPKKNANLTPWKRITNTVLNSKKIVNIAIIGKYVN

SEQ ID NO: 195832 - protein, 185 aa, Unknown
  Bacterial polypetide isolated from the Sargasso Sea
MARYIFVTGGVVSSLGKGLSSASLAYLLKSQGFKVRIRKMDPYLNVDPGTMSPFQHGEVFVTDDGSETDLDLGHYERFSNISTKKTDNITTGKIYSDIIKKERKGKYLGKTVQVIPHVTDRIKEFIKGDITNEDFVICEIGGTVGDIESLPFVEAIRQFSNDVGRKKSLFIHLTLVPFLKSSDEI

SEQ ID NO: 195833 - protein, 111 aa, Unknown
  Bacterial polypetide isolated from the Sargasso Sea
MHFVFITGGVASSLGKGIASASLATLLKSRKFKVRIRKLDPYLNVDPGTMSPYQHGEVYVTDDGAETDLDLGHYERFTNQSAKQSDSVSSGKIYSNVLLKERKGDYLGSTI

SEQ ID NO: 195834 - protein, 74 aa, Unknown
  Bacterial polypetide isolated from the Sargasso Sea
MHFVFITGGVASSLGKGLASASLASLLQLRKFKVRIRKLDPYLNVDPGTMSPYQHGEVFVTDDGAETDLDLGTL

SEQ ID NO: 195835 - protein, 93 aa, Unknown
  Bacterial polypetide isolated from the Sargasso Sea
LNNSLVKKIYNSRIIKERHRHRYEVNINFKNQFEKKGLIFSGNSPDKNLPEIIELKNHPWFIGVQFHPEFKSRPLSPHPLFSSFIKAAKNHKK

SEQ ID NO: 195836 - protein, 284 aa, Unknown
  Bacterial polypetide isolated from the Sargasso Sea
FTCVDAKRSDNVTTGRIYSDVIARERRGDYLGATIQVIPHITDAIKDFVIADIDKEDFVLCEIGGTVGDIEGLPFLEAIRQLGNEMGKERTMFVHLTLIPYLDAAGELKTKPTQHSVKELLNVGIQTDLLLCRTEREIPDSERKKVALFCNVREDAVVQALDVDTIYRVPINYHNAGLDEQVCKHFGLDKTLKPNLEDWKTIVRLSTKPEGAVKIGIIGKYTGLKDAYKSLSEALAHGGIANNVLVELKWIDAESFDDVEFSGELDDINGILVPGGFGERGSNG

SEQ ID NO: 195837 - protein, 83 aa, Unknown
  Bacterial polypetide isolated from the Sargasso Sea
MTKYIFVTGGVVSSLGKGIVSASIGRILKNKGIKVSIMKLDPYLNVDPGTMSPFQHGEVFVTADGSETDLDLGHYERFIDEEL

SEQ ID NO: 195838 - protein, 141 aa, Unknown
  Bacterial polypetide isolated from the Sargasso Sea
MAKTKYIFITGGVVSSLGKGIAAASIGALLEARGLKVSLLKLDPYINVDPGTMSPFQHGEVFVTNDGTETDLDLGHYERFVRFEASRKNNFTAGIVYESVIKNERKGKYLGGTVQVIPHITDEIKRRIKAGAAGSDVAIVE

SEQ ID NO: 195839 - protein, 177 aa, Unknown
  Bacterial polypetide isolated from the Sargasso Sea
MAKTKYIFITGGVVSSLGKGIAAASIGALLEARGLKVSLLKLDPYINVDPGTMSPFQHGEVFVTNDGTETDLDLGHYERFVRFEASKKNNFTAGIVYESVIKNERKGKYLGGTVQVIPHITDEIKRRIKAGAAGSDVAIVEIGGTIGDIESQPFVEAIRQMSLDLPSKSTSFVHLTL

SEQ ID NO: 195840 - protein, 279 aa, Unknown
  Bacterial polypetide isolated from the Sargasso Sea
LQLSDQKVSCVKIDPYLNYDAGTMNPIAHGEVFVTDDGGECDMDIGNYERFLNQDIPKSHNITTAQIYSSVIESERKGEYLGACVQIIPHVTDEIKNRIKKIATDEELEILVVECGGTVGDIESLPFLESLRQIRVEEGSENVMFVHVTLAPSLDVVGEQKTKPTQHSVQELRRIGIQPDLLCVRCTSPLQDKTRNKISMFTNVTNNDVFSCHDVDSIFQVPEVLYDQGLVDVIFKKFNKMGYVNASQNWDVWNKIVNSLHNEGESINIAMVGKVCHIS

SEQ ID NO: 195841 - protein, 296 aa, Unknown
  Bacterial polypetide isolated from the Sargasso Sea
SASLGALLISRGYTVRLKKLDPYLNVDPGTMSPFEHGEVYVTDDGAETDLDLGHYERFTGVAAKASDSVSSGKIYSSVLEKERKGDYLGKTIQVIPHVTDEIKKFINQGDDKIDFMLCEIGGTVGDIEGLPFFEAIRQLGQEKDNNGCLFIHLTLLPYIKASGELKTKPTQHSVKELRSIGLTPDILICRTEIEIPEKEKEKLALFCNVKPKNVIPAIDLRSIYEAPLSFHQSGLDTAVLNVLDIKPLDDPNLSLWKDVKRRITSPEGEVRIAIVGKYTQLEDAYKSISEALTQSG

SEQ ID NO: 195842 - protein, 192 aa, Unknown
  Bacterial polypetide isolated from the Sargasso Sea
MARYIFVTGGVVSSLGKGLSSASLAYLLQSRGYKVRIRKLDPYLNVDPGTMSPFQHGEVFVTDDGAETDLDLGHYERFSGISAKKSDNITTGKIYSDVLKRERQGKYLGKTVQVIPHITNRIKEFIKNDVAKEDFVICEIGGTVGDIESLPFLEAIRQFSNEIGKKNTLFIHLTLVPYMKASDEIKTKPTQH

SEQ ID NO: 195843 - protein, 147 aa, Unknown
  Bacterial polypetide isolated from the Sargasso Sea
MKTKYIFVTGGVVSSLGKGVAAASIGLILKSRGFKVTLMKLDPYVNVDPGTMSPYQHGEVYVTDDGAETDLDLGHYERFTHTITTKHHNYTTGKIYDAVLKKERRGDYLGKTVQVIPHITDEIKAAMRRLGNGHDVVIVEIGGTVGD

SEQ ID NO: 195844 - protein, 98 aa, Unknown
  Bacterial polypetide isolated from the Sargasso Sea
SYDAKLQKNSKIRKIYKSRLIKERHRHRYEVNIAYREKFEKKGMIFSGLSPDNQLPEIIELKNHPWFIGVQFHPEFKSRPLSPHPLFSSFIKAAKNHK

SEQ ID NO: 195845 - protein, 311 aa, Unknown
  Bacterial polypetide isolated from the Sargasso Sea
MARYVFVTGGVVSSLGKGLSSASLGSLLQLRGFKVRVRKLDPYLNVDPGTMNPFQHGEVFVTDDGAETDLDIGHYERFTGISATQSDNITTGGIYSDIIQKERRGDYLGGTVQVVPHVTDRIKKFIHQDIKNEDFIICEIGGTVGDIESLPFLEAIRQFSNDVGKKNSLFIHLTLVPFLKASGELKTKPTQHSVKELRSLGIQPDIIICRSEREIPKTERKKISLFCNVPINNVIETVDVKTIYEAPISFHKEKLDERVLSYFNIKSKKSPDLSKWKNITSRVLNPKKDVNIGIIGKYVDLKDAYKSLDEA

SEQ ID NO: 195846 - protein, 306 aa, Unknown
  Bacterial polypetide isolated from the Sargasso Sea
ERLFRTRMTKRNNFTTGRVYEEVLKRERRGDYLGATIQVIPHITNEIKRRVIEGAEGHDVAIVEVGGTVGDIESQPFLEAIRQLGTEVGRERAMFMHLTLVPYMPASGEVKTKPTQHSVKELRSIGIQPDILVCRSVGALPASERSKIALFTNVADKAVISLKDVDSIYRIPAALKAQGMDQLVVDRFGLECEEADLSEWEQVLYAESNPTAEVNIGMVGKYVELPDAYKSVNEALKHAGLKNRLTVNIHHIDSQDVESKGTQILEQLDAILVPGGFGERGIEGKIDAARYARENKVPYLGICLGM

SEQ ID NO: 195847 - protein, 210 aa, Unknown
  Bacterial polypetide isolated from the Sargasso Sea
MHYVFITGGVASSLGKGIASAAIATLLKSRKFKVRIRKLDPYLNVDPGTMSPYQHGEVYVTDDGAETDLDLGHYERFTNQSAKKSDSISSGKIYSNVLNKERKGVYLGATIQVIPHVTNEIKNFINSDLNKEDIVIYEIGGTVGDIESLPFLEAIRQIRNNRNISSALIHMTYIPYLSSAGELKTKPTQHSVKELLNAGIQPDIIMCRSE

SEQ ID NO: 195848 - protein, 193 aa, Unknown
  Bacterial polypetide isolated from the Sargasso Sea
MARYIFVTGGVVSSLGKGLSSASLASLLQLRGYKVRVRKLDPYLNVDPGTMNPFQHGEVFVTDDGAETDLDIGHYERFTGISATQSDNITTGGIYSHIITKERKGDYLGGTVQVVPHVTDRIKKFISHKVKDEDFIICEIGGTVGDIESLPFLEAIRQFSNDIGKKNSLFIHLTLVPYLKASGELKTKPTQHS

SEQ ID NO: 195849 - protein, 264 aa, Unknown
  Bacterial polypetide isolated from the Sargasso Sea
MNEDFVICEIGGTVGDIESLPFLEAIRQFSNEIGKNKTMFIHLTLVPFLKSSDEIKTKPTQHSVKELRSIGIQPDIVICRSQQSIPFDQRKKISLFCNVPIHNVIETVDVRTIYEAPISFYNEKLDKQVLKYFKLKPKKKVNLQNWKKITKTVLNTKRTVNIAIIGKYVNLKDAYKSLDEALIHGGIKNNVKVNLIRFESDKIKKNQIKKIFKNVSGLLIPGGFGKRGTDGKIAAINYARKNKIPFLGICFGMQMAIVEFQKMY

SEQ ID NO: 195850 - protein, 206 aa, Unknown
  Bacterial polypetide isolated from the Sargasso Sea
KKVLKNSDAILVPGGFGNRGIEGMILAARFARENKVPYFGICLGLQIAIIEMARNLLTLKDANSTEFKPRTINKVISLVTEWKNKDGTIEKRNKDSEKGGTMRLGAQKASLLKGSLARSLYKNKTIFERHRHRYEVNPDYVPTLESKGLIVSARSEVHNLVEMIELKNHPWFLGCQFHPEFTSKPKTGHPLFNDFIKTAVKLKDKK

SEQ ID NO: 195851 - protein, 196 aa, Unknown
  Bacterial polypetide isolated from the Sargasso Sea
MARYIFVTGGVVSSLGKGLSSASLAYLLQSRGYKIRIRKLDPYLNVDPGTMSPFQHGEVYVTNDGAETDLDLGHYERFSGISAKKSDNITTGKIYNDVLKRERQGKYLGKTVQVIPHITNRIKEFIKNDVSKEDFVICEIGGTVGDIESLPFLEAIRQFSNEIGRNNTLFIHLTLVPYMKASDEIKTKPTQHSVKE

SEQ ID NO: 195852 - protein, 177 aa, Unknown
  Bacterial polypetide isolated from the Sargasso Sea
KIEAIKHARMNKIPFLGICYGMQMAIIEFARNQLNLKNATSSEFDKKGLPIIGLLNEWSKDGKTIKGTDKDLGGTMRLGSYDAKLQNNTKIRKIYNSKLIKERHRHRYEVNIAYREKFEKKGMIFSGLSPDNQLPEIIELKNHPWFIGVQFHPEFKSRPLSPHPLFSSFIKAAKNHK

SEQ ID NO: 195853 - protein, 100 aa, Unknown
  Bacterial polypetide isolated from the Sargasso Sea
RLGSYDAKLQNNTKIRKIYKSKLIKERHRHRYEVNIAYREKFEKKGMIFSGLSPDNQLPEIIELKNHPWFIGVQFHPEFKSRPLSPHPLFSSFIKAAKNH

SEQ ID NO: 195854 - protein, 82 aa, Unknown
  Bacterial polypetide isolated from the Sargasso Sea
IYNQQLISERHRHRYEVNKKFISKFNNKGYYFSGMSPDGLLPEVLESKNHKWFIGVQYHPELKSRPLKPHPLFVSFIKNCKK

SEQ ID NO: 195855 - protein, 135 aa, Unknown
  Bacterial polypetide isolated from the Sargasso Sea
EFDKKGLPIIGLMNQWDKDGKKIKGTDKSLGGTMRLGSYDAKLMKHSLIQKIYGKNLIKERHRHRYEVNIDFKEKFEKNGMNFSGLSPDGKLPEIVELKNHPWFIGVQFHPEFKSRPLAPHPLFSSFIKASKNHR

SEQ ID NO: 195856 - protein, 48 aa, Unknown
  Bacterial polypetide isolated from the Sargasso Sea
MARYIFVTGGVVSSLGKGLSSASLAYLLQSRGYKVRLRKLDPYLNVDP

SEQ ID NO: 195857 - protein, 199 aa, Unknown
  Bacterial polypetide isolated from the Sargasso Sea
MTRYIFVTGGVVSSLGKGLSSASLAYLLQSRGYKVRIRKLDPYLNVDPGTMSPFQHGEVFVTDDGAETDLDLGHYERFSGISARKSDNITTGKIYNDVLKRERQGKYLGKTVQVIPHITNRIKEFIKNDVAKEDFVICEIGGTVGDIESLPFLEAIRQFSNEVSKKNTLFIHLTLVPYMKASDEIKTKPTQHSVKELRS

SEQ ID NO: 195858 - protein, 102 aa, Unknown
  Bacterial polypetide isolated from the Sargasso Sea
VYPCRLTNNTTGKNLYDEHVIYERHRHRYEFNNYYKQSFLNSGYKISGTSPDGRLVELIELENHPYFLACQYHPEFLSRPGKPHPLFKGLIKASQEKLTQSN

SEQ ID NO: 195859 - protein, 68 aa, Unknown
  Bacterial polypetide isolated from the Sargasso Sea
MTRYIFITGGVVSSLGKGIASASLGAILEARGLNVTLLKLDPYINVDPGTMSPFQHGEVYVTEDGTET

SEQ ID NO: 195860 - protein, 278 aa, Unknown
  Bacterial polypetide isolated from the Sargasso Sea
KKERRGDYLGGTVQVVPHVSDRIKKFISHNVKNEDFIICEIGGTVGDIESLPFLEAIRQFSNDTGKKNSLFIHLTLVPYLKASGELKTKPTQHSVKELRSLGIQPDIIICRSEREIPKIERKKISLFCNVPIANVIETVDVKTIYEAPISFHKEKLDERVLSYFNIKNKKKPNLSRWKNITSKVLNPKTDVNIGIIGKYINLKDAYKSLDEALIHGGISNNVRVKLERIDSEHLDPKKIKPLLKNISGVLIPGGFGKRGTEGKIAAIKYARLNNIPFF

SEQ ID NO: 195861 - protein, 180 aa, Unknown
  Bacterial polypetide isolated from the Sargasso Sea
MTRFIFVTGGVVSSLGKGLASASLASLLQHHGYKVRIRKLDPYLNVDPGTMSPYQHGEVYVTDDGAETDLDLGHYERFTGVVSKKSDNITSGRVYQKIITRERKGEYLGATVQVIPHVTNEIKEFISNDLEQEDFVICEIGGTIGDIESLPFIEAIRQFHNDNGHENSLFIHVTLVPYIA

SEQ ID NO: 195862 - protein, 151 aa, Unknown
  Bacterial polypetide isolated from the Sargasso Sea
MARYVFVTGGVVSSLGKGLSSASLASLLQLRGFKVRVRKLDPYLNVDPGTMNPFQHGEVFVTDDGAETDLDIGHYERFTGISATQSDNITTGGIYSDIIQKERRGDYLGGTVQVVPHVTDRIKKFISQDVKKEDFVICEIGGTVGDIESLP

SEQ ID NO: 195863 - protein, 309 aa, Unknown
  Bacterial polypetide isolated from the Sargasso Sea
IIKKERRGGYHGKTVQVIPHITDIIKDFIKKDISNEDFVICEIGGTVGDIESLPFLEAIRQFSNDNGRSKSLFIHLTFVPFLKSSDEIKTKPTQHSVKELRSIGIQPDIVICRSQQSIPLDQRRKISLFCNVDIANVIETVDVKTIYEAPISFFNQKLDKQVLKFFKIKSRKRPNLLPWKKITNIVLKTKRTVNIAIIGKYVNLKDAYKSLDEALTHGGISNKVKVKVVRIESDKLKSKEIKSKLKNVSGILIPGGFGKRGTEGKIEAIKYARERKIPFLGICFGMQMAMIEFARNILKIKKAGSSELD

SEQ ID NO: 195864 - protein, 221 aa, Unknown
  Bacterial polypetide isolated from the Sargasso Sea
YLGATIQVIPHITDEIKKRIKLVNDKNKYDVVICEVGGTVGDIESLPFMESIRQMSVEVGYHNHLIVHVTLVPYIQASEELKTKPTQHSVMKLREIGLSPDIIMCRSNYTLTESVAEKIALFCNVPKSHVIEGKEVKSIYEVPLVFDKQKMGQIIMNRLELDGQPQVTKLNNFISKYKNPSKEVNIAMCGKYTELPDAYKSVLEAFIHADVENDTRVKVSW

SEQ ID NO: 195865 - protein, 215 aa, Unknown
  Bacterial polypetide isolated from the Sargasso Sea
RIDSENLRPENIKPLLKEVTGVLIPGGFGKRGTEGKIAAIKYARLNNIPFFGICFGMQMAVIEAARNLLNIKNASTSEFGNNCTPVVGLLEEWQKGKKKIKGTKENLGGTMRLGLYDAVLKDNSLISKIYSEKKIKERHRHRYEVNIKYKNDFEKKGLIFSALSPDGTLPEIIELKNHPWFVGVQFHPEFRSRPFTPHPLFSSFIKAAGVNGRKD

SEQ ID NO: 195866 - protein, 223 aa, Unknown
  Bacterial polypetide isolated from the Sargasso Sea
SKGVEIVYIESEDIQENGTDCLSKMDAILIPGGFGDRGIEGMIQSIEYARKNDIPFLGICLGMQAAVIEYARNVLDHKDANSTEFNSSTSAPVIAMITEWMNDDGSKENRDENSDLGGTMRLGAQECLFTKGTKAKDIYGADSVVERHRHRYEFNNRYREELEKNGLVFSGFSKDGLAEMIEIKDHPWFIGCQFHPEFTSSPLAGHPLFYSFIKAAVEYSKKD

SEQ ID NO: 195867 - protein, 309 aa, Unknown
  Bacterial polypetide isolated from the Sargasso Sea
KRKIALFTNVEARAVVVCKDAKTIYQIPRNFSEQKVDDLICERFGFNDLPEADLEDWDNVVEALLNPEYTVRVAMVGKYVELPDAYKSVNEALLHAGIQNRVKVQIDYVNAEDLEQQDINVLSTADAILVPGGFGERGTEGKMRAIQYARENKIPFLGICLGMQLAVIEYARNVAGIPEASSTEFNRSTKSPLIGLITEWLDERGELQQRSLESDLGGTMRLGAQKSELVEGTKTREVYGKAEITERHRHRYEMNDRFIPTLEEAGMKISGYSSVQHLVETVEIPEHPWFIAVQFHPEFTSSPRDGHPL

SEQ ID NO: 195868 - protein, 137 aa, Unknown
  Bacterial polypetide isolated from the Sargasso Sea
EFDKKGISIIGLMNEWNKEGKKIKGTDKDLGGTMRLGSYHAKLKDNSLVKKIYKSKTIKERHRHRYEVNISYKEKFEKKGLIFSGISPDNKLPEIIELKNHPWFIGVQFHPEFKSRPFNPHPLFSSFIKAAKKRYAK

SEQ ID NO: 195869 - protein, 141 aa, Unknown
  Bacterial polypetide isolated from the Sargasso Sea
MSKFVFVTGGVVSSIGKGIVAASLGRLLKSRGYSVSILKLDPYLNVDPGTMSPFQHGEVFVTEDGAETDLDLGHYERFTDTAMTRLNSVTTGSIYQAVINKERRGNYDGGTVQVIPHITREIRERIHRVAANSNADIIITE

SEQ ID NO: 195870 - protein, 242 aa, Unknown
  Bacterial polypetide isolated from the Sargasso Sea
CGKYTELIDSYKSVLESFVHAGVENNTRVNIKWVKTEKIIDDKTARRQFKNVDGILILPGFGSRGGEGKIMSSKYARENNIPFLGICLGMQCAIIDFARNVCGLEGANSTEFNKRTKHPVIDLMESQRAIKIKGGTMRLGAYDCNIKPGTKAFAAYRSKNVSERHRHRFEVNNRYRRKLQKEGLIISGVNEDLGVVETIEIADHPWFVAGQFHPELKSRVNKSHPLFREFIKASKKYNKRRS

SEQ ID NO: 195871 - protein, 305 aa, Unknown
  Bacterial polypetide isolated from the Sargasso Sea
VGDIESLPFLEAIRQFRHDQGKEHTLFVHLTLIVQTSEMKTKPTQHSVGKLREIGIQPDILICRTPEILSEKLRSKISLFTNVPEDSVVNGLDVESVYEVPLMFHQQNLDNIIMTYLQMWTGSPKLQPWIDLIEKYNNPQDEVEIAFIGKYVAHLDSYESLKEALIHGGIANRLKVKLHYIDSEFLTPENAFEKLKKMDGVLVAPGFGERGMEGKVIAIQIARKGNIPFFGICLGMQMAIVEFARNVIGIAGANSGESRPGHEENVIDLMPEQEGHLETGGTMRLGSQNTVLEKGSRIARMYNKT

SEQ ID NO: 195872 - protein, 120 aa, Unknown
  Bacterial polypetide isolated from the Sargasso Sea
KEVRDENSDLGGTMRLGAQKCLLEPGSIAQKCYCSSEIFERHRHRYEFNNNYLELLSEAGLKFVGKSSDGMLVEVVEIPNHPWFVGCQFHPEFTSKPIEGHPLFTGFINAAITDDESKSI

SEQ ID NO: 195873 - protein, 287 aa, Unknown
  Bacterial polypetide isolated from the Sargasso Sea
KTKPTQHSVKELLNAGIQPDIIMCRSEKNIDKDALEKISLFCNVKKESVIPAMNASSIYEVPSLYYKAGLDTSLLNHFGYKKSDYNLDLKPWKKVLKKIKNPVHNVKIGVVGKYTNLKDSYKSLNEALIHGGIANNAKVDIKWINSEEKNNKNIIKELNNLEGILIPGGFGYRGIEGKIAAIKFAREKNIPFFGICLGMQLAVIEIARNVLGLKKANSTEFVDTKFPVVGLMTEWLNKNKIEKRNKNSDKGGTMRLGAYKAILKKGSKINKIYNKNHISERHRHRYE

SEQ ID NO: 195874 - protein, 171 aa, Unknown
  Bacterial polypetide isolated from the Sargasso Sea
NYARKRKIPFLGICFGMQMAVIEFARNALNIKKAGSSELDKKCYPVIGLLNEWNKNGKILKGTNKDLGGTMRLGLYEAKLRHNSLIEKIYKSKSIFERHRHRYEVNIKLQNQFEKKGMIFSGISPDNKLPEIIELKNHPWFVGVQFHPEFKSRPLKPHPLFSSFIKAAKLY

SEQ ID NO: 195875 - protein, 314 aa, Unknown
  Bacterial polypetide isolated from the Sargasso Sea
WVTIQVIPHVTDEIKLFIESNFEDEDIIIYEIGGTVGDIESLPFLEAIRQIRNNKNIQSALIHMTYVPYLSSAGELKTKPTQHSVKELLNSGIQPDIIMCRCEKEINEESLEKISQFCNVKKDSVIPALNANSIYEVPSIYSKAGLDKVLLEHLGYETSKHPLNLEAWDDLIGKINKLKKEVIIGVVGKYTNLKDSYKSLIEALTHGGIENNVNVKIKWINAEKIETNKLLGELQGVDGILIPGGFGYRGVEGKIQAIKYAREKDIPFFGICLGMQLSVIEIARNVIGLKDSNSTEFKSTTNPVVSLMTEWSNK

SEQ ID NO: 195876 - protein, 271 aa, Unknown
  Bacterial polypetide isolated from the Sargasso Sea
DLGHYERFTNISSKQSDNITTGRIYSDVIKKERKGGYLGKTVQVIPHITNRIKEFIKKDITNEDFVICEIGGTVGDIESLPFVEAIRQFSNEHGKSKTLFIHLTFVPFLKSSDEIKTKPTQHSVKELRSIGIQPDIIICRSQQSIPLDQRKKISLFCNVPIDNVIETVDVRTIYEAPISFYNQKLDKQVLKFFKLKPKKKPDLSPWKKITNIVLNAKKSVNIAIIGKYVNLKDAYKSLDEALVHGGIANNVKVNLVRIESDSLKNNEIKTK

SEQ ID NO: 195877 - protein, 154 aa, Unknown
  Bacterial polypetide isolated from the Sargasso Sea
MARYVFVTGGVVSSLGKGLSSASLASLLQLRGFKVRVRKLDPYLNVDPGTMNPFQHGEVFVTDDGAETDLDIGHYERFTGISATQSDNITTGGIYSDIIQKERRGDYLGGTVQVVPHVTDKIKKFISQDIKNEDFVICEIGGTVGDIESLPFLE

SEQ ID NO: 195878 - protein, 306 aa, Unknown
  Bacterial polypetide isolated from the Sargasso Sea
MGEVFVTDDGAETDLDLGHYERFTNISAKQSDNITTGKIYSDIIKKERKGKYLGKTVQVIPHVTDRIKEFIKNDITNEDFVICEIGGTVGDIESLPFVEAIRQFSNEVGKNKTLFIHLTLVPYLKSSDEIKTKPTQHSVKELRSLGIQPDIVICRSQHSIPIDQRKKISLFCNVPIDNVIETVDVKTIYEAPISFSNEKLDKQVLKFFKLKPKKKVNLSPWKNITKIVINTSKSVNIAIIGKYVNLKDAYKSLDEALIHGGISNKIKVNLTRIESDKLKPKEIANKLKNVSGILIPGGFGKKEQKE

SEQ ID NO: 195879 - protein, 169 aa, Unknown
  Bacterial polypetide isolated from the Sargasso Sea
MKNNNKTKYIFVLGGVMSGLGKGIAASSVGYLLKSAGLNVTILKLDPYLNVDPGTMNPYQHGEVYVLDDGSETDLDLGHYERFIDVGMNKNNNATAGQIYSTVLEKERKGEYLGDTVQVIPHITDEIIRKIKLVNKSNKYELVICEVGGTVGDIESLPFMEAIRQLSLE

SEQ ID NO: 195880 - protein, 221 aa, Unknown
  Bacterial polypetide isolated from the Sargasso Sea
YSDIIKKERRGGYLGKTVQVIPHVTDRIKEFIKKDITNEDFVICEIGGTVGDIESLPFLEAIRQFSNDNGRSKSLFIHLTFVPFLKSSDEIKTKPTQHSVKELRSIGIQPDIVICRSQQSIPLDQRRKISLFCNVDIANVIETVDVKTIYEAPISFFNQKLDKQVLKFFKIKSRKRPNLLPWKKITNIVLKTKRTVNIAIIGKYVNLKDAYKSLDEALTHG

SEQ ID NO: 195881 - protein, 225 aa, Unknown
  Bacterial polypetide isolated from the Sargasso Sea
MTHAGVANEVKVNIITIHSESIDDSNLNELLINLNGIIVAPGFGERGIEGKIKAIKYSRENHVPFLGICLGMQMAVIEYARNVLKLEDVNSTEMKEDCKNPIISLMENQKSIVNKGGTMRLGAWDCQLLKNSKTEKIYNKKVISERHRHRYELNNKYLDQLNKGDLIPSGINPETNLVEIIEHKEHPWFIGVQFHPEYSSTVLEPHPLFKSFINSSIENLKNNNN

SEQ ID NO: 195882 - protein, 227 aa, Unknown
  Bacterial polypetide isolated from the Sargasso Sea
MARYIFVTGGVVSSLGKGLSSASLAYLLQSRGYKVRIRKLDPYLNVDPGTMSPFQHGEVFVTDDGAETDLDLGHYERFSGISAKKSDNITTGKIYNDVLKREREGKYLGKTVQVIPHITNRIKEFIKNDVTKEDFVICEIGGTVGDIESLPFLEAIRQFSNEIGRKNTLFIHLTLVPYMRASDEIKTKPTQHSVKELRSIGIQPDIIICRSERSIPLDQRKKDFSFL

SEQ ID NO: 195883 - protein, 155 aa, Unknown
  Bacterial polypetide isolated from the Sargasso Sea
MARYIFVTGGVVSSLGKGLSSASLAYLLKSQGYKVRLRKMDPYLNVDPGTMSPFQHGEVFVTDDGAETDLDLGHYERFTNISSRQSDNITTGRIYSDVIKKERKGGYLGKTVQVIPHITNRIKEFIKKDITNEDFVICEIGGTVGDIESLPFVKL

SEQ ID NO: 195884 - protein, 207 aa, Unknown
  Bacterial polypetide isolated from the Sargasso Sea
KLKVNQIRKKLKNVSGLLIPGGFGKRGTEGKISAIKYARENKIPFLGICFGMQMAIVEFARNKLKIKKAGSSELDKNCYPVIGLINEWDKNGKIIKGTDKELGGTMRLGLYEAKLRNNSAIKKIYKSNSIKERHRHRYEVNNNLKNEFERKGLVFSGMSPDNNLPEIIELKNHPWFIGVQFHPEFKSRPLTPHPLFSSFIKAAKNHK

SEQ ID NO: 195885 - protein, 170 aa, Unknown
  Bacterial polypetide isolated from the Sargasso Sea
NRPYFGICLGMQIAIIEFSRNVLKLKNANSTEFNSKTKYPVIGLVTEWKDASGKIEHRNEKSNLGGTMRLGGQKCLIKKSSLSHKLYKKLTITERHRHRYEVNPEFKNKLVAGGMDIVGTSLDGNLAEMIEIKKHPWFLGCQFHPEFTSNPRDGHPIFNDFIAKAIKIKR

SEQ ID NO: 195886 - protein, 159 aa, Unknown
  Bacterial polypetide isolated from the Sargasso Sea
LSLCLGMQCAVIEWARNVANLPDASSSELDPNTPNPVIHLLPEQEDVVDLGGTMRLGVYPCRLTKNTTGKNLYNEDVIYERHRHRYEFNNYYKQSFLDSGYKISGTSPDGRLVELIELENHPYFLACQYHPEFLSRPGKPHPLFKGLIKASQDKLTQSN

SEQ ID NO: 195887 - protein, 290 aa, Unknown
  Bacterial polypetide isolated from the Sargasso Sea
MSKYIFITGGVVSSLGKGLTSAALGALLQSRGYSVRLKKLDPYLNVDPGTMSPFEHGEVFVTDDGAETDLDLGHYERFTGVSARKTDSISSGRIYSNVLEKERRGDYLGKTIQVIPHVTDEIKLFLSVGEEEIDFMLCEIGGTVGDIEGLPFFEAIRQFSQDQENECIFIHLTLIPFVSASGELKTKPTQHSVKELRSIGITPNILVCRSDRFIPEKERNKLALFCNVKKESVIAAPDLKSIYEAPLAYNKEKLDHAVLDAFKILSAKSPNLKIWQEVADRIYNPEGEVH

SEQ ID NO: 195888 - protein, 240 aa, Unknown
  Bacterial polypetide isolated from the Sargasso Sea
MEIFTSRVLNPKKDVNIGIIGKYVDLKDAYKSLDEALIHGGISNNVKVNLKRIDSENLKPENIKSLLKDVTGVLIPGGFGKRGTEGKIAAIKYARLNNIPFFGICFGMQMAVIEAARNLLNIKNASTSEFGNNCTPVVGLLEEWQKGKKTIKGTKKNLGGTMRLGLYDAVLKNNSLISKIYSEKKIKERHRHRYEVNIKYKNDFEKKGLIFSALSPDGTLPEIIELKNHPWFVGVQFHPE

SEQ ID NO: 195889 - protein, 147 aa, Unknown
  Bacterial polypetide isolated from the Sargasso Sea
LNIKNASTSEFSNNCTPVVGLLEEWQKGKRKIKGTEKNLGGTMRLGLYDAVLKNNSLISKIYSEKRIRERHRHRYEVNIEYKDDFEKKGLVFSAMSPDGLLPEIIELKNHPWFVGVQFHPEFKSRPFTPHPLFSSFVKAVETKGSGN

SEQ ID NO: 195890 - protein, 122 aa, Unknown
  Bacterial polypetide isolated from the Sargasso Sea
MTEWIKGNKIEKRSKNSNKGGTMRLGSYKAKLKKNSKIYTIYNRQLISERHRHRYEVNKKFISKFNNKGYYFSGMSPDGLLPEVLESKNHKWFIGVQYHPELKSRPLKPHPLFVSFIKNCKK

SEQ ID NO: 195891 - protein, 248 aa, Unknown
  Bacterial polypetide isolated from the Sargasso Sea
QLIHNLRNPGAPIKVALVGKYIELGDAYLSVVEALRHACIEQKALLDLHWVSAEMIEKNSSETYLNEVDAIVVPGGFGNRGVNGKISAIKFARENKIPFLGLCLGMQCAVIEWARNVANLPDASSSELDPNTPNPVIHLLPEQEDVVDLGGTMRLGVYPCRLTKNTTGKNLYDEDVIYERHRHRYEFNNYYKQSFLDSGYKISGTSPDGRLVELIELENHPYFLACQYHPEFLSRPGKPHPLFKGLIK

SEQ ID NO: 195892 - protein, 110 aa, Unknown
  Bacterial polypetide isolated from the Sargasso Sea
DSDLGGTMRLGGQTCILKKGSNVFKMYKKEEIVERHRHRYEVNPEFRDGFNTKGMNIVGTSVDDMLVEMIEVKNHPWFLGCQFHPEFTSNPRDGHPIFNSFISSTIKTKK

SEQ ID NO: 195893 - protein, 155 aa, Unknown
  Bacterial polypetide isolated from the Sargasso Sea
QMAIIEFARNQLNIKNATSSEFSSKGTPIVGLITEWNKDGKIIKGTKKELGGTMRLGLYEAKLKDDSLIKKIYCSKFIKERHRHRYEVNINYKDKFEKKGMIFSALSPDKNLPEIIELKNHPWFIGVQFHPEFKSRPLAPHPLFSSFIKAAKNHR

SEQ ID NO: 195894 - protein, 281 aa, Unknown
  Bacterial polypetide isolated from the Sargasso Sea
EKSKNDVNRNDVAYIHVTLLPFIKTSGEIKTKPTQHSVKELRSIGIQPDLLVCRSDKSINEGLKKKLSGFCGVNINSVIEALDADSIYSVPLSLKKEGLCKETLKYLELEDKKCDLKNWEELIHNLRNPGAPIKVALVGKYIELGDAYLSVVEALRHACIEHKALLDLHWVSAEMIEKNSAETYLNEVDAIVVPGGFGNRGVNGKISAIKFARENKIPFLGLCLGMQCAVIEWARNVANLPDASSSELDPNTPNPVIHLLPEQEDVIDLGGTMRLGVYPCR

SEQ ID NO: 195895 - protein, 266 aa, Unknown
  Bacterial polypetide isolated from the Sargasso Sea
MQYVFITGGVASSLGKGIASAAVASLLQQRNFKVRIRKLDPYLNVDPGTMSPYQHGEVFVTDDGAETDLDLGHYERFTNRSAKKTDSTSSGKIYSNVLKKERKGDYLGATIQVIPHVTDEIKLFINSNFEDEDIIIYEIGGTVGDIESLPFLEAIRQIRNDKKISSALIHMTYVPYLSSAGELKTKPTQHSVKELLNSGIQPDIIMCRCEKEINQESLEKISQFCNVKKDSVIPALNANSIYEVPSIYSKAGLDKVLLEHLGYDVS

SEQ ID NO: 195896 - protein, 116 aa, Unknown
  Bacterial polypetide isolated from the Sargasso Sea
MAKTKYIFITGGVVSSLGKGIAAASIGALLEARGLSVSLIKVDPYINVDPGTMSPFQHGEVFVTNDGTETDLDLGHYERFVRFQASRKNNFTLKYGSRTWCSTCHARLKARAIPSN

SEQ ID NO: 195897 - protein, 305 aa, Unknown
  Bacterial polypetide isolated from the Sargasso Sea
DLGHYERFSGISAKKSDNITTGKIYSDVLKRERQGKYLGKTVQVIPHITNRIKEFIKNDVAKEDFVICEIGGTVGDIESLPFLEAIRQYSNEIGRKNTLFIHLTLVPYMKASDEIKTKPTQHSVKELRSIGIQPDIIICRSERTIPLDQRKKISLFCNVAIEDVIETVDVKTIYEAPISFNKEKLDERVLKFFKIKSRKKVNLLPWKRITNLVLKTKNKVNIAIIGKYVELKDAYKSLDEALTHGGIANNLKVNLVRIESDFLRPIEIKNKLKNVSGILIPGGFGKRGTEGKIAAINYARKNKIP

SEQ ID NO: 195898 - protein, 166 aa, Unknown
  Bacterial polypetide isolated from the Sargasso Sea
MARYIFVTGGVVSSLGKGLSSASLAYLLQSRGYKVRLRKLDPYLNVDPGTMSPFQHGEVFVTEDGAETDLDLGHYERFSGVSAKRSDNITTGKIYNDVLSKERKGKYLGKTVQVIPHITDRIKEFIKNESSKEDFIICEIGGIVGDIESLPFIEAIRQLANDVGKK

SEQ ID NO: 195899 - protein, 293 aa, Unknown
  Bacterial polypetide isolated from the Sargasso Sea
QHSVKELRSIGIQPDILLCRADREIEEPERRKIALFTNVEERAVITAYDASTIYKIPMLLHQEGLDDIVTEKLGLEASPADLSPWVSLVDSLENPSDSIDVAMVGKYVDLTESYKSLSEALVHASIHTNTKVNIHYVDSEQVGMGGEADLRKMDAILVPGGFGERGIEGKVSAVRLARENGIPFLGICLGMQAAVIEFARHEVGLQDAHSTEFDARTQHPVIALITEWTTPEGAVEIRTDESDVGGSMRLGAQPCKLARGSFVAEAYKSELIRERHRHRYEFNNTYTMELEAA

SEQ ID NO: 195900 - protein, 260 aa, Unknown
  Bacterial polypetide isolated from the Sargasso Sea
VPIDNVIETVDVRTIYEAPISFFNQKLDKQVLKYFKLRSKKRANLSPWKRITNITLNTKKSINIAIIGKYVNLKDAYKSLDEALIHGGISNKVKVNLVRIESDKLKANQIKKELKNISGLLIPGGFGKRGTEGKISAIRYARENKIPFLGICFGMQMATIEFARNVLKIKKAGSSELDKNCFPVIGLINEWDKDGKVIKGTDKNLGGTMRLGLYEAKLRNNSAIKMIYKTSSINERHRHRYEVNINLKEEFEKNGLIFSG

SEQ ID NO: 195901 - protein, 189 aa, Unknown
  Bacterial polypetide isolated from the Sargasso Sea
NTWGFGKRGTEGKISAIKYARENKIPFLGICFGMQMAIIEFARSKLKLKKAGSSELDKNCYPVIGLINEWDKDGKIIKGTDKNLGGTMRLGLYEAKLRNNSAIKRIYKSNSIKERHRHRYEVNNNLKNEFERKGLIFSGMSPDNSLPEIIELKNHPWFIGVQFHPEFKSRPLSPHPLFSSFIKAAKNHK

SEQ ID NO: 195902 - protein, 226 aa, Unknown
  Bacterial polypetide isolated from the Sargasso Sea
MAKFVFITGGVVSSIGKGIVAASLGRLLKSRGYNVSILKLDPYLNVDPGTMSPIQHGEVFVTEDGAETDLDLGHYERFTDTAMSRLNSVTTGSIYQAVINKERRGDYNGGTVQVIPHITGEIRERIHRVAANSNADVVITEIGGTVGDIESLPFLEAIREFRGDVGRRDLAYIHVTLLPFIGTSGELKTKPTQHSVKELRSIGIQPDVLVCRSDRKLGEEMKAQIG

SEQ ID NO: 195903 - protein, 291 aa, Unknown
  Bacterial polypetide isolated from the Sargasso Sea
QHSVKELRSIGIQPDIVICRSQQSIPLDQRRKISLFCNVDIANVIETVDVKTIYEAPISFFNQKLDRQVLKFFKIKSRKKPNLLPWKKITNIVLKTKRTVNIAIIGKYVNLKDAYKSLDEALTHGGISNKVKVNLVRIESDKLRSKDIKSKLKNVSGILIPGGFGKRGTEGKIEAIRYARERKVPFLGICFGMQMAMIEFARNILKIEKAGSSELDQNCFPVIGLIDEWNKDGKIIKGTDKNLGGTMRLGIYEAKLRNNSAIKNIYKSNMIKERHRHRYEVNINLMQKFEK

SEQ ID NO: 195904 - protein, 105 aa, Unknown
  Bacterial polypetide isolated from the Sargasso Sea
MARYIFVTGGVVSSLGKGLSSASLAYLLKSQGYKVRIRKMDPYLNVDPGTMSPFQHGEVFVTDDGAETDLDLGHYERFTNISAKKSDNITTGKIYSDIIKKERKG

SEQ ID NO: 195905 - protein, 260 aa, Unknown
  Bacterial polypetide isolated from the Sargasso Sea
KMDPYLNVDPGTMSPFQHGEVFVTDDGAETDLDLGHYERFTNISSKQSDNITTGRVYSDIIKKERKGNYLGKTVQVIPHVTDRIKEFIKGDITDEDFVICEIGGTVGDIESLPFLEAIRQFSNDIGRNKTLFIHLTLVPFLKSSDEIKTKPTQHSVKELRSIGIQPDIVICRSQKSIPSDQRKKISLFCNVPIENVIETVDVKTIYEAPISFYKEKLDKQVLKYFKIKSKKNSNLTPWKKITKILLKNKKQVDIAIMENM

SEQ ID NO: 195906 - protein, 230 aa, Unknown
  Bacterial polypetide isolated from the Sargasso Sea
MARYIFVTGGVVSSLGKGLTSASLAYLLKSQGYKVRVRKMDPYLNVDPGTMSPFQHGEVFVTDDGAETDLDLGHYERFTNISAKKSDNITTGRIYSDIIKKERKGKYLGKTVQVIPHVTDRIKEFIKGDISNEDFVVCEVGGTVGDIESLPFVEAIRQFSNDVGKNNSLFIHLTLVPFLKSSDEIKTKPTQHSVKELRSLGVQPDIVICRSQKSIPIDPRKKISLFCNVS

SEQ ID NO: 195907 - protein, 271 aa, Unknown
  Bacterial polypetide isolated from the Sargasso Sea
ISDEDFVICEIGGTVFDIESLPFVEAIRQFSNEHGKSKTLFIHLTFVPFLKSSDEIKTKPTQHSVKELRSIGIQPNIIICRSQQSIPIDQRKKISLFCNVQIENVIETVDVRTIYEAPISFFNQKLDKQVLKFFKLKSKKRPNLLPWKKITKITLNTKKIINIGIIGKYVNLKDAYKSLDEALTHGGISNKVKVNLIRIESDKLKPNQIAKKLKNISGLLIPGGFGKRGTEGKITAIKYARERKIPFLGICFGMQMAIIEFARNKLKIKKA

SEQ ID NO: 195908 - protein, 169 aa, Unknown
  Bacterial polypetide isolated from the Sargasso Sea
RENKIPFLGICFGMQLAIVEYARNRLKIKKAGSSELDKKCYPVIGLINEWDKNGKKIKGTDKNLGGTMRLGLYEAKLRNNSAINKIYKLKSIKERHRHRYEVNNNLKNQFERKGLIFSGMSPDNKLPEIIELNNHPWFIGVQFHPEFKSRPLSPHPLFSSFIKAAKNHK

SEQ ID NO: 195909 - protein, 174 aa, Unknown
  Bacterial polypetide isolated from the Sargasso Sea
MARYIFVTGGVVSSLGKGLSSASLAYLLQSRGYKVRIRKLDPYLNVDPGTMSPFQHGEVYVTDDGAETDLDLGHYERFSGISAKKSDNITTGKIYNDVLKRERQGKYLGKTVQVIPHITDRIKEFIKNDVTKEDFVICEIGGTVGDIESLPFLEAIRQFSNELGRKNTLFIHLT

SEQ ID NO: 195910 - protein, 128 aa, Unknown
  Bacterial polypetide isolated from the Sargasso Sea
MARYIFVTGGVVSSLGKGLSSASLAYLLQSRGFKVRIRKLDPYLNVDPGTMSPFQHGEVYVTDDGAETDLDLGHYERFSGVSAKKSDNITTGKIYNDVLKKERKGEYLGKTVQVIPHITDRIKQFIKN

SEQ ID NO: 195911 - protein, 276 aa, Unknown
  Bacterial polypetide isolated from the Sargasso Sea
MGKGLSSASLGYLLQSRGYKVRLRKLDPYLNVDPGTMSPFQHGEVFVTDDGAETDLDLGHYERFSGVSAKKSDNITSGKIYNDVLKKERKGKYLGKTVQVIPHITDQIKEFIKNDSYKEDFVICEIGGIVGDIESLPFIEAIRQFANDIGKKNALFIHLTLVPYLKASDEIKTKPTQHSVKELRSIGVQPDIIICRSERPIPLQHRKKISLFCNVNIKNVIETVDVRTIYEAPISFFKEKLDIQVLNYFKLKSKKPANLNPWKKITKVILQNKKLV

SEQ ID NO: 195912 - protein, 265 aa, Unknown
  Bacterial polypetide isolated from the Sargasso Sea
NPQHEITIGMVGKYVDLTESYKSLIEALRHAGLHTSTRVNIEYIDSEELESGHTQVLDSLDAVLVPGGFGKRGTEGKIRAIQYAREKGVPYLGICLGMQLAVIEFARHLAGMKDANSTEFNDETEHPVVALITEWLDRDGRVEKRSADSDMGGTMRLGSQRVPVQPGTKAASIYGAEVNERHRHRYEVNNHYVPQLEKAGMIISARTPSENLPEMMELPASMHPWFVGVQFHPEFTSTPRDGHPLFKAYVEAALAHQQNTQRAVA

SEQ ID NO: 195913 - protein, 304 aa, Unknown
  Bacterial polypetide isolated from the Sargasso Sea
KYSLFCNVKKESVIPAMNANSIYEVPLLYYKAGLDSSLLNHLGFKANKYPLNLKPWKNVLKKINKSEKYVKIAVVGKYTNLKDSYKSLNEALVHGGIANNKNVHIEWINSEKLNFKNIDKKLKNINGILIPGGFGYRGIEGKIKAIKYARENNIPFFGICLGMQLAVIEIARNVIKLKNANSTEFNKTSNPVVGLMTEWINKDKIEKRNKNSDKGGTMRLGSYNAILKKGSKIHKIYNNTSISERHRHRYEVNTKYIESFAKYGFDFTAMSPDNILPEALESRKHSWFIGVQFHPELKSRPFAP

SEQ ID NO: 195914 - protein, 182 aa, Unknown
  Bacterial polypetide isolated from the Sargasso Sea
EGKIAAIKYARLNHIPFFGICFGMQMAIIEAARNLLNIKNASTSEFGNNCIPVVGLLEEWQKGKKRIKGSEENLGGTMRLGLYDAILKNNSLISKIYSEKKIKERHRHRYEVNIKYKDDFEKKGLIFSALSPDGMLPEIIELNNHPWFVGVQFHPEFKSRPFTPHPLFSSFIKAADKNRRGN

SEQ ID NO: 195915 - protein, 267 aa, Unknown
  Bacterial polypetide isolated from the Sargasso Sea
SVKELQSVGIQPDILLCRSEVDIPVEQRSKIALFCNIRPDAVIAALDVGSIYDVPLSYHAQGFDTEVCRHFGLLESGAGPDLGVWQRISSIVAKPEGTVKIAIVGKYTSLLDSYKSLAEALMHGGIANNIKVDLVWIDSEIFESEDTVHHLDGVNGILVPGGFGERGAEGKISAVKFARERQIPYFGICFGMQMAVIEAARNLSGLKGAGSSEFGKCEKAVVGLLTEWVKGNEMEERSDKDDLGGTMRLGAYQCLLSENSKVREIYG

SEQ ID NO: 195916 - protein, 256 aa, Unknown
  Bacterial polypetide isolated from the Sargasso Sea
MKTKPTQHSVKELRSLGIQPDIIICRSEKNIPINERKKISLFCNVDYKNVIETVDVRTIYEAPISFYKEKFDERVLSHFNVKSKKLPNLRRWRNITSNVLEARKHVNIGIIGKYVNLKDAYKSLDEALVHGGISNNLKIKLTRIDSEHLKIKDLNLLLKNVSGILIPGGFGKRGSEGKIAAIKYARLNNIPFFGICFGMQMAVIEAARNLLNIKNASTSEFGNNCTPVVGLLEEWQKGKKIFKGSEKDLGGTMRLG

SEQ ID NO: 195917 - protein, 97 aa, Unknown
  Bacterial polypetide isolated from the Sargasso Sea
AKLRNNSAIKNIYKTNSLKERHRHRYEVNNNLKNKFEKKGLIFSGMSPDNKLPEIIELKNHPWFIGVQFHPEFKSRPLLPHPLFSSFVKAAKSYNGK

SEQ ID NO: 195918 - protein, 288 aa, Unknown
  Bacterial polypetide isolated from the Sargasso Sea
DLDLGHYERFSGISAKKSDNVTTGQIYSDVLKKERKGKYLGKTVQVIPHVTDRIKEFINNDVKKEDFVICEIGGTVGDIESLPFVEAIRQFSNDIGKKNTLFIHLTLVPYMKASDEIKTKPTQHSVKELRSIGIQPDIIICRCEKNIPIDQKKKISLFCNVDIKNVIQTIDVKTIYEAPISFNRENLDGQVLKYFNIKSKKSVNLKPWKKITNIVLKNKKYVNIGIIGKYVNLKDAYKSLDEALVHGGISNNTKVNLIRIESDNFKKSDVRKKLQNVSGILIPGGLEK

SEQ ID NO: 195919 - protein, 293 aa, Unknown
  Bacterial polypetide isolated from the Sargasso Sea
MILPEQERKKIALFTNVPAAHVIPLKDAKSIYEVPLILHEQGLERAVEQIWQLGQGDADLSQWKWVVDRYLNPTDTVRIAMVGKYMDLADSYKSLSEALMHAGIHNDTRVKIDYIDSEEIEKNGTAVLAQADAILVPGGFGDRGTEGKIAAITYARENQVPFLGICLGMQLAVVEFARHCAGLTGANSTEFDVKTPYPVVALMSEWQAAHGQQETRTSESDKGGTMRLGAQECHLEDASLIHQLYNERVIFERHRHRYEVDANDFEKLIAPHGLKASGYSIDKQLVEVVEMPE

SEQ ID NO: 195920 - protein, 266 aa, Unknown
  Bacterial polypetide isolated from the Sargasso Sea
TLFIHLTLVPFLKSSDEIKTKPTQHSVKELRSIGIQPDIVICRSQRSIPYEQRKKISLFCNVEIDNVIETVDVRTIYEAPISFYKEKLDKQVLKYFKIKPKKNVNLLPWKNITKIVLKNKKPIDIAIIGKYVNLKDAYKSLDEALIHGGIKNNVKVNLIRIESDHLKPAKIPKILRNVSGILIPGGFGKRGTDGKIAAINYARKNKTPFLGICFGMQMAVIEFAKNILKIKKAGSTELKKNCFPVVGLIDEWYKNGKIIKGTSVNL

SEQ ID NO: 195921 - protein, 161 aa, Unknown
  Bacterial polypetide isolated from the Sargasso Sea
ICFGMQMAIIFFARNVLKINKASSTELDSKCIPVIGLIHEWKKNGKIIKGTDKDLGGTMRLGSYDAELVNNSLIKSIYKSKIVKERHRHRYEVNVNYKNQFEKKGLIFSGNSPDKNLPEIIELKNHPWFIGVQFHPEFKSRPLAPHPLFSSFIKAARNHKK

SEQ ID NO: 195922 - protein, 268 aa, Unknown
  Bacterial polypetide isolated from the Sargasso Sea
YDLKSIYDAPLAFHREFLDVAVLNAFQIKPLKKPDLSIWKDVSKNINFPEGEVRIAIVGKYTKLGDAYKSIAEALTHGGIANNTKVIAELIDSEIFEKENTASYLQNFSAILVPGGFGERGAEGKIMAAKFAREKKVPFFGICLGMQMAVVEAIRNLGEIKNASSEEFHYPYSDVKKDIVPIIFHLEKWIDKGKIVTRKVTDYKGGTMRLGAYDAILKSNSKVSKIYNAHSISERHRHRFEVDINYKEILEKNGFIFSGVSPDGLLPE

SEQ ID NO: 195923 - protein, 112 aa, Unknown
  Bacterial polypetide isolated from the Sargasso Sea
MARYIFVTGGVVSSLGKGLSSASLAYLLQSRGFKVRIRKLDPYLNVDPGTMNPFQHGEVFVTDDGAETDLDLGHYERFSGISAKKSDNITTGQIYSDVLKKERKGKYLGKTV

SEQ ID NO: 195924 - protein, 267 aa, Unknown
  Bacterial polypetide isolated from the Sargasso Sea
SPYQHGEVFVTDDGAETDLDLGHYERFTNRSAKKTDSTSSGRIYSNVLKKERKGDYLGATIQVIPHVTDEIKLFINSNFEDEDIIIYEIGGTVGDIESLPFLEAIRQIRNDKNISSALIHMTYVPYLSSAGELKTKPTQHSVKELLNSGIQPDIIMCRCEKEINEESLEKISQFCNVKKDSVIPALNASSIYEVPSIYSNAGLDNVLLDHLGFDKSKYPLDLSDWNNLINKINNLKKIVRIGVVGKYTNLKDSYKSLIEALTHGGMK

SEQ ID NO: 195925 - protein, 251 aa, Unknown
  Bacterial polypetide isolated from the Sargasso Sea
LNTKNKVNIAIIGKYVELKDAYKSLDEALTHGGIANNLKVNLIRIESDYLKPKEINNKLKGVSGILIPGGFGKRGTEGKIAAINYARKKKIPFLGICFGMQMAVIEFARNILNIKNATSSEFGFSKASVVGLMNEWTKNGKLMKGTDKNLGGTMRLGSYEARLKKDTKISKIYNSLKIKERHRHRYEVNINYKEEFENKGMIFSGLSPDNKLPEIIELKDHPWFIGVQFHPEFKSRPLAPHPLFSSFIKAA

SEQ ID NO: 195926 - protein, 280 aa, Unknown
  Bacterial polypetide isolated from the Sargasso Sea
DLDLGHYERFTGVNLRKDSNVTTGSIYRKVIESERKGDYLGATVQVIPHITDEIKRRIKGISNDIDVQITEIGGTVGDIEILPFLEAARQIRKELGSENVMFVHVTLVPFIGPSRELKTKPTQHSVTLLRAAGISPDLIVLRSDRELNEEIKSKVSLFCDVSLSNVINAPDLDDIYEVPLRMFDEGLDNAVNDRLKLNSNSQDLSQWKTMVDLKQNAINTVKIAILGKYFGLPDSYLSVVESLKHSCLHNNVKLDLHWIDADNFELDSLADMDGVIVPGG

SEQ ID NO: 195927 - protein, 87 aa, Unknown
  Bacterial polypetide isolated from the Sargasso Sea
MAKTKYIFITGGVVSSLGKGIAAASIGALLESRGLSVSLIKVDPYINVDPGTMSPFQHGEVFVTNDGTETDLDLGHYERFVRFQASR

SEQ ID NO: 195928 - protein, 278 aa, Unknown
  Bacterial polypetide isolated from the Sargasso Sea
NKQTRFLFVTGGVVSSLGKGVAAASLGAVLESRGLSVTILKLDPYINLDPGTMSPFQHGEVFVTEDGSETDLDLGHYERFLASKMSKSNNFTTGQVYEEVLRKERKGDYLGGTVQVIPHITDEIKERIIKGAGNSEVAIVEIGGTVGDIESQPFLEAIRQMKIDLQSYQTLYMHLTLLPFLKSAGETKTKPTQRSVKEMLSHGLQPDILVCRSDKPMEEEERKKIALFTNVKPNAVISMPDVDSIYKIPIELNYQKVDEIVLEKFKLNSSKKPNLRDW

SEQ ID NO: 195929 - protein, 133 aa, Unknown
  Bacterial polypetide isolated from the Sargasso Sea
MGNKQTRFIFVTGGVVSSLGKGIASASLGALLESRGLSVTILKLDPYINLDPGTMSPFQHGEVFVTEDGSETDLDLGHYERFLTSKMTKANNFTTGQVYEEVLKKERKGDYLGGTVQIIPHVTDEIKRRILKG

SEQ ID NO: 195930 - protein, 58 aa, Unknown
  Bacterial polypetide isolated from the Sargasso Sea
MHFVFITGGVASSLGKGLASASLASLLQSRKFKVRIRKLDPYLNVDPGTMSPYQHGEV

SEQ ID NO: 195931 - protein, 198 aa, Unknown
  Bacterial polypetide isolated from the Sargasso Sea
KDAAKSFKDIDGILLPGGFGSRGAEGKILTSKFARENNIPFLGICLGLQCAVIDYARNVCKINDANSSEFKPKSKNKVIDLMESQRAIKLKGGTMRLGSYDCEISTGTKAYSIYRKKTISERHRHRFEVNNKYVSKMEKNGLIFSGMNKKLGVVEIIELKNHPWFVGCQFHPELKSRVDKAHPLFREFVKASLKNSKI

SEQ ID NO: 195932 - protein, 208 aa, Unknown
  Bacterial polypetide isolated from the Sargasso Sea
LKPREINNKLKGVSGILIPGGFGKRGTEGKIAAIYYARKNKIPFLGICFGMQMAVIEFARNELNIKNATSSEFGSSKASVVGLMSEWLKDGKLMKGTDKDLGGTMRLGSYEARLKKDTKISKIYNSLKIEERHRHRYEVNINYKEDFENKGMIFSGLSPDNKLPEIIELKDHPWFIGVQFHPEFKSRPLTPHPLFSSFIKAAKINSKK

SEQ ID NO: 195933 - protein, 129 aa, Unknown
  Bacterial polypetide isolated from the Sargasso Sea
MGKVQTRFIFVTGGVVSSLGKGIASASIGALLESRGLTVTILKLDPYINLDPGTMSPFQHGEVFVTEDGSETDLDLGHYERFLKTKMTKDNNFTTGQVYEEVLRKERKGDYLGGTVQVIPHITDEIKNK

SEQ ID NO: 195934 - protein, 264 aa, Unknown
  Bacterial polypetide isolated from the Sargasso Sea
MARYIFVTGGVVSSLGKGLSSASLAYLLQSRGFKVRIRKLDPYLNVDPGTMSPFQHGEVFVTDDGAETDLDLGHYERFSGISAKQSDNITTGKIYSDVLKKERKGKYLGKTVQVIPHVTDRIKEFIKSDIKKEDFVICEIGGTVGDIESLPFVEAIRQFSNDIGKRNTLFIHLTLVPYMKASDEIKTKPTQHSVKELRSIGIQPDIIICRCERSIPLDQKKKISLFCNVDIKNVIQTIDVKTIYEAPISFNAEKLDKQVLNYFK

SEQ ID NO: 195935 - protein, 68 aa, Unknown
  Bacterial polypetide isolated from the Sargasso Sea
FANDVGKKNALFIHLTLVPYLKASDEIKTKPTQHSVKELRSIGIQPDIIICRSERPIPLEHRKKISLF

SEQ ID NO: 195936 - protein, 302 aa, Unknown
  Bacterial polypetide isolated from the Sargasso Sea
PLGEVKTKPTQHSVNALRAMGIQPDFLVCRSDEQFDNGIKSKLSLHCDVKLERIFSLETLDTIYAVPIALESQNMGEKVSEFLNLEKNKSNLKNWNEMVNVIRSDKKNLNIGIIGKYTSLEDSYLSVKEALLHAAFNQSLNLNIDWILSDEMEQSDLDKILGKLSGIVIPGGFGPRGIDGMVKCANYARTKKIPYLGLCLGMQIMVIEYSRNVLHLEDANSSEFNEKSNNLVIDFLPGQMKLKETGASMRLGNYPCIIKKDSKVFNFYQKEEIKERHRHRYEVNNLFKDRLEKEGLLPVGTS

SEQ ID NO: 195937 - protein, 172 aa, Unknown
  Bacterial polypetide isolated from the Sargasso Sea
MPDIKYIFVTGGVSSSLGKGIIAASLAKLLQAQDFKVTIQKFDPYINVDPGTLNPYEHGECYVTDDGAETDLDLGHYERFLSIKTSQANNVTTGRVYQSVIEKERKGLFLGKTVQVIPHITNEIKERMQLLGKSGEFDIVITEIGGTVGDIESLPYIESVRQLIYELGEDNA

SEQ ID NO: 195938 - protein, 319 aa, Unknown
  Bacterial polypetide isolated from the Sargasso Sea
RSEREIPKVERKKISLFCNVPIANVIETVDVKTIYEAPISFHKEKLDERVLSYFNIKNNKKPNLSRWKNITSKVLNPKTDVNIGIVGKYINLKDAYKSLDEALIHGGISNNVRVKLERIDSEHLDPKKIKPLLKNISGVLIPGGFGKRGTEGKIAAIKYARLNNIPFFGICFGMQMAVIEAARNMLNIKNASSSEFGNNCTPVVGLIEEWQKGKKIFKGSEKDLGGTMRLGLYDAIIKNNSLISKIYSEKRIKERHRHRYEVNIKYKKDFEKKGLIFSALSPDGTLPEIIELNNHPWFVGVQFHPEFKSRPFTPHPLFS

SEQ ID NO: 195939 - protein, 323 aa, Unknown
  Bacterial polypetide isolated from the Sargasso Sea
MFIHLTLVPFLKASGVLKTKPTQHSVKELRSLGIQPDIIICRSEKELPKEERRKISLFCNVQIENVIETVDVRTIYEAPISFHKEKLDERVLSYFNIKNKKLPNLSKWKNITSKVLNPKKDVNIGIIGKYVNLKDAYKSLDEALIHGGISNNLKVNLKRIDSENLKAENIKPLLKEVSGVLIPGGFGKRGSEGKIAAIKYARLNNIPFFGICFGMQMAVIEAARNLLNIKNASTSEFGNNCTPVVGLLEEWKKGKKRIKGSEKNLGGTMRLGLYEAILKNNSLISKIYSGKKIKERHRHRYEVNIKYKEDFEKKGLIFSALSP

SEQ ID NO: 195940 - protein, 290 aa, Unknown
  Bacterial polypetide isolated from the Sargasso Sea
TDLDLGHYERFTGVNLRKDSNVTTGSIYRKVIESERKGDYLGATVQVIPHITDEIKRRIKGISNDVDVQITEIGGTVGDIEILPFLEAARQIRKELGTDNVMFIHVTLVPFIGPSTELKTKPTQHSVSLLRAAGISPDLIVLRSDRELNDEIKSKVSLFCDVAVNNVINAPDLDDIYAVPLRMRDEGLDKSVDERLNLQTNEPSLEEWKTMVNLKLEANETVKIAILGKYFGLPDSYLSVVESLNHACLQNKVKLDLHWIDADNFEIENLQDIDGVIVPGGFGYRGIEGR

SEQ ID NO: 195941 - protein, 120 aa, Unknown
  Bacterial polypetide isolated from the Sargasso Sea
KDGKLIRGTDKNLGGTMRLGSYEARLKKDTKISNIYNSMKIHERHRHRYEVNINFKDEFEKQGMIFSGLSPDNKLPETIELKDHPWFIGVQFHPEFKSRPLAPHPLFSSFIKAAKKNSRK

SEQ ID NO: 195942 - protein, 182 aa, Unknown
  Bacterial polypetide isolated from the Sargasso Sea
MRAKIEAIRYARERKIPFLGICFGMQMAMIEFSRNILKIKKAGSSELDKNCFPVIGLIDEWKKDGKIIKGTDKNLGGTMRLGLYEAKLRNNSAIKKIYKSNMIKERHRHRYEVNINLMQKFEKKGLIFSGISPDNQLPEIVELKNHPWFIGVQFHPEFKSRPLNPHPLFSSFIKTAKSLNGK

SEQ ID NO: 195943 - protein, 129 aa, Unknown
  Bacterial polypetide isolated from the Sargasso Sea
MGKGNPTKFIFVLGGVMSGLGKGIAASSIGYLLKNSGLRVTILKLDPYLNVDPGTMNPYQHGEVFVLDDGSETDLDLGHYERFIDVNMTKNNNATAGQIYSTVLDKERKGEYLGETVQVIPHVTDEIIN

SEQ ID NO: 195944 - protein, 242 aa, Unknown
  Bacterial polypetide isolated from the Sargasso Sea
MVNSETRFIFVTGGVVSSLGKGLTSASLGALLESRGIKVTIMKLDPYINLDPGTMSPFQHGEVFVTEDGSETDLDLGHYERFIKSKMSKDNNFTTGQVYETVLKNERKGDYLGGTVQVIPHITDEIKRRIVKGSKNAEVAIVEIGGTVGDIESQPFLEAIRQMKIELGSERTLFMHLTLVPYIAAAGETKTKPTQRSVKEMLSHGLQPDILICRSDKELSEEAREKIALFTNVEKQSVISLP

SEQ ID NO: 195945 - protein, 194 aa, Unknown
  Bacterial polypetide isolated from the Sargasso Sea
MANTKYIFVTGGVTSSLGKGIIAASLAKLLQARKFNVTIQKFDPYINVDPGTLNPYEHGECFVTDDGAETDLDLGHYERFLNNSTSQENNVTTGRVYQSIIEKERKGDFLGKTVQVIPHVTNEIKERMMLLGKSGDYDFVITEIGGTVGDIESLPYIESVRQLVWELGKENTVVIHLTLIPFLSATGELKTKPT

SEQ ID NO: 195946 - protein, 75 aa, Unknown
  Bacterial polypetide isolated from the Sargasso Sea
MARYIFVTGGVVSSLGKGLSSASLGYLLRSQGYKVRIRKMDPYLNVDPGTMSPFQHGEIFVTDDGAETDLDLGHY

SEQ ID NO: 195947 - protein, 95 aa, Unknown
  Bacterial polypetide isolated from the Sargasso Sea
MARYIFVTGGVVSSLGKGLSSASLAYLLQSRGYKVRIRKLDPYLNVDPGTMSPFQHGEVYVTDDGAETDLDLGHYERFSGISDKKSDNITTGKIY

SEQ ID NO: 195948 - protein, 249 aa, Unknown
  Bacterial polypetide isolated from the Sargasso Sea
MPLFGKYVELKDAYKSLDEALTHGGIANNLKVNLVRLESDYLKPKRIKKELNNVSGILIPGGFGKRGTEGKIAAINFARKNKIPFLGICFGMQMAVIEFARNKLNIKKATSSEFGPSQASVVGLMSEWSKDGKLMKGTDKDLGGTMRLGSFEARLKKDTKISKIYNSLKIYERHRHRYEVNINYKKDFENKGMIFSGISPDNKLPEIIELEDHPWFIGVQFHPEFKSRPLTPHPLFSSFIKAAKINSKK

SEQ ID NO: 195949 - protein, 291 aa, Unknown
  Bacterial polypetide isolated from the Sargasso Sea
KKKLSGFCGVSIISVIEALDADSIYSVPLSLKKEGLCKETLKYLELEDKKCDLRNWEELIHNLRNPGAPIKVALVGKYIELGDAYLSVVEALKHACIEQKASLDLHWVSAEMIEKNSAETYLNKVDAIVVPGGFGNRGVNGKISAIKFARENKVPFLGLCLGMQCAVIEWARNVANLPDASSSELDPKTPNPVIHLLPEQEDIVDLGGTMRLGVYPCRLTNNTTGKNLYDEDVIYERHRHRYEFNNYYKQSFLNSGYKISGTSPDGRLVELIELGNHPYFLACQYHLEFLS

SEQ ID NO: 195950 - protein, 262 aa, Unknown
  Bacterial polypetide isolated from the Sargasso Sea
KRAVAPEGGVTIAVVGKYTGLLDAYKSLAEALTHGGLANNVKVNLKWMESQSFEDGGTFQQLEDVHGILVPGGFGERGAEGKIMAAKFARERQVPYFGICFGMQMAVVEAARNMAGIRDAGTTEFGEPTDAVVGLLTEWERDGIVYQRDETSEKGGTMRLGAYPCMLSNGSRVRRIYGADGISERHRHRYEVNMSYEDRLAEAGMVFSGKSPDGVLPEIVEIPDHPWYIGVQFHPELKSRPFEPHPLFTDFIRAAVEQSRLV

SEQ ID NO: 195951 - protein, 220 aa, Unknown
  Bacterial polypetide isolated from the Sargasso Sea
VNSVKVNVHPIHSESINKTNVKSLMSNLDGVLVAPGFGDRGIEGKIISIEYARVNDIPFLGICLGMQMAVIEYARNVIGLKNANSTEMDYHTKHPVISLMEDQVNVEKKGGTMRLGSWKCEISKGTLTHDIYKKNVIKERHRHRYELNFNYIESLTKSGMVFCGKNPETDLVEIIELPNHSWFIGVQFHPEYQSTVDKPHPLFKSFIKAATNKKRTYGRK

SEQ ID NO: 195952 - protein, 257 aa, Unknown
  Bacterial polypetide isolated from the Sargasso Sea
GLSISMIKLDPYINVDPGTMSPFQHGEVFVTSDGTETDLDLGHYERFVRTETGRNSNFTAGRIYESVIAKERRGDYLGATVQVIPHITDEIKNGIKKGSNDADICLVEIGGTIGDIESLPFMEAIRQMGIELGPEKVVYVHLTLVPYIASSSEIKTKPTQHSVKEMRSIGIQPDILVCRSEHELPDEQRKKIALFTNVNEEAVISAYDVDDLYKIPEMMHQQSLDSIVIKKLKLKTPDANLNEWKSIVRAKTSAKKE

SEQ ID NO: 195953 - protein, 87 aa, Unknown
  Bacterial polypetide isolated from the Sargasso Sea
WVKKIYKSNNINERHRHRYEVNKHLQSKFENKGMIFSGMSPNNNLPEIIELKNHPWFIGVQFHPEFKSRPLNPHPLFCSFIKAAKLK

SEQ ID NO: 195954 - protein, 122 aa, Unknown
  Bacterial polypetide isolated from the Sargasso Sea
MDEWNKDEKIIRGTDKELGGTMRLGLYKAKLRHNSLVKKIYKSNFIDERHRHRYEVNKYLQIKFESKGMIFSGMSPNNNLPEIIELKNHPWFIGVQFHPEFKSRPLNPHPLFSSFIKAAKSK

SEQ ID NO: 195955 - protein, 86 aa, Unknown
  Bacterial polypetide isolated from the Sargasso Sea
MARFIFVTGGVVSSLGKGLSSASLAYLLKSQGYKVRIRKMDPYLNVDPGTMSPFQHGEVFVTDDGAETDLDLGHYERFTNISSKQS

SEQ ID NO: 195956 - protein, 243 aa, Unknown
  Bacterial polypetide isolated from the Sargasso Sea
VGDIESLPFLEAIRQFSNDNGKSKSLFIHLTFVPFLKSSDEIKTKPTQHSVKELRSIGIQPDIVICRSQQSIPLDQRRKISLFCNVDIANVIETVDVKTIYEAPISFFNQKLDKQVLKFFKIKSRKRPNLLPWKKITNIVLNAKRIVNIAIIGKYVNLKDAYKSLDEALTHGGISNKVKVNLVRIESDKIRSKKIKSKLNNVSGILIPGGFGKRGTEGKIEAIRYARERKIPFLGICFGMQMA

SEQ ID NO: 195957 - protein, 281 aa, Unknown
  Bacterial polypetide isolated from the Sargasso Sea
EREIPKTERKKISLFCNVPIENVIETVDVKTIYEAPISFHKEKLDERVLSYFNIKNKKSPDLSKWRNITSKVLNPKKDVNIGIIGKYINLKDAYKSLDEALIHGGISNNIKVNLKRIDSENLKPENIKPLLKNVSGVLIPGGFGKRGTEGKIAAIKYARLNSIPFFGICFGMQMAIIEAARNLLNIKNASSSEFGNNCTPVVGLLEEWQKGKKRIKGSEKDLGGTMRLGLYDAVLKNNSLISKIYSEKRIKERHRHRYEVNIKYKNDFEKKGLIFSALSPG

SEQ ID NO: 195958 - protein, 287 aa, Unknown
  Bacterial polypetide isolated from the Sargasso Sea
MSKPRYIFITGGVVSSLGKGISAAAIGSLLQARGYSVRIRKLDPYINVDPGTMSPYQHGEVFVTDDGAETDLDLGHYERFTGVPAKQSDNITTGRIYQNVINKEREGDYLGSTVQVIPHVTDEIKSFITKDIGKCDFILVEIGGTVGDIESLPFLEAIRQFGNEIGKKRAIYIHLTLVPYIDTSNEQKTKPTQHSVKELREIGIQPNILLCRCDRPIEANEVDKIALFCNVKSEDVIQALDVKNIYNVPIVYHSEKLDVQVLRHFNIKPNKINLIKWKKIVLSANKV

SEQ ID NO: 195959 - protein, 140 aa, Unknown
  Bacterial polypetide isolated from the Sargasso Sea
KAGSSELDKNCYPVIGLINEWDKDGKIIKGTDKNLGGTMRLGLYEAKLKNNSAINRIYKSKTIKERHRHRYEVNNNLKNQFENKGLIFSGMSPDNKLPEIIELKNHPWFIGVQFHPEFKSRPLSPHPLFSSFIKAAKNHK

SEQ ID NO: 195960 - protein, 156 aa, Unknown
  Bacterial polypetide isolated from the Sargasso Sea
MQMAIIEFARNQLNIKNATSSEFDKKGLPIVGLINEWSKDGKIIKGTDKDLGGTMRLGSYDAKLRDNSLIRKIYKSKIIKERHRHRYEVNIAFKDKFEKKGMIFSGLSPDNKLPEIIELKNHPWFIGVQFHPEFKSRPLSPHPLFSSFIKAAKNHK

SEQ ID NO: 195961 - protein, 246 aa, Unknown
  Bacterial polypetide isolated from the Sargasso Sea
YLLQSRGYKVRLRKLDPYLNVDPGTMSPFQHGEVFVTDDGAETDLDLGHYERFSGVTAKKTDNITTGKIYSDVLRKERKGQYLGKTVQVIPHITDRIKEFIKHDTSKEDFVICEIGGIVGDIESLPFVEAIRQFSNDIGKKNALFIHLTLVPYLKASDEIKTKPTQHSVKELRSIGIQPDIIICRSERPIPLEHRKKISLFCNVDIKNVIETVDVKTIYEAPISFAKEKLDVQVLNYFKIKSKKIK

SEQ ID NO: 195962 - protein, 274 aa, Unknown
  Bacterial polypetide isolated from the Sargasso Sea
TKPTQHSVKELRSLGIQPDIIVCRSERSIPNDQRKKISLFCNVPIENVVETVDVKTIYEAPISFHNEKLDKLVLNFFSLKPKKKVNLRPWKNITNIILKNKKKLNIAIVGKYVDLKDAYKSLDEALIHGGIENKVNINLERIESDKINKLNSSKKLKKISGILIPGGFGSRGTEGKIAAIKHARISKTPFLGICFGMQMAVIEFARNVLKINDAGSTEFHKKCFPIVGLISEWEKDGKLIKGTKSDLGGTMRLGAYKAKLRHNSLINKIYKSKE

SEQ ID NO: 195963 - protein, 311 aa, Unknown
  Bacterial polypetide isolated from the Sargasso Sea
VFVTNDGTETDLDLGHYERFVRFEASKKNNFTAGKVYETVIRNERKGDYLGGTVQVIPHITNEIKKRIKSGGQGKDVAIVEVGGTVGDIESQPFVEALRQMALELPNSSWAFVHLTLVPFINASGELKTKPTQHSVKELRSLGISPDVLICRSDKELPKDERNKIALFCSVPNKSVISMHDVDTVYSIPILLNKQKVDKTILEKLKIKSKNPQLNDWKRVVKAKLLPEKEVNVAFVGKYTELKDSYKSINEALEHAGIKNSTKVNINFVEAENLTSRNVNKILKKADAVLVPGGFGERGIEGMILACKYSR

SEQ ID NO: 195964 - protein, 102 aa, Unknown
  Bacterial polypetide isolated from the Sargasso Sea
LGSYEARLKKDTKVSKIYNSLKINERHRHRYEVNINYKEKFEKKGMIFSGLSPDNKLPEIVELNDHPWFIGVQFHPEFKSRPLTPHPLFSSFIKAAKIYSKK

SEQ ID NO: 195965 - protein, 150 aa, Unknown
  Bacterial polypetide isolated from the Sargasso Sea
MTRYIFVTGGVVSSLGKGIASASLAAILEARGLKVTMLKLDPYINVDPGTMSPFQHGEVFVTHDGAETDLDLGHYERFIRTTMTQNNNFTTGRVYEHVLRKERRGDYLGATIQVIPHITDEIKRRIIKGAGDADVAMVEIGGTVGDIESQ

SEQ ID NO: 195966 - protein, 307 aa, Unknown
  Bacterial polypetide isolated from the Sargasso Sea
ITGGVVSSLGKGLASASLGAILQARGYKIKLRKLDPYLNVDPGTMSPYQHGECYVTDDGAETDLDLGHYERFTGVNAKKSDNITTGKIYSNVIAKERRGDYLGATIQVIPHVTDAIKEYILSDINDEDFILCEIGGTVGDIESLPFIEAIRQLGNELGLSKTCFLHVTLLPFIKTAGELKTKPTQHSVKELQGMGIQPDILLCRTENSIPEEQKSKIALFCNLKSETVIEALDSSSIYDVPIAYHNQGLDYQVCKHFELDLSKKPDLSRWIKINKIQNSSEGNVNIGIVGKYTSMIDAYKSLIEAIN

SEQ ID NO: 195967 - protein, 132 aa, Unknown
  Bacterial polypetide isolated from the Sargasso Sea
DKKCYPIIGLISEWNKNGQMIKGTNKDLGGTMRLGLYEAKLRHNSLIEKIYKSKFIFERHRHRYEVNNNLKNKFENKGMFFSGMSPDGKLPEIIELKNHPWFIGVQYHPEFKSRPLSPHPLFSSFIKAAKFY

SEQ ID NO: 195968 - protein, 259 aa, Unknown
  Bacterial polypetide isolated from the Sargasso Sea
MVICRSQQSIPLDQRKKISLFCNIPIKRVIETVDVKTIYEAPISFFNEGLDKQVFEYFSMKPRKKINLKPWKDVTKIVTNKNIRTINIAIVGKYVDLKDAYKSLDEALVHGGIHNNVKINLIRIESDLLKISDVQKKLNNVSGIIIPGGFGKRGTEGKIACINYARTKKIPFLGICFGMQMAVIEFARNVLKIKNAGSSEFDKNCYPVIGLIEEWNKNGRKIKGTVKNLGGTMRLGLYPAKLQHNSLIKEIYKSSQIKE

SEQ ID NO: 195969 - protein, 226 aa, Unknown
  Bacterial polypetide isolated from the Sargasso Sea
GGIANNLKVNLIRIESDFLKPSEIKNKLREASGILIPGGFGKRGTEGKIAAVNYARRNKIPFLGICFGMQMAVIEFARNKLNIKNATSSEFGSSKASVVGLMSEWIKDGKLMKGTDKNLGGTMRLGSYEARLKKDTKISKIYNSSKIQERHRHRYEVNINYREDFENKGMIFSGLSPDNKLPETIELKNHPWFIGVQFHPEFKSRPLAPHPLFSSFIKAAKLNSKK

SEQ ID NO: 195970 - protein, 269 aa, Unknown
  Bacterial polypetide isolated from the Sargasso Sea
KTKPTQHSVKEMLSVGIQPDILLCRAEREIPEAQRRKIALFCNVKEASVISALDVDSIYSVPISYHKQGLDNEVCRFFNIDPPRLDSKRWEDIIERVDKPEGQVTIAIVGKYTGLLDAYKSLSEALAHGGIANKVKVNLNWIDSEIFESKEALHYLEGVHGILVPGGFGERGIEGKIAAAKFAREHSLPYFGICLGMQMAVIEAARNLAGIKGAGSTEFGECLEPVIGLLTEWENRGIIEKRQKGGDLGGTMRLGAYDALIKPNTHIHS

SEQ ID NO: 195971 - protein, 83 aa, Unknown
  Bacterial polypetide isolated from the Sargasso Sea
MARYIFVTGGVVSSLGKGLSSASLAYLLQSRGYKVRIRKLDPYLNVDPGTMSPFQHGEVYVTDDGAETDLDLGHYERFSGISA

SEQ ID NO: 195972 - protein, 267 aa, Unknown
  Bacterial polypetide isolated from the Sargasso Sea
WHEISRLINNPEGSVKIAIVGKYTSLEDAYKSLVEALTHGGLANNVKVEIVWVDSEVFENKNPSSDLEGIHGILVPGAFGNRGAEGMIKTITFSRERKIPFFGICFGMQMAVIETARNLLGLEDASSSEFGNTKEPIVGLLTEWVKNNIKEKREAGGNLGGTMRLGAYDCVLKPGTKVSQIYNENKIRERHRHRYEVNVNYLNKLESVGMVFSGISPDGSLPEIIELVDHPWFIGVQFHPELKSKPFDPHPLFKSFINASVKQSRLV

SEQ ID NO: 195973 - protein, 231 aa, Unknown
  Bacterial polypetide isolated from the Sargasso Sea
SIKKAQGVLVPGGFGGRGTEGKMIAAKFARENKVPYLGICLGMQCMVIEYARHVLNLADAHSTEMEPETKNPAVIFMPEGSKTHMGGTMRLGSRRTIFQTQECISSRLYGKVPHVDERHRHRYEVNPDMVPQLDAAGCKFVGKDDTQTRMEICEVDGHPFMVGCQYHPEYKSRPGKPSPLFMGLILAASGQLPEYISDEAIAVRQSEAYADHSSVLTSPLKVLRNKQTTNK

SEQ ID NO: 195974 - protein, 328 aa, Unknown
  Bacterial polypetide isolated from the Sargasso Sea
GGVVSSLGKGLASASLASLLQHHGYKVRIRKLDPYLNVDPGTMSPYQHGEVYVTDDGAETDLDLGHYERFTGVVSKQSDNITSGKVYQKIISKERRGEYLGATVQVIPHVTNEIKEFIGNDIQGEDFIICEIGGTIGDIESLPFIEAIRQFNNDNGRENSMFVHVTLVPFISSSGELKTKPTQHSVKELRSLGIQPDILLCRTDREIPAEERKKIGLFCNVKNDCVIQAINANTIYEVPINFKKEEFDKRVLEYFNLDSSNEIDLKMWHQVSRHILEPDGEVTIGIVGKYTGLADAYKSLNEALSHGGIFNDVKVNLQWIESEGFNQI

SEQ ID NO: 195975 - protein, 207 aa, Unknown
  Bacterial polypetide isolated from the Sargasso Sea
SSNVVKLLSDCNGVLVPGGFGERGSEGKIIAIKYARENKIPYFGICFGMQLAVIEMARNILGIEDANSSEFADCTNSIVGLMTEWSTSNNNKEKRSKDSDLGGTMRLGSYKAKLKKNSKIYNIYKDEIINERHRHRYEVNNKFAGEFEKKGVIFSGYSPDGLLPETVEIIDHPWFIGVQYHPELKSKPFEPHPLFKSFIEAAKVSQK

SEQ ID NO: 195976 - protein, 285 aa, Unknown
  Bacterial polypetide isolated from the Sargasso Sea
DRVLSYFNIKSKKLPNLSKWKNITSRVLNPKEDVNIGIIGKYVDLKDAYKSLDEALIHGGISNNVKVNLKRIDSENLKPNNIKPLLKDVTGVLIPGGFGKRGTEGKIAAIKYARLNNIPFFGICFGMQMAVIEAARNLLNIKNASTSEFGNNCTPVVGLIEEWQKGKKKIKGTKKNLGGTMRLGLYDAILKNNSLISKIYSEKIIKERHRHRYEVNIKFKNDFEKKGLIFSALSPDGLLPEIIELQDHPWFVGVQFHPEFKSRPFTPHPLFSSFVKAAGYNRRKN

SEQ ID NO: 195977 - protein, 296 aa, Unknown
  Bacterial polypetide isolated from the Sargasso Sea
IFVHLTLLPFLSSSGELKTKPTQHSVKELRSIGISPDILVCRSEVPIPKKEKEKIALFCNVDEKNIIAANDLETIYEAPIAFFDEGLDDAVLQVLNLKSKKKPDLNIWNDVSSRYRSSEGSVKIAVVGKYTKLEDAYKSLSEALIHGGLANKTNVEVTWLESEEFEKSYQTKRLNKFDGILIPGGFGKRGTEGKIKVIKYAREKQIPFLGICLGMQLLVIEYARNCAGIKDANSEEFDEKSNSSEDHLIYHLSKWIKDQKVEIRSKVQNKGGTMRLGAYPAKIKTGTMAHSIYKKA

SEQ ID NO: 195978 - protein, 139 aa, Unknown
  Bacterial polypetide isolated from the Sargasso Sea
MARYIFVTGGVVSSLGKGLSSASLAYLLKSQGYKVRVRKMDPYLNVDPGTMSPFQHGEVFVTDDGAETDLDLGHYERFTNISAKKSDNITTGRIYSDIIKKERTGKYLGKTVQVIPHVTDRIKEFIRGDIKDEDFVICE

SEQ ID NO: 195979 - protein, 239 aa, Unknown
  Bacterial polypetide isolated from the Sargasso Sea
EINTESLEKISQFCNVKKDSVIPALNAKSIYDVPSIYSKAGLDKVLLEHLGYDSSKYPLNLKAWENLTKKINNLKKDVTIGVVGKYTNLKDSYKSLIEALTHGGIENNTNVKIHWINAEKTKTNELIKELENVDGILIPGGFGYRGVEGKISAIKFARENNIPFFGICLGMQLSVIEIARNVFGLADSHSTEFQSSKNPVVSLMTEWNNKNKIEKRDHTSEKGGTMRLGAYKAILKEEF

SEQ ID NO: 195980 - protein, 152 aa, Unknown
  Bacterial polypetide isolated from the Sargasso Sea
MSKFVFVTGGVVSSIGKGIVAASLGRLLKSRGYSVSILKLDPYLNVDPGTMSPFQHGEVFVTEDGAETDLDLGHYERFTDTAMTRLNSVTTGSIYQAVINKERRGSYNGGTVQVIPHITGEIRERIHRVAANSNADIIITEIGGTVGDIESL

SEQ ID NO: 195981 - protein, 232 aa, Unknown
  Bacterial polypetide isolated from the Sargasso Sea
KSLDEALIHGGIQNNVKVNLVRIESDNLKKSQIIQKLKNVSGILIPGGFGKRGTEGKINAITFARKKKIPFLGICFGMQMAIIEFSRNVLNIKKAGSSELDKKCFPVIGLINEWTKNGQLIKGTSKDLGGTMRLGSYEAKLKHNSLINKIYKLNVINERHRHRYEVNINLKKQFEKKGLIFSGMSPDNKLPEIIELKNHPWFIGVQFHPEFKSRPLSPHPLFSSFIKATKFY

SEQ ID NO: 195982 - protein, 96 aa, Unknown
  Bacterial polypetide isolated from the Sargasso Sea
MARYIFVTGGVVSSLGKGLSSASLAYLLKSRGFKVRVRKMDPYLNVDPGTMSPFQHGEVFVTDDGAETDLDLGHYERFTEISSKQSDNITTGKILQ

SEQ ID NO: 195983 - protein, 139 aa, Unknown
  Bacterial polypetide isolated from the Sargasso Sea
LPNASSSELDPKTPNPVIHLLPEQEDVVDLGGTMRLGVYPCRLTNNTTGKKLYNEDVIYERHRHRYEFNNYYKQSFLNSGYKISGTSPDGRLVELIELENHPYFLACQYHPEFLSRPGKPHPLFRGLIKASQEKLTQSN

SEQ ID NO: 195984 - protein, 315 aa, Unknown
  Bacterial polypetide isolated from the Sargasso Sea
TNRIKEFIKKDITNEDFVICEIGGTVGDIESLPFLEAIRQFSNDHGKSKTLFIHLTLVPFLKSSDEIKTKPTQHSVKELRSIGIQPDIVICRSQQSIPHDQRRKISLFCNVPIDNVIETVDVKTIYEAPISFFNQKLDKQVLKFFKVKSKKRPNLLPWKKITNITLNTKKLINIAIIGKYVNLKDAYKSLDEALTHGGISNKVKVNLIRIESDKLKFYQIKNKIKNVSGILIPGGFGKRGTEGKISAIKYARDKKIPFLGICFGMQMAMIEYARNVLKIKNAGSTELNKSCYPIIGLINEWNKDGKIIKGTDKNL

SEQ ID NO: 195985 - protein, 177 aa, Unknown
  Bacterial polypetide isolated from the Sargasso Sea
MHYVFITGGVASSLGKGIASASIATLLKSRKFKVRIRKLDPYLNVDPGTMSPYQHGEVYVTDDGAETDLDLGHYERFTNQSAKKSDSISSGKIYSNVLNKERKGDYLGATIQVIPHVTNEIKNFINSDLKNEDIVIYEIGGTVGDIESLPFLEAIRQIRNDKKISSALIHMTYIPYL

SEQ ID NO: 195986 - protein, 152 aa, Unknown
  Bacterial polypetide isolated from the Sargasso Sea
MQTKYIFITGGVVSGLGKGIAAASIGALLETRGLSISLMKLDPYINVDAGTMNPFQHGEVFVTEDGAETDLDLGHYERFSSAVLGRKHNTTTGQIYDAIIRKEREGEYLGATVQVVPHVIDEIKAQIEEASKGVDISIVEIGGTVGDIESLP

SEQ ID NO: 195987 - protein, 222 aa, Unknown
  Bacterial polypetide isolated from the Sargasso Sea
MARYIFVTGGVVSSLGKGLSSASLAYLLQSRGYKIRLRKLDPYLNVDPGTMSPFQHGEVFVTDDGAETDLDLGHYERFSGVTAKKTDNITSGKIYSDVLRKERKGEYLGKTVQVIPHITDRIKEFIKYDTSKEDFVICEIGGIVGDIESLPFVEAIRQFSNDIGKKNALFIHLTLVPYLKASDEIKTKPTQHSVKELRSIGIQPDIIICRSERPIPLDHRKK

SEQ ID NO: 195988 - protein, 251 aa, Unknown
  Bacterial polypetide isolated from the Sargasso Sea
YDTSKEDFVICEIGGIVGDIESLPFVEAIRQFSNDIGKKNALFIHLTLVPYLKASDEIKTKPTQHSVKELRSIGIQPDIIICRSERPIPLEHRKKISLFCNVDIKNVIETVDVKTIYEAPISFAKEKLDVQVLDYFKIKSKKSNNLNPWKKITKITLSTKKQVNIAIIGKYVELKDAYKSLDEALTHGGITNNLKVNLVRIDSEKLKVSEIKNKLKNVSGILIPGGFGKRGTEGKIESIKHARVNKIPFLG

SEQ ID NO: 195989 - protein, 95 aa, Unknown
  Bacterial polypetide isolated from the Sargasso Sea
MARYIFVTGGVVSSLGKGLSSASLAYLLQSRGFKVRIRKLDPYLNVDPGTMNPFQHGEVFVTDDGAETDLDLGHYERFSGISAKQSDNITTGQIY

SEQ ID NO: 195990 - protein, 268 aa, Unknown
  Bacterial polypetide isolated from the Sargasso Sea
RIRKLDPYLNVDPGTMSPYQHGEVFVTDDGAETDLDLGHYERFTNISSKKSDSISSGKIYSNVLRKERKGEYLGATIQVIPHVTDEIKKFINSDLTNEDIVIYEIGGTVGDIESLPFLEAIRQIRNNNKISSCLIHMTYVPYISSADELKTKPTQHSVKELLNAGIQPDIIMCRCEKKIGNEAIKKISLFCNVKEKNVISALNANSIYEVPSLYCKAGLDKALLSELGFNYKKYPVNLKPWNNVVAKINKSSKEIIIAIVGKYTDLKD

SEQ ID NO: 195991 - protein, 288 aa, Unknown
  Bacterial polypetide isolated from the Sargasso Sea
GVVSSLGKGLSSASLAYLLKSQGYKVRLRKMDPYLNVDPGTMSPFQHGEVFVTDDGAETDLDLGHYERFTSISSKKSDNITTGKIYSDIIKKERRGGYLGKTVQVIPHITDRIKEFIKKDITNEDFVICEIGGTVGDIESLPFVEAIRQFSNEHGKSKTLFIHLTFVPFLKSSDEIKTKPTQHSVKELRSIGIQPDIIICRSQQSIPIDQRKKISLFCNVPIENVIETVDVRTIYEAPISFFNQKLDKQVLKYFKIKSKKRANLLPWKKITKITLNTKKIVNIGIIGK

SEQ ID NO: 195992 - protein, 153 aa, Unknown
  Bacterial polypetide isolated from the Sargasso Sea
MKDTRFIFVTGGVVSSLGKGIASASIGSILESKGYKVSVIKLDPYFNVDPGTMSPFQHGEVFVLEDGTETDLDLGHYERFIDNVCTKKNNFTAGKVYYSVLRKERKGEYLGKTVQIIPHITDEIKRKILNASKNCDIAIVEIGGTVGDIEGQP

SEQ ID NO: 195993 - protein, 127 aa, Unknown
  Bacterial polypetide isolated from the Sargasso Sea
MKTKFIFVLGGVMSGLGKGISASSIGYLLKSAGLKVNILKLDPYLNVDPGTMNPYQHGEVFVLDDGSETDLDLGHYERFIDENMSSKNNATAGQIYSTVLDKERSGSYLGETVQVIPHITDEIKNRM

SEQ ID NO: 195994 - protein, 221 aa, Unknown
  Bacterial polypetide isolated from the Sargasso Sea
MARYIFVTGGVVSSLGKGLSSASLAYLLKSQGFKVRIRKMDPYLNVDPGTMSPFQHGEVFVTDDGAETDLDLGHYERFTNINAKQSDNITTGKIYSDIIKKERRGGYLGKTVQVIPHVTDRIKEFIKKDITNEDFVICEIGGTVGDIESLPFLEAIRQFSNENGKSKSLFIHLTLVPYMKSSDEIKTKPTQHSVKELRSIGIQPDIVICRSEQSIPTDQKR

SEQ ID NO: 195995 - protein, 149 aa, Unknown
  Bacterial polypetide isolated from the Sargasso Sea
NVDPGTMSPYQHGEVFVTMDGFETDLDLGHYERFMDVELSKKSNVTAGQIYTEVLDKERSGFYLGGTIQTVPHVTDAIKSKIFDLAESSESDVILVEVGGTIGDIEGQPFIEAIRQLRNDSSTKNVFYIHLTLLPYLSTSDEIKTKPTQ

SEQ ID NO: 195996 - protein, 200 aa, Unknown
  Bacterial polypetide isolated from the Sargasso Sea
MKSKTKFIFVLGGVMSGLGKGISASSIGYLLKSAGLKVNILKLDPYLNVDPGTMNPYQHGEVFVLDDGSETDLDLGHYERFIDENMSKDNNATAGQIYSTVLDKERLGDYLGETVQVIPHVTDEIKNRIYELSKSNKYDIVICEVGGTVGDIESLPFLEAIRQLSLDVGYFNSLIIHLTLLPHVFSSGEIKTKPTQHSVM

SEQ ID NO: 195997 - protein, 233 aa, Unknown
  Bacterial polypetide isolated from the Sargasso Sea
MSKFVFVTGGVVSSIGKGIVAASLGRLLKSRGYSVSILKLDPYLNVDPGTMSPFQHGEVFVTEDGAETDLDLGHYERFTDTAMNRLNSVTTGSIYQAVINKERRGSYNGGTVQVIPHITGEIRERIHRVAANSNADIIITEIGGTVGDIESLPFLEAIREFRNDVKRNDVAYIHVTLLPYIKTSGEIKTKPTQHSVKELRSIGIQPDLLVCRSDKSINEGLKKKLSGFCGVKY

SEQ ID NO: 195998 - protein, 178 aa, Unknown
  Bacterial polypetide isolated from the Sargasso Sea
MARYIFVTGGVVSSLGKGLSSASLGYLLRSQGYKVRIRKMDPYLNVDPGTMSPFQHGEVFVTDDGAETDLDLGHYERFTNISAKQSDNITTGRIYSDIIKKERRGGYLGKTVQVIPHVTDRIKEFIKKDITNEDFVICEIGGTVGDIESLPFLEAIRQFSNDNGRSKSLFIHLTFVPF

SEQ ID NO: 195999 - protein, 283 aa, Unknown
  Bacterial polypetide isolated from the Sargasso Sea
VDVKTIYEAPISFNKEKLDKIVLKYFKLKSKKNVNLNPWKKITNVVLKTKPKVNIGLIGKYVNLKDAYKSLDEALIHGGIDNNVKVNLIRIESDKLKPNEIKEKLKNISGILIPGGFGKRGTEGKIEAIKYARQNKIPFLGICYGMQMAVIEYARNVLKIKKATSSEFSKTGVNVIGLIHEWNRDGKIFKGSKKELGGTMRLGLYEAKLKKNSLIRKIYKSGNISERHRHRYEVNIDYKDKFEDKGLIFSGMSPDHKLPEIIELKNHPWFVGVQFHPEFKSRP

SEQ ID NO: 196000 - protein, 291 aa, Unknown
  Bacterial polypetide isolated from the Sargasso Sea
ESLPFIEAIRQFANDVGKKNALFIHLTLVPYLKASDEIKTKPTQHSVKELRSIGVQPDIIICRSERSIPLEHRKKISLFCNVDIKNVIETVDVKTIYEAPISFFNQKLDIQVLKYFKLKSKKPVNLKPWKKITKIILQNKKQVNIAIIGKYVELKDAYKSLDEALTHGGIDNNIKVNLERIDSEKLKVSEIKKKLKNISGILIPGGFGKRGTDGKIEAIKHARINKIPFLGICYGMQMAIIEFARNQLNLQKATSSEFDKRGLHIIGLINEWTKDGKKIKGTDKDLGGTMR

SEQ ID NO: 196001 - protein, 315 aa, Unknown
  Bacterial polypetide isolated from the Sargasso Sea
LFCSVPNESVISMHDVDTVYSVPILLNKQKVDKTIIEKLKIKAKQPNLNDWKRVVKAKLMPEKEVNVSFVGKYTELKDSYKSINEALEHAGIKNKAKVNINFVEAENISSKNIKKTLKNADAVLVPGGFGERGIEGMILACKYARENNIPYLGICLGMQVAIIEYARNVLNLKGANSTEFDQNTKHPVIGLITEWNDISGKKEKRDKNSDLGGTMRLGGQLCKLKKGSNSLRMYKNSEIIERHRHRYEVNPKYKDDMIKKGLDVVGTSIDGKLVEMIEIPKHKWFLACQFHPEFTSKSRDGHPIFHSYIKSTLRK

SEQ ID NO: 196002 - protein, 231 aa, Unknown
  Bacterial polypetide isolated from the Sargasso Sea
MSTKFIFVTGGVVSSLGKGIAAASLAAILEARGLNVTILKLDPYINVDPGTMSPIQHGEVYVTEDGAETDLDLGHYERFIRTKMTSRNNFTQGRVYEDVLRRERRGEYLGATIQVIPHITNDIKQRVYEGAEGHDIAIVEIGGTVGDIESQPFIEAIRQMGTEIGRERALFIHLTLVPFLGPAGEVKTKPTQHSVKELRSVGIQPDILICRSDRKLPNNERAKIALFTNVE

SEQ ID NO: 196003 - protein, 290 aa, Unknown
  Bacterial polypetide isolated from the Sargasso Sea
YLGATIQVIPHVTNAIKDFIISDLKNEDFILCEIGGTVGDIESLPFLEAIRQLGNELGRDKTCFLHLTLVPFIAAAGELKTKPTQHSVKELQSVGIRPDVVLCRTEEHIPDDQKDKIALFCNIPKKSVIEAIDADSIYDVPLVYHKNGLDEVICDHFGIKPKEPNLKIWLDIKSAIKNPEGEINIAVVGKYTSLIDSYKSLDEALTHGGIANKTKVKVHWIDSSELKDENKFNAIFENIHGILVPGGFGERGSEGKILSIKYARENNIPFLGICFGMQMAVIEAARNLTS

SEQ ID NO: 196004 - protein, 81 aa, Unknown
  Bacterial polypetide isolated from the Sargasso Sea
MARFIFVTGGVVSSLGKGLSSASLAYLLQSRGFKVRLRKLDPYLNVDPGTMSPFHMVKFLSLTMEQKQILTLVIMRDFLVL

SEQ ID NO: 196005 - protein, 238 aa, Unknown
  Bacterial polypetide isolated from the Sargasso Sea
LGHYERFTNISAKKSDNITTGKIYSDIIRKERKGKYLGKTVQVIPHVTDRIREFIKGDITNEDFVICEIGGTVGDIESLPFVEAIRQFSNYVGRSKSLFIHLTFVPFLKSSDEIKTKPTQHSVKELRSLGIQPDIIICRSQKPIPTDQRKKISLFCNVSIENVIETVDVRTIYEAPISFYNEKLDKQVLKYFKLKPRKKVNLLPWKKITKTVLNTKKLVNIAIIGKYVNLKDAYKSLD

SEQ ID NO: 196006 - protein, 172 aa, Unknown
  Bacterial polypetide isolated from the Sargasso Sea
MSSKFARENNIPFLGICLGMQCAVIDFARNVCGLEGANSTEFNKRTKHPVIDLMESQRAIKIKGGTMRLGAYDCTIKPGTKAFSAYRSKNVSERHRHRFEVNNRYRKKLQKGGLIISGINEDLGVVETIEVAAHPWFVAGQFHPELKSRVNKSHPLFRDFIKASKKYNKRRS

SEQ ID NO: 196007 - protein, 154 aa, Unknown
  Bacterial polypetide isolated from the Sargasso Sea
VIEFARNRLNMRNATSSEFGPSKGSVVGLMSEWIKDGKLMKGTDKELGGTMRLGSYEARLKKGSLINSIYKSAKIFERHRHRYEVNINFKEKFEDKGMIFSGLSPNMKLPEIIELKNHPWFIGVQFHPEFKSRPLAPHPLFSSFIKAAKIKSNK

SEQ ID NO: 196008 - protein, 301 aa, Unknown
  Bacterial polypetide isolated from the Sargasso Sea
QVIPHITDEIKLRIENGAGDADVALVEIGGTVGDIESQPFLEAVRQLRVELGAEKALFVHLTLIPFISTAGETKTKPTQHSVKELRSIGIQPDILVCRSEKEIDQSARRKIALFTNVELPAVISLPDTDSIYRIPSTLGAAGLDEIVVNKLRLKCPTANFTEWDQVVESHLNPEQEIRLAMVGKYTDLLDAYKSLNEAIIHAGIQTRTRVEIEYIDSTDIMDNGAKSLLGHNAILVPGGFGERGFEGKILATQFARENKIPFLGICLGLQAAVIDYARNVAGLHGANSTELRVNVHILSSH

SEQ ID NO: 196009 - protein, 292 aa, Unknown
  Bacterial polypetide isolated from the Sargasso Sea
VSSLGKGLSSASLAYLLQSRGFKVRIRKLDPYLNIDPGTMSPFQHGEVFVTDDGAETDLDLGHYERFSGTSAKKSDNITTGKIYNDVLKRERQGKYLGKTVQVIPHITNRIKEFIKNDVAKEDFVICEIGGTVGDIESLPFLEAIRQFSNEIGIKNTLFIHLTLVPYMKASDEIKTKPTQHSVKELRSIGIQPNIIICRSERTIPLDQRKKISLFCNVDIKDVIETVDVKTIYEAPISFNKEKLDDRVLSYFKIKSKKKVNLQPWKKITQLVLKTKNSVNIGVIGKYVELKT

SEQ ID NO: 196010 - protein, 224 aa, Unknown
  Bacterial polypetide isolated from the Sargasso Sea
MKTKFIFVLGGVMSGLGKGISASSIGYLLKSAGLKVNILKLDPYLNVDPGTMNPYQHGEVFVLDDGSETDLDLGHYERFIDKNMSSKNNATAGQIYSRVLDKERSGSYLGETVQVIPHITDEIKNRMNALTDSKKYDIVICEVGGTVGDIESLPFLEAIRQLSLEVGYHNSLIIHLTLLPFIDASGELKTKPTQHSVMKLREIGLSPDFIFCRTQNEISQEIKE

SEQ ID NO: 196011 - protein, 207 aa, Unknown
  Bacterial polypetide isolated from the Sargasso Sea
LKILKIKWCSSSWRFGYRGMEGKIGAIEYLRKNKIPFLGICLGLQCAVIEFARNVCGISDANSTEFSQTTKNPVIDLLPNQDLEADDVGASMRLGTYPCKIQPDTMVKDIYNNEIIYERHRHRYEVNNKFRNELESKGLVFSGLSPDEDLVEMIELKDHPYFVASQFHPEFKSRPWDPAPMFNSFIAASKEIKFFDENVKDEHKVKD

SEQ ID NO: 196012 - protein, 281 aa, Unknown
  Bacterial polypetide isolated from the Sargasso Sea
KSRGYNVSILKLDPYLNVDPGTMSPIQHGEVFVTEDGAETDLDLGHYERFTDTAMSRLNSVTTGSIYQAVINKERRGDYNGGTVQVIPHITGEIRERIHRVAANSNADVVITEIGGTVGDIESLPFLEAIREFRGDVGRNDLAYIHVTLLPFIGTSGELKTKPTQHSVKELRSIGIQPDVLVCRSDRTISEEMKRKIGGFCGVPTRAVIPSLDADSIYAVPLTLEQEGLCREVLDVLDLTDHDSDMAAWQELVHKLRNPGPAVKVALVGKYIQLNDAYLSV

SEQ ID NO: 196013 - protein, 56 aa, Unknown
  Bacterial polypetide isolated from the Sargasso Sea
MTTRYIFVTGGVVSSLGKGIAAASLAAILEARGLNVTIMKLDPYIKVDPGTMSPTQ

SEQ ID NO: 196014 - protein, 321 aa, Unknown
  Bacterial polypetide isolated from the Sargasso Sea
KRGEYLGKTVQVIPHITDRIKQFIKNDSSKEDFVICEIGGIVGDIESLPFVEAIRQFANDVGKKNALFIHLTLVPFLKASDEIKTKPTQHSVKELRSIGIQPDIIICRSERPIPLEHRKKISLFCNVDIKNVIETVDVKTIYEAPISFFREKLDIQVLNYFNLKSKKPVNLKPWKKITKIILQNKKQVNIAIIGKYVELKDAYKSLDEALTHGGIDNNIKVNLVRIDSEKLKVSEIKKKLNNISGILIPGGFGKRGTDGKIEAIKHARKNKIPFLGICYGMQMAIIEFARNQLNLKKATSSEFDRKGLPIIGLINEWTKDG

SEQ ID NO: 196015 - protein, 300 aa, Unknown
  Bacterial polypetide isolated from the Sargasso Sea
MVKKILWFIHLTLVPYMKSSDEIKTKPTQHSVKELRSIGIQPDIIICRSERSIPLDQKKKISLFCNVDIKNVIQTVDVKTIYEAPISFYTEKLDKQVLDYFKIKSRKNVNLNPWKKITKVVLNQKKYVNIAIIGKYVNLKDAYKSLDEALVHGGIDNNLKVNLVRIESDNLKPSDIKNKLKNVSGILIPGGFGKRGTDGKIAAIKYARLNKIPFLGICFGMQMAIIEFAKNVLKIRKASSTELNPKCIPVIGLIHEWRKNGKIIKGTNKDLGGTMRLGSYDAELLNNSLVKNIYKSKIIK

SEQ ID NO: 196016 - protein, 132 aa, Unknown
  Bacterial polypetide isolated from the Sargasso Sea
MPEQQDVVDLGGTMRLGVYPCRIAPGTLAQRLYGDEVVYERHRHRYEFNNSYRNLFLESGYVVSGTSPDGRLVELIELKGHPFFTACQYHPEFLSRPGQPHPLFRGLIEAAQQRLPDSPAQALRQQGDIAIP

SEQ ID NO: 196017 - protein, 224 aa, Unknown
  Bacterial polypetide isolated from the Sargasso Sea
MAQTKYIFITGGVVSSLGKGIAAASIGALFEARGLKVSLNKLDPYINVDPGTMSPFQHGEVFVTNDGTETDLDLGHYERFVRFQASKKNNFTAGKVYEEVIQNERRGDYLGGTVQVIPHITDEIKRRIKLGAKGADIAIVEIGGTVGDIESQPFIEAIRQMMLELPTTSSALAHLTLVPYIQVSEELKTKPTQHSVKELRSLGLQPDCLICRLEKELPQEKRKK

SEQ ID NO: 196018 - protein, 303 aa, Unknown
  Bacterial polypetide isolated from the Sargasso Sea
NASCHNITAGKIYHNVIQKERKGDYLGATVQVIPHITDEIKKHIKNLQGEVDVVICEIGGTVGDIESLPFLEAIRQFRFEVKPKDILYVHLTLVPYIKTSDELKTKPTQHSVQKLREIGIQPDVLLCRTEKQLSKSLKEKIALFCNVDTRSVITAMDVSSIYEVPLSLEKEGLREIILEKLGMKVEQPDLERWENINKILKKPAGKVKIGIVGKYVDLKESYKSLTEALIHGGIGNNVGVKFNWVDAEELENENGLKQLTECDGVLVPGGFGDRGIEGKINAVRFAREIRYLILEFAWECIAR

SEQ ID NO: 196019 - protein, 114 aa, Unknown
  Bacterial polypetide isolated from the Sargasso Sea
MARYIFVTGGVVSSLGKGLSSASLAYLLQSRGYKVRLRKLDPYLNVDPGTMSPFQHGEVFVTDDGAETDLDLGHYERFTDISAKQSDNITTGRIYSDIIQRERKGGYLGKTVQV

SEQ ID NO: 196020 - protein, 299 aa, Unknown
  Bacterial polypetide isolated from the Sargasso Sea
YLLKSQGYKVRIRKMDPYLNVDPGTMSPFQHGEVFVTNDGAETDLDLGHYERFTNISAKKSDNITTGKIYSDIIKKERKGKYLGKTVQVIPHVTDRIREFIKDDITNEHFVICEIGGTVGDIESLPFVEAIRQFSNEVGRRKSLFIHLTFVPFLKSSDEIKTKPTQHSVKELRSLGIQPDIIICRSQKNIPLDQRKKISQFCNVSIENVIETVDVRTIYEAPISFYNEKLDKQVLKYFKLKPKKKVNLQPWKKITKTVLNTKKVVNIAIIGKYVNLKDAYKSLDEALIHGGINNNVKVN

SEQ ID NO: 196021 - protein, 104 aa, Unknown
  Bacterial polypetide isolated from the Sargasso Sea
MTRYIFITGGVVSSLGKGLASAVLGSLLQLRGYQVRLRKLDPYLNVDPGTMSPTQHGEVFVTDDGAETDLDLGHYERFTGVTTKKTDNVTTGRIYSDVLAKERR

SEQ ID NO: 196022 - protein, 311 aa, Unknown
  Bacterial polypetide isolated from the Sargasso Sea
RLRKLDPYINVDPGTMSPYQHGECYVTEDGAETDLDLGHYERFTGVSSRRSDNVTTGRIYSNVIARERRGDYLGGTVQVIPHITDAIKEFVMSDATEDFVLVEIGGTVGDIESLPFLEAIRQMGNDLGDGRALFMHLTLVPYISSAGELKTKPTQHSVKELQSVGIQPDILLCRCDREIPINERRKIARFCNVREAAVIPAYDVDNIYQVPISYHQYGLDNEVLHHFGLQAQEPDLQPWEDICSTIRNPEGEVTIGIVGKYIQLPDAYKSLTEALTHGGIANKVRVNLEWIASDALEKEDNVSEILSKLDA

SEQ ID NO: 196023 - protein, 135 aa, Unknown
  Bacterial polypetide isolated from the Sargasso Sea
MAKTKYIFITGGVVSSLGKGIAAASIGALLEARGLSVSLIKVDPYINVDPGTMSPFQHGEVFVTNDGTETDLDLGHYERFVRFQASKKNNFTAGKVYEAVIRNERKGKYLGGTVQVIPHITNEIKKRIKEGGQNK

SEQ ID NO: 196024 - protein, 101 aa, Unknown
  Bacterial polypetide isolated from the Sargasso Sea
QLCHLIEGTKVHEMYGSAEIYERHRHRYEVNNNLRDQIEAAGLKVSGLSTDKRLVEVVEIPDHPWFIAGQFHPEFTSTPRDGHPLFTGFVAAAGKYQKENH

SEQ ID NO: 196025 - protein, 138 aa, Unknown
  Bacterial polypetide isolated from the Sargasso Sea
MARYIFVTGGVVSSLGKGLSSASLAYLLKSQGYKVRIRKMDPYLNVDPGTMSPFQHGEVFVTNDGAETDLDLGHYERFTNISAKKSDNITTGKIYSDIIKKERKGKYLGKTVQVIPHVTDRIREFIKGDITNEDFVIC

SEQ ID NO: 196026 - protein, 181 aa, Unknown
  Bacterial polypetide isolated from the Sargasso Sea
KIAAVQFARERRIPYFGICFGMQMAVIEAARNLSGIKGAGSTEFGNCDHPVVGLLTEWIKEGVTEERHDKDDLGGTMRLGAYDCDLIPNSRVWDIYGTDRISERHRHRYEVNIDYKERLETAGLIFSGMSPDKKLPEIVEIPDHPWFVAVQFHPELKSKPFDPHPLFKHFVSAAVYQSRLV

SEQ ID NO: 196027 - protein, 179 aa, Unknown
  Bacterial polypetide isolated from the Sargasso Sea
MQYVFITGGVASSLGKGIASAALASLLQQRKFKVRIRKLDPYLNVDPGTMSPYQHGEVFVTDDGAETDLDLGHYERFTNRSAKKTDSTSSGKIYSNVLKKERKGDYLGATIQVIPHVTDEIKLFINSNFEDEDIIIYEIGGTVGDIESLPFLEAIRQIRNDKNISSALIHMTYVPYLSS

SEQ ID NO: 196028 - protein, 245 aa, Unknown
  Bacterial polypetide isolated from the Sargasso Sea
GKYVELKDAYKSLDEALTHGGIANNIKVNLVRIESDFLRPSEIKNKLKNVSGILIPGGFGKRGTEGKIAAINYSRKNKIPFFGICFGMQMAIIEFARNRLNIKKATSSEFGPSKTSVVGLMSEWTKDGKLMRGTDKELGGTMRLGSYEARLKKDTKISKIYNSLKINERHRHRYEVNINYRKDFENKGMIFSGLSPDNKLPETVELKDHPWFIGVQFHPEFKSRPLSPHPLFSSFIKAAKINSKK

SEQ ID NO: 196029 - protein, 132 aa, Unknown
  Bacterial polypetide isolated from the Sargasso Sea
MARYIFVTGGVVSSLGKGLSSASLAYLLQSRGFKVRIRKLDPYLNVDPGTMSPFQHGEVFVTDDGAETDLDLGHYERFSGISAKKSDNITTGKIYNDVLKKERKGKYLGKTVQVIPHITDRIKEFIKDDVNK

SEQ ID NO: 196030 - protein, 318 aa, Unknown
  Bacterial polypetide isolated from the Sargasso Sea
TLVPYINASGELKTKPTQHSVKELRSLGISPDVLVCRSEQELPKDEKKKIALFCSVPNESVISMHDVDTVYSVPILLNKQKVDKTIIEKLKINAKQPNLNDWKRVVKAKLMPEKEVNVSFVGKYTELKDSYKSINEALEHAGIKNKAKVNINFVEAENISSKNIKKTLKNADAVLVPGGFGERGIEGMILACKYARENNIPYLGICLGMQVAIIEYARNVLNLKGANSTEFDQNTKHPVIGLITEWNDISGKKEKRDKNSDLGGTMRLGGQLCKLKKGSNSLRMYKNSEIIERHRHRYEVNPKYKDDMIKKGLDVVGT

SEQ ID NO: 196031 - protein, 233 aa, Unknown
  Bacterial polypetide isolated from the Sargasso Sea
LFIHLTFVPFLKSSDEIKTKPTQHSVKELRSIGIQPDIVICRSQQSIPLDQRRKISLFCNVDIANVIETVDVKTIYEAPISFFNQKLDKQVLKFFKIKSRKRPHLLPWKKITNIVLKTKRTVNIAIIGKYVNLKDAYKSLDEALTHGGISNKVKVNLVRIESDKLRSKEIKSKLKNVSGILIPGGFGKRGTEGKIEAIRYARERKIPFLGICFGMQMAMIEFARNILKIKKAG

SEQ ID NO: 196032 - protein, 243 aa, Unknown
  Bacterial polypetide isolated from the Sargasso Sea
LIDSYKSLNEALTHGGISNKTRINITWMDSSDLNNKNISSEKFENIHGILVPGGFGQRGSEGKIEAIKFARVNKIPFLGICFGMQMAVIEAARNLSFIEDAGSSEFGDFESPIVGLLTEWVKGSNVEKRSSTDDLGGSMRLGSYECHIIKNSLAEKVYGQSIIFERHRHRYEVNIKYKENLEKIGLRFSGMSPDRILPEIIEYENHPWFIGVQFHPELKSKPFDPHPLFKCFIKASSKYSRLV

SEQ ID NO: 196033 - protein, 189 aa, Unknown
  Bacterial polypetide isolated from the Sargasso Sea
MTQYIFITGGVASSLGKGLTSAALGALLQSRGFNVKIKKLDPYLNVDPGTMNPFQHGEVFVTDDGAETDLDLGHYERFTNVPSSINDNITTGQIYKRIISKERKGDYLGRTVQIIPHVTDEIKEFILSNNDNIDFCLCEIGGTVGDIEGLPFFEAIRQLSNELKKNMTCFLHLTLVPYISAAGEVKTKP

SEQ ID NO: 196034 - protein, 275 aa, Unknown
  Bacterial polypetide isolated from the Sargasso Sea
KLKSKKRANLVPWKRITKIVLNTKKCVNIAIIGKYVNLKDAYKSLDEALIHGGISNKVKVNLIRIESDNLKSNEIKKTLKNVSGLLIPGGFGKRGTEGKISAIKYARENKIPFLGICFGMQMAIIEFARNKLKIKKAGSSELDKKCYPVIGLINEWDKNGKIIKGTDKNLGGTMRLGLYEAKLRNNSAINRIYKLKSIKERHRHRYEVNNNLKNQFERKGLIFSGMSPDNKLPEIIELKNHPWFIGVQFHPEFKSRPLAPHPLFSSFIKASKNHK

SEQ ID NO: 196035 - protein, 319 aa, Unknown
  Bacterial polypetide isolated from the Sargasso Sea
IASASLATLLLSRNFKVRIRKLDPYLNVDPGTMSPYQHGEVYVTDDGAETDLDLGHYERFTNQSAKKSDSISSGKVYSNVLNKERRGDYLGATIQVIPHVTNEIKNFINSDLNKEDIVIYEIGGTVGDIESLPFLEAIRQIRNDRSISSALIHMTYIPYLSSAGELKTKPTQHSVKELLNAGIQPDIIMCRSERIIDKDSISKISLFCNVKKDSVIPALNANSIYEVPSLYSKFGLDKILLKHLNYKPNKHPLNLKSWNNLLKKIKLQKYNVTIGVVGKYTNLKDSYKSLNEALVHGGIENSTKVEIKWIHAEKINKKI

SEQ ID NO: 196036 - protein, 245 aa, Unknown
  Bacterial polypetide isolated from the Sargasso Sea
KTVQVIPHITNEIKERMQILGKTEDYDIIITEIGGTVGDIESLPYIESVRQIVYELGDNNSMVIHLTLIPFLSATGELKTKPTQHSVKTLMESGIKADVIVCRTENDLSSDLRDKIALFCNVRREAVIQSIDVETIYDVPLKMLEEGLNKVVIKKLSLKPNSEPNLEQWKSFLKKYKNPKKSIEVALVGKYVELQDSYKSILESLIHAGAYNEVEVKVKSVHSEDLEKGESIDLLSGFNGIIVAP

SEQ ID NO: 196037 - protein, 236 aa, Unknown
  Bacterial polypetide isolated from the Sargasso Sea
MARYIFVTGGVVSSLGKGLSSASLAYLLKSQGYKVRLRKMDPYLNVDPGTMSPFQHGEVFVTDDGAETDLDLGHYERFTNISSKQSDNITTGRIYSDVIKKERKGGYLGKTVQVIPHITNRIKEFIKKDITNEDFVICEIGGTVGDIESLPFVEAIRQFSNEYGKSKTLFIHLTFVPFLKSSDEIKTKPTQHSVKELRSIGVQPDIIICRSQQSIPLDQRKKISLFCNVPIENVIE

SEQ ID NO: 196038 - protein, 182 aa, Unknown
  Bacterial polypetide isolated from the Sargasso Sea
MARYIFVTGGVVSSLGKGLSSASLAYLLKSQGYKVRLRKMDPYLNVDPGTMSPFQHGEVFVTDDGAETDLDLGHYERFTNISSKKSDNITTGRIYSDIIKKERRGGYLGKTVQVIPHITDRIKEFIKKDISNEDFVICEIGGTVGDIESLPFVEAIRQFSNEHGKSKTLFIHLTFVPFLKSS

SEQ ID NO: 196039 - protein, 199 aa, Unknown
  Bacterial polypetide isolated from the Sargasso Sea
QKKLSNVSGIIIPGGFGKRGTEGKIACINYARTKKIPFLGICFGMQMAVIEFARNVLKIKNAGSSEFDKNCYPVIGLIEEWNKNGRKIKGTVKNLGGTMRLGLYPAKLQHNSLIKEIYKSSQIKERHRHRYEVNVNLRKKFETHGLNFSGMSPDNNLPEIVEIKNHPWFIGVQFHPEFKSRPLQPHPLFSSFIRAAKNT

SEQ ID NO: 196040 - protein, 131 aa, Unknown
  Bacterial polypetide isolated from the Sargasso Sea
FPVIGLIDEWNKDGKIIKGTDKNLGGTMRLGLYEAKLRNNSAIKNVYKSSTIKERHRHRYEVNINLMQKFEKKGLIFSGISPDNKLPEIIELKNHPWFIGVQFHPEFKSRPLNPHPLFSSFIKAAKSFNGN

SEQ ID NO: 196041 - protein, 160 aa, Unknown
  Bacterial polypetide isolated from the Sargasso Sea
RVIDVARNLAGLEKANSTEIDLKTDHPVIALITEWQDSSGRIETRSENDDLGGTMRLGEQACKLASGSLSRHLYGEETVNERHRHRYEFNNNYAAQLVSAGLVLAGHSEDGTLVEVVEIDDHPWFVGCQFHPEFTSSPRNGHPLFSGFVEAGLKKQAENS

SEQ ID NO: 196042 - protein, 233 aa, Unknown
  Bacterial polypetide isolated from the Sargasso Sea
SLLHAGIKTRTKVNINYIDSEDIERDGTSVLESADAILVPGGFGERGVEGKIRTVQYARENKVPYLGICLGMQVAVIEYARNVAGLKDAHSTEFREHTPEPVVGLITEWLDATGEKEERTEESDLGGTMRLGAQDCVLTEGSTIVGCYGKKTIRERHRHRYEVNNHFLPRLEEAGLQISGRSADGKLVEVVEAPDHPWFVACQFHPEFTSTPRDGHPLFKGFVEAALANKKGS

SEQ ID NO: 196043 - protein, 202 aa, Unknown
  Bacterial polypetide isolated from the Sargasso Sea
MPNFIFITGGVVSSLGKGLASAALGAILQSRGFKVRLRKLDPYLNVDPGTMSPTQHGEVFVTDDGAETDLDLGHYERFTGVSAKKSDNVTTGQIYSQVIAKERKGEYLGATIQVIPHVTNAIKDFIISDLKNEDFILCEIGGTVGDIESLPFLEAIRQLGNQLGRDKTCFLHLTLVPFIAAAGELKTKPTQHSVKELQSVGI

SEQ ID NO: 196044 - protein, 276 aa, Unknown
  Bacterial polypetide isolated from the Sargasso Sea
CNVNIKNVIETVDVRTIYEAPISFYKEKLDLQVLNYFKLKSKKPVNLTPWKKITKIILHTKKHVNIAIIGKYVDLKDAYKSLDEALTHGGIDNNVKINLVRIDSENLKVSEIKSKLKNISGILIPGGFGKRGTDGKIAAIKFARINKIPFLGICYGMQMAIIEFARNKLNLKKATSSEFDKKGLAIIGLMNEWNKDGKKIKGTDKNLGGTMRLGSYDAKLLKNSMIQKIYGKNLIKERHRHRYEVNIAFKEKFEKNGMNFSGLSPDGNLPEIIELK

SEQ ID NO: 196045 - protein, 237 aa, Unknown
  Bacterial polypetide isolated from the Sargasso Sea
MDPYLNVDPGTMSPFQHGEVFVTDDGAETDLDLGHYERFTNISAKKNDNITTGKIYSDIIFRERKGDYLGKTVQVIPHVTERIKQFIKKDIKNEDFVICEIGGTVGDIESLPFLEAIRQFSNDIGKEKTLFVHLTLVPFLKSSDEIKTKPTQHSVKELRSIGIQPDIIICRSQQSIPLDQRKKISLFCNIPIERVIETVDVKTIYEAPISFYNEGLDKQVLKYFKIKPKKKINLFPW

SEQ ID NO: 196046 - protein, 165 aa, Unknown
  Bacterial polypetide isolated from the Sargasso Sea
IPFFGICFGMQMAVIEAARNLLNIKNASTSEFGNNCTPVVGLLEEWQKGKKKMKGTEKNLGGTMRLGLYDAVLKNNSLISKIYSEKRIKERHRHRYEVNIKYKNDFEKKGLIFSALSPDGSLPEIIELRDHPWFVGVQFHPEFKSRPFTPHPLFSSFIKAAGGKN

SEQ ID NO: 196047 - protein, 225 aa, Unknown
  Bacterial polypetide isolated from the Sargasso Sea
GINNNLKVNLIRIESDRLKPGEIKNKLKDVSGILIPGGFGKRGTEGKIAAINFARKNNIPFLGICFGMQMAVIEFARNKLNIKNATSSEFGPSKASVVGLMSEWTKDGKLIRGTDKNLGGTMRLGSYEARLKKDTKVSKIYNSLKINERHRHRYEVNINYKEKFENKGMIFSGLSPDNKLPEIVELNDHPWFIGVQFHPEFKSRPLTPHPLFSSFIKAAKTYSKK

SEQ ID NO: 196048 - protein, 136 aa, Unknown
  Bacterial polypetide isolated from the Sargasso Sea
DKNCLPIIAFFNEWNKKGKLVKGTDKSLGGTMRLGEYPANLKTKSLIMGIYKNKKIFERHRHRYEVNMNYKNIFEKKGMLFSALSPDKLLTEIIELKNHPWFIGVQFHPEFKSRPMKPHPLFVSFINAAKKNYEKF

SEQ ID NO: 196049 - protein, 241 aa, Unknown
  Bacterial polypetide isolated from the Sargasso Sea
YVELKDAYKSLDEAFTHGGISNNLKVNLVRIDSEKLKVSEIKNKLKNVSGILIPGGFGKRGTEGKIEAIRYARKNKIPFLGICYGMQMAILEFARNQLKIKKATSSEFDKEGVHIIGLMHEWEKSGRKVKGTNKDLGGTMRLGSYDAILKDKSKIRDIYKSKLIKERHRHRYEVDISYKEKFEKKGLIFSGLSPDHKLPEIIELKNHPWFIGVQFHPEFKSRPLNPHPLFSSFIKAAKNHR

SEQ ID NO: 196050 - protein, 268 aa, Unknown
  Bacterial polypetide isolated from the Sargasso Sea
GTMNPYQHGEVFVLDDGSETDLDLGHYERFIDVNLSKLNTTSSGRVYWDVLERERRGDYLGDTIQVIPHITDEIKDRINRVNPRKKYDIIITEVGGTVGDIEGLPFYEAIRQMILDKGKSNSIVIHTTLLPFINAAGEVKTKPTQHSVMRLREIGLEPDILVCRTEDSNHLNDSLKKKLGLFCNVHPSHVFESPDVDTIYSIPLVLFEQKFDKIILNRLGYKKTPRHNNIKQLKTFVKRFTNPKLEVNIAICGKYNGLHDAYKSIMKH

SEQ ID NO: 196051 - protein, 82 aa, Unknown
  Bacterial polypetide isolated from the Sargasso Sea
NSIKERHRHRYEVNNNLKRQFENKGLIFSGMSPDNNLPEIIELKNHPWFIGVQFHPEFKSRPLLPHPLFSSFIKAAKSYNGK

SEQ ID NO: 196052 - protein, 210 aa, Unknown
  Bacterial polypetide isolated from the Sargasso Sea
MARYIFVTGGVVSSLGKGLSSASLAYLLQSRGYKVRIRKLDPYLNVDPGTMSPFQHGEVFVTDDGAETDLDLGHYERFSGISAKKSDNITTGKIYNDVLKRERQGEYLGKTVQVIPHITNRIKEFIKNDVAKEDFVICEIGGTVGDIESLPFLEAIRQFSNEIGKKNTLFIHLTLVPYMKASDEIKTKPTQHSVKELRSIGIQPEYNYLQ

SEQ ID NO: 196053 - protein, 168 aa, Unknown
  Bacterial polypetide isolated from the Sargasso Sea
KIPFLGICFGMQMAVIEFARNKLNIKKATSSEFGPSRASVVGLMSEWTKNGKLMKGTDKDLGGTMRLGSYEARLKKDTKISKIYNSVKINERHRHRYEVNINYKKDFENKGMIFSGLSPDNKLPETIELENHPWFIGVQFHPEFKSRPLSPHPLFSSFIKAAKINKTK

SEQ ID NO: 196054 - protein, 230 aa, Unknown
  Bacterial polypetide isolated from the Sargasso Sea
MNNKLAAKFIFITGGVVSSLGKGLASASLGAILQARGYKIKLRKLDPYLNVDPGTMSPYQHGECYVTDDGAETDLDLGHYERFTGVNAKKSDNITTGKIYSNVIAKERRGDYLGATIQVIPHVTDAIKEYILSDINNEDFILCEIGGTVGDIESLPFIEAIRQLGNELGLSKTCFLHVTLLPFIKTAGELKTKPTQHSVKELQGMGIQPDILLCRTENIIPQEQKSKIAL

SEQ ID NO: 196055 - protein, 293 aa, Unknown
  Bacterial polypetide isolated from the Sargasso Sea
DEKKKIALFCSVPNESVISMHDVNTVYSVPILLNKQKVDKTIIEKLKIKAKQPNLNDWKRVVKAKLMPEKEVNVSFVGKYTELKDSYKSINEALEHAGIKNKAKVNINFVEAENISSKNIKKTLKNADAVLVPGGFGERGIEGMILACKYARENNIPYLGICLGMQVAIIEYARNVLNLKGANSTEFDQNTKHPVIGLITEWNDISGKKEKRDKNSDLGGTMRLGGQLCKLKKGSNSLRMYKNSEIIERHRHRYEVNPKYKDDMIKKGLDVVGTSIDGKLVEMIEIPKHKWFL

SEQ ID NO: 196056 - protein, 91 aa, Unknown
  Bacterial polypetide isolated from the Sargasso Sea
MNSSPKYVFVTGGVSSSLGKGIISASLAKLLQSRGLNVTIQKFDPYINIDPGTLNPYEHGECYVTDDGTETDLDLGHYERFLDIKTSNSKH

SEQ ID NO: 196057 - protein, 130 aa, Unknown
  Bacterial polypetide isolated from the Sargasso Sea
MARYVFVTGGVVSSLGKGLSSASLASLLQLRGFKVRVRKLDPYLNVDPGTMNPFQHGEVYVTDDGAETDLDIGHYERFTGISATQSDNITTGAIYSDIIKKERRGDYLGGTVQVVPHVTDRIKKFISQDV

SEQ ID NO: 196058 - protein, 120 aa, Unknown
  Bacterial polypetide isolated from the Sargasso Sea
MSSTTKYIFVTGGVTSSLGKGIVSASLAKLLQSRGFTVTIQKLDPYINVDPGTLNPYEHGECYVTEDGAETDLDLGHYERFLDVNTSQDNNVTTGRIYQSVINKERRGDYLGKTVQVIPH

SEQ ID NO: 196059 - protein, 99 aa, Unknown
  Bacterial polypetide isolated from the Sargasso Sea
MTRFIFVTGGVVSSLGKGLASACLGALLQARGYSVRLRKLDPYINVDPGTMSPYQHGEVFVTDDGAETDLDLGHYERFTGVSAKKTDNVTAGRIYQNVI

SEQ ID NO: 196060 - protein, 181 aa, Unknown
  Bacterial polypetide isolated from the Sargasso Sea
VKFAAIKYARLNNIPFFGICFGMQMAVIEAARNLLNIKNASSSEFGNNCTPVVGLLEEWQKGKKIFKGSEKDLGGTMRLGLYDAVIKNNSLISKIYSEKRIKERHRHRYEVNIKYKKEFEKKGLIFSALSPDGTLPEIIELNNHPWFVGVQFHPEFKSRPFTPHPLFSSFIKAANLRRRIN

SEQ ID NO: 196061 - protein, 318 aa, Unknown
  Bacterial polypetide isolated from the Sargasso Sea
VAANSNADIIITEIGGTVGDIESLPFLEAIREFKNDVNRNDVAYIHVTLLPYIKTSGEIKTKPTQHSVKELRSIGIQPDLLVCRSDKSINEALKKKLSGFCGVSINSVIEALDADSIYSVPLSLKKEGLCKETLQYLDLEDKKCDLKNWEQLIHNLRNPGAPIKVALVGKYIELGDAYLSVVEALRHACIEQKALLDLHWVSAEMIEKNSAETYLNAVDAIVVPGGFGNRGVNGKISAIKFARENKIPFLGLCLGMQCAVIEWARNVANLPDASSSELDPNTPNPVIHLLPEQEDVVDLGGTMRLGVYPCRLTKIQLE

SEQ ID NO: 196062 - protein, 167 aa, Unknown
  Bacterial polypetide isolated from the Sargasso Sea
CRENKIPFLGLCLGMQCAVIEWARNVANLPDASSSELDPNTPNPVIHLLPEQEDIVDLGGTMRLGVYPCRLTNNTTGKNLYDEDVIYERHRHRYEFNNYYKQSFLNSGYKISGTSPDGRLVELIELENHPYFLACQYHPEFLSRPGKPHPLFKGLIKASQKKLTQSN

SEQ ID NO: 196063 - protein, 199 aa, Unknown
  Bacterial polypetide isolated from the Sargasso Sea
MSKFIFITGGVVSSLGKGLASAALGTLLQSRGYKVRLRKLDPYLNVDPGTMSPYQHGEVYVTDDGAETDLDLGHYERFTGVPAKKSDNVTTGQLYMDVLSRERRGDYLGATIQVIPHVTDAIKEFVKSDISDEDFILCEIGGTVGDIESLPFLEAIRQLGNELGRERSLFVHFTLVPFIASAGELKTKPTQHSVKELQS

SEQ ID NO: 196064 - protein, 279 aa, Unknown
  Bacterial polypetide isolated from the Sargasso Sea
RSEGSIPEKEREKLALFCNVRPESVIAAQDLKSIYEAPIVYNREGLDQAVLDAFNIAPAPKPDLSIWEDVADRVHNPEGEVNVAIVGKYTQLEDAYKSIAEALTHGGLANRVKVNIEWVDAETFDKKDSTSELQGFNAILVPGGFGERGTEGKIRAAQFARENHVPYLGICLGMQMAVIEAARNVAGYKNAGSEEFDHEAGKKRFEPVVYHLKEWIQGNQTIERSVSDDKGGTMRLGAYNATLLDGSKVASIYGISQIEERHRHRYEVDTKYQKKLESV

SEQ ID NO: 196065 - protein, 168 aa, Unknown
  Bacterial polypetide isolated from the Sargasso Sea
MARFIFVTGGVVSSIGKGLSSASLASLLISQGYKVRVRKLDPYLNIDPGTMSPFQHGEVFVTDDGAETDLDLGHYERFTNTSSRQSDNITTGKIYSDILKREREGGYLGKTVQVIPHVTDRIKQFIKHDTKKEDFVICEIGGTVGDIESLPFLEAIRQFSNDIEKKNT

SEQ ID NO: 196066 - protein, 97 aa, Unknown
  Bacterial polypetide isolated from the Sargasso Sea
MGNKQTRFLFVTGGVVSSLGKGVAAASLGAVLESRGLSVTILKLDPYINLDPGTMSPFQHGEVFVTEDGSETDLDLGHYERFLTSKMSKSNNFTTGQ

SEQ ID NO: 196067 - protein, 112 aa, Unknown
  Bacterial polypetide isolated from the Sargasso Sea
MARFIFVTGGVVSSLGKGLASASLASLLQHHGYKVRIRKLDPYLNVDPGTMSPYQHGEVYVTDDGAETDLDLGHYERFTGVTSKKSDNITSGKVYQKIIGKERKGEYLGATV

SEQ ID NO: 196068 - protein, 285 aa, Unknown
  Bacterial polypetide isolated from the Sargasso Sea
ELVVLVGDIESLPFMEAIRQLSLKVGYHNHLIVHLTLLPYIKASGELKSKPTQHSVMKLREIGLSPDMILCRSEYKIDRSIRDKIALFCNVRSDHVFEGRDVESIYEVPLVMDEQNMGGLINDRLQLDKKPDLSLLKGFVKRYKNPKKEINIAMCGKYTELIDSYKSVMESFVHAGVENNSKVNVKWVKTENIKNDKKAKNQFRNIDGILILPGFGSRGGEGKILSSKYARENNIPFLGICLGMQCAIIDFARHVCSLKGANSTEFNKRTKYPVIDLMESQKAIK

SEQ ID NO: 196069 - protein, 281 aa, Unknown
  Bacterial polypetide isolated from the Sargasso Sea
FIEAIRQLGLELMSYQTSYLHLTLVPYLSNAGELKTKPTQHSVKEYRTLGVQPDILICRSEYALPQESKEKIALFCSMPKDGVISLPNLETIYQAPLFLSEEGIDKILTKRLQLDKTIPNLRDWKKVIKRKIKPSKELNVSFVGKYVDLKDAYFSLIEALDHAGIHNDTKININYINSEKIESSNYKKVLKNSDAILVPGGFGNRGIEGMILASKFARENKIPYFGICLGLQIAIIEMTRNLLNLKDANSTEFKPRTKNKAISLVTEWKNKDGTIEKKNKN

SEQ ID NO: 196070 - protein, 282 aa, Unknown
  Bacterial polypetide isolated from the Sargasso Sea
KERKGKYLGKTVQVIPHVTDRIREFIKGDITNEDFVICEIGGTVGDIESLPFVEAIRQFSNDVGRSKSLFIHLTFVPFLKSSDEIKTKPTQHSVKELRSLGIQPDIIICRSQKSIPLDQRKKISLFCNVSIENVIETVDVRTIYEAPISFYNEKLDKQVLKYFKLKPRKKVNLLPWKKITKTVLNTKKIVNIGIIGKYVNLKDAYKSLDEALIHGGINNNIKVNLTRIESDKLKPNQIKKVLKNVSGILIPGGFGKRGTEGKISAISYARRNKIPFLGICFG

SEQ ID NO: 196071 - protein, 63 aa, Unknown
  Bacterial polypetide isolated from the Sargasso Sea
MARYIFVTGGVVSSLGKGLSSASLAYLLKSQGYKVRLRKMDPYLNVDPGTMSPFQHGEVFVTD

SEQ ID NO: 196072 - protein, 239 aa, Unknown
  Bacterial polypetide isolated from the Sargasso Sea
GKGLSSASLAYLLKSQGYKVRIRKMDPYLNVDPGTMSPFQHGEVFVTNDGAETDLDLGHYERFTNISAKKSDNITTGKIYSDIIKKERKGNYLGKTVQVIPHVTDRIREFIKGDISNEDFVICEIGGTVGDIESLPFVEAIRQFSNEVGRSKSLFIHLTFVPFLKSSDEIKTKPTQHSVKELRSLGIQPDIIICRSQKSIPLDQRKKISLFCNVSIDNVIETVDVRTIYEAPISFFNEK

SEQ ID NO: 196073 - protein, 243 aa, Unknown
  Bacterial polypetide isolated from the Sargasso Sea
MSDYIFVTGGVVSALGKGVTSASLGAILESRGLNVGMMKLDPYLNVDPGTMSPYQHGEVFVTEDGTETDLDLGHYERYVSTITGKHSNYTAGKIYETVIAKERRGDYLGATVQVIPHVTDEIRKSIVKGSQGYDVTIVEIGGTVGDIESLPFIEAIRQMGIYKDGYEVAYVHLTLVPYIKASSEIKTKPTQHSVRELRAIGIQPDALVCRSELPLPKEHFDKIALFTNVEKKAVISAHDAEDI

SEQ ID NO: 196074 - protein, 203 aa, Unknown
  Bacterial polypetide isolated from the Sargasso Sea
LDAILVPGGFGDRGTEGKIAAIRYARENKVPYLGICLGMQLAVIEYARHVAGIEKAHSSELNPNTPDPVVGLITEWITEDGQKELRSADSDLGGTMRLGGQECVLEADSRAAECYGSTHIVERHRHRYEVNNNYLPQLEAAGLKIVGRSADGELVEVIEVGDHPWFVACQFHPEFTSTPRDGHGLFKGYVAAALAEQKAHKET

SEQ ID NO: 196075 - protein, 85 aa, Unknown
  Bacterial polypetide isolated from the Sargasso Sea
IYSIYNKQLISERHRHRYEVNKKFISKFNNKGYYFSGMSPDGLLPEVLESENHKWFIGVQYHPELKSRPLKPHPLFVSFIKNCIK

SEQ ID NO: 196076 - protein, 308 aa, Unknown
  Bacterial polypetide isolated from the Sargasso Sea
TDLDLGHYERFTDISAKQSDNITTGRIYSDIIKKERKGKYLGKTVQVIPHVTDRIKEFIKKDIVNEDFVICEVGGTVGDIESLPFLEAIRQFSNDIGKNKTLFVHLTLVPFMKSSDEIKTKPTQHSVKELRSIGIQPDIVICRSEKSIPKDQRKKISLFCNVPIENVIETVDVRTIYEAPISFYSEKLDKQVLKYFKTKPKKKVNLKPWKKITNTVIKNKKEVKIAIIGKYVNLKDAYKSLDEALIHGGVKNNVKVNLIRIESDKLKSNEVRKKIRNASGILIPGGFGKRGTENKISAINYARRNKVP

SEQ ID NO: 196077 - protein, 103 aa, Unknown
  Bacterial polypetide isolated from the Sargasso Sea
MARYIFVTGGVVSSLGKGLSSASLAYLLKSQGYKVRLRKMDPYLNVDPGTMSPFQHGEVFVTDDGAETDLDLGHYERFTNISSKQSDNITTGRIYSDVIKKKG

SEQ ID NO: 196078 - protein, 145 aa, Unknown
  Bacterial polypetide isolated from the Sargasso Sea
NLKGANSTEFDQNTKHPVIGLITEWNDISGKKEKRDKNSDLGGTMRLGGQLCKLKKGSNSLRMYKNSEIIERHRHRYEVNPKYKDDMIKKGLDVVGTSIDGKLVEMIEIPKHKWFLACQFHPEFTSNPRDGHPIFNSYIKSTLRK

SEQ ID NO: 196079 - protein, 286 aa, Unknown
  Bacterial polypetide isolated from the Sargasso Sea
REAVIQSIDASTIYDVPNLMLEEGLDKVALKKLDLPEKATPDLKQWNEFLQKLKNPKHIVNIGLVGKYVELQDSYKSILEAFIHAGAANETKVNVVSIHSEYVDEKNIADKLRDLDGILVAPGFGERGIEGKIDTVRYARENNIPFFGICLGMQMAVIEYSRNVLGYSDANSTEMNAGTAHPVINLMEEQKTITDKGGTMRLGAWKCEIKPDTLASKIYGKNQIQERHRHRYEFNGEYLEELENAGLKASGINPDTKLVEIIEIEKHPFFIGVQYHPEYKSTVAQP

SEQ ID NO: 196080 - protein, 98 aa, Unknown
  Bacterial polypetide isolated from the Sargasso Sea
MTRYVFVTGGVVSSLGKGIAAASLAAVLEARGIKVTLLKLDPYINVDPGTMSPFQHGEVFVTDDGAETDLDLGHYERFTRTVMSRANNFTAGRVYDAV

SEQ ID NO: 196081 - protein, 290 aa, Unknown
  Bacterial polypetide isolated from the Sargasso Sea
ALLKSRNFKVRIRKLDPYLNVDPGTMSPYQHGEVYVTDDGAETDLDLGHYERFTNQSSKKSDSISSGKIYSTVLSKERKGDYLGATIQVIPHVTNEIKSFINSDLKNEDFAIYEIGGTVGDIESLPFLEAIRQIRNDKKISSALIHMTYIPYLSFAGELKTKPTQHSVKELLNAGIQPDIIMCRSEKAIDQESILKISLFCNVKKESVIPALNANSIYDVPSLYSKYGLDESLLKHLGYKSKNHPLDLKPWNNLLKKIKNQKSQVKIAVVGKYTNLKDSYKSLTEALMHG

SEQ ID NO: 196082 - protein, 138 aa, Unknown
  Bacterial polypetide isolated from the Sargasso Sea
TEFDQNTKHPVIGLITEWNDISGKKEKRDKNSDLGGTMRLGGQLCKLKKGSNSLRMYKNSEIIERHRHRYEVNPKYKEDMIKKGLDVVGTSIDGKLVEMIEIPKHKWFLACQFHPEFTSNPRDGHPIFNSYIKSTLRM

SEQ ID NO: 196083 - protein, 71 aa, Unknown
  Bacterial polypetide isolated from the Sargasso Sea
MTRFIFITGGVVSSLGKGLASAALGTLLQARGFSVRLRKLDPYINVDPGTMSPYQHGEVFVTDDGAETDLD

SEQ ID NO: 196084 - protein, 279 aa, Unknown
  Bacterial polypetide isolated from the Sargasso Sea
FCVAGKNEIDDRIKKKLALFTNVSKDAVFSAIDAETIYDIPVLLQKQNIDTYITKSLKLKNKKLNLKPWTDYRKKLNKCKKNTTIAMIGKYVDLEDSYKSLNEALYHAGIINGARVNIEYIDSEKINNRYLKNLKKVNGILVPGGFGNRGIEGKILAAMYARKNEIPYFGICLGMQISVIEYARNVINLTRANSTEFDMKTKNPVIALVEEWKNSSGKNILVDKKNMGGTMRLGSQKCDIIKNSLAFKMYNSLVVNERHRHRYEVNSNFLDFFENGNMV

SEQ ID NO: 196085 - protein, 215 aa, Unknown
  Bacterial polypetide isolated from the Sargasso Sea
CRSEDIQENGTDCLSEMDAILIPGGFGDRGIEGMIQSIEYARKNDIPFLGICLGMQAAVIEYARNVLDHKDANSTEFNSSTSAPVIAMITEWMNDDGSKENRDENSDLGGTMRLGAQECLFTKGTKAKDIYGADSVVERHRHRYEFNNRYREELEKNGLVFSGFSKDGLAEMIEIKDHPWFIGCQFHPEFTSSPLAGHPLFYSFIKAAVEYSKKN

SEQ ID NO: 196086 - protein, 125 aa, Unknown
  Bacterial polypetide isolated from the Sargasso Sea
MNEWIKDGKLMKGTDKNLGGTMRLGSYEARLKKDTKISKIYNSLKIEERHRHRYEVNINYKEDFEDKGMIFSGLSPDNKLPEIIELKDHPWFIGVQFHPEFKSRPLKPHPLFSSFIKAAKTNSKK

SEQ ID NO: 196087 - protein, 296 aa, Unknown
  Bacterial polypetide isolated from the Sargasso Sea
MTRFIFVTGGVVSSLGKGLASASLASLLQHHGYKVRIRKLDPYLNVDPGTMSPYQHGEVYVTDDGAETDLDLGHYERFTGVVSKKSDNITSGRVYQKIIARERKGEYLGATVQVIPHVTNEIKEFISNDLEQEDFVICEIGGTIGDIESLPFIEAIRQFHNDSGHENSLFIHVTLVPYIASSGELKTKPTQHSVKELRSLGIQPNILLCRSDRIIPEGERKKIGLFCNVQHNCVIQAINANSIYEVPINFYNEGLDKRVLEYFNFDANKTIDLKMWSQVSKHVLEPKGRVIIGIVG

SEQ ID NO: 196088 - protein, 318 aa, Unknown
  Bacterial polypetide isolated from the Sargasso Sea
ISLFCNVSINDVIETVDVKTIYEAPISFNKEKLDERVLKFFKIKSKKKVNLSPWKKITYSVLNNKKKVNIAIIGKYVELKDAYKSLDEALTHGGLSNNLKVNLIRIESDYLKPKDVNKKLKDVSGVLIPGGFGKRGTEGKIAAITYARKNNVPFLGICFGMQMAVIEFARNKLNIKKATSSEFGPSKASVVGLMSEWVRDGKMIKGTDKELGGTMRLGSYEAKLKKGSLISNIYNSTKINERHRHRYEVNINYKEEFEKKGMIFSGLSPDTKLPEIIELKNHPWFIGVQFHPEFKSRPLAPHPLFSSFIKAAKIKSNK

SEQ ID NO: 196089 - protein, 97 aa, Unknown
  Bacterial polypetide isolated from the Sargasso Sea
MARYIFVTGGVVSSLGKGLSSASLAYLLKSQGYKVRLRKMDPYLNIDPGTMSPFQHGEVFVTDDGAETDLDLGHYERFSNISAKKTDNITTGKIYSD

SEQ ID NO: 196090 - protein, 114 aa, Unknown
  Bacterial polypetide isolated from the Sargasso Sea
KEKRNKNSDLGGTMRLGGQLCKIKKGSNSYKMYKSLEIVERHRHRYEVNPKFKEAMIKEGLNVVGTSIDGKLVEMIEIPNHKWFLACQFHPEFTSNPRDGHPIFNSYIKSTIKR

SEQ ID NO: 196091 - protein, 255 aa, Unknown
  Bacterial polypetide isolated from the Sargasso Sea
RVLNHFKIKNKKSPNLSKWKNITSKVLNPKSNVSIGIIGKYVNLKDAYKSLDEALVHGGLSNNLKVNLKRIDSENLKPQNIENILKDVSGVLIPGGFGKRGTEGKIAAIKYARLNNIPFFGICFGMQMAVIEAARNLLNIKNASTSEFGNNCTPVVGLLEEWQKGKKRLKGSEKNLGGTMRLGLYDAVLKSNSFIYKIYSEKKIKERHRHRYEVNIKYKNDFEKKGLIFSALSPDGSLQEIVELKDHPWFIGVQF

SEQ ID NO: 196092 - protein, 298 aa, Unknown
  Bacterial polypetide isolated from the Sargasso Sea
NVINKEREGDYLGSTVQVISHVTDEIKSFITKDIGKCDFILVEIGGTVGDIESLPFLEAIRQFGNEIGKKRAIYIHLTLVPFIHTSNEQKTKPTQHSVKELREIGIQPNILLCRCDRSIEANEVDKIALFCNVKSEDVIQALDVKNIYNVPIVYHSEKLDVQVLRHFNIRPNKINLIKWKKIVLSANKVKRNINVGIVGKYTDLPDAYKSLNEALVHGGLINNVGINIHWINSENLNDKSIKNKFKNIHGIIVPGGFGERGISGKIKAIKYARLNKVPFLGICLGLQLAVIEFSKNVL

SEQ ID NO: 196093 - protein, 298 aa, Unknown
  Bacterial polypetide isolated from the Sargasso Sea
LASAALGALLQARGYSVRVRKLDPYLNVDPGTMSPFEHGEVFVTDDGAETDLDLGHYERFTGVAATQSDNVTTGRIYSDVLGRERRGDYLGGTVQVIPHVTDAIKKFVTADLHGEDFVICEIGGTVGDIESLPFLEAIRQLGNELGHERAMFVHLTLVPYLSASGELKTKPTQHSVMELQRVGIRPDVILCRCDRTIPAGERNKIALFCNIRPEAVVPAIDIDTIYQVPIEYHDEGFDTQVLAHFRIDASVRPNLDTWREIVGRVREPDGEVTIAVVGKYTDLPDAYKSLSEALVHGG

SEQ ID NO: 196094 - protein, 164 aa, Unknown
  Bacterial polypetide isolated from the Sargasso Sea
NVPFLGICLGMQCAVVEFSRNVCEFSKANSSEFSEDTPFPVIALLPGQENVELGGTMRLGSYPGVLKSKTLASKIYGDSTQFEERHRHRYELNNKYRDSMEKKGLIFSGISPNDELVEIIEISGHPFYFGCQFHPEFKSAPFSPHPVFVSFVQAAKNARSELFK

SEQ ID NO: 196095 - protein, 210 aa, Unknown
  Bacterial polypetide isolated from the Sargasso Sea
NLKIENIKTLLKNVSGVLIPGGFGKRGSEGKIAAIKYARLNNIPFFGICFGMQMAVIEAARNLLNIKNASTSEFGNNCTPVVGLLEEWNKGKKIYKGSEKNLGGTMRLGLYDAVLKTDSLISKIYSMKKISERHRHRYEVNIKYKNDFEKKGLIFSALSPDGTLPEIIELKNHPWFIGVQFHPEFKSRPFTPHPLFSSFIKAAEKRKGVN

SEQ ID NO: 196096 - protein, 285 aa, Unknown
  Bacterial polypetide isolated from the Sargasso Sea
TNEDFVICEIGGTVGDIESLPFIEAIRQFSNEHGKSKTLFIHLTFVPFLKSSDEIKTKPTQHSVKELRSIGIQPDIIICRSQKSIPFDQRKKISLFCNVPIENVIETVDVRTIYEAPISFFKQKLDKQVLNYFRLQPKKRANLLPWKKITKITLKTKKSINIAIIGKYVNLKDAYKSLDEALTHGGISNKIKVNLIRIESDKLKPNQISKKLKNVSGLLIPGGFGKRGTEGKIYAIKYARERKIPFLGICFGMQMAIIEFARNKLKIKKAGSTELDKKVLSCNWL

SEQ ID NO: 196097 - protein, 217 aa, Unknown
  Bacterial polypetide isolated from the Sargasso Sea
MHFVFITGGVASSLGKGIASASLATLLKSRKFKVRIRKLDPYLNVDPGTMSPYQHGEVYVTDDGAETDLDLGHYERFTNQSAKQSDSISSGKIYSNVLLKERKGDYLGSTIQVIPHVTNEIKSFINSDLKSEDIAIYEIGGTVGDIESLPFLEAIRQIRNDKNISSALIHMTYIPYLSSAGELKTKPTPHSVKRLLNAVFTRYIMCNLNTNRYDSSL

SEQ ID NO: 196098 - protein, 240 aa, Unknown
  Bacterial polypetide isolated from the Sargasso Sea
IGGTVGDIESLPFLEAIRQFSNDIGKKNSLFIHLTLVPYLKASGELKTKPTQHSVKELRSLGIQPDIIICRSEREIPKSERKKISLFCNVQIENVIETVDVKTIYEAPISFHKEKLDSRVMSYFNVKSKKLPDLSVWKNITKKVLNPKRDVNIGIIGKYVNLKDAYKSLDEALIHGGISNNLKVNLKRIDSENLKPENIKSLLNDVTGVLIPGGFGKRGSEGKIAAIKYARLNDIPFFGI

SEQ ID NO: 196099 - protein, 131 aa, Unknown
  Bacterial polypetide isolated from the Sargasso Sea
MARYVFVTGGVVSSLGKGLSSASLAALLQLRGFRVRVRKLDPYLNVDPGTMNPFQHGEVFVTDDGAETDLDIGHYERFTGISATQSDNITTGGIYSDIIKKERRGDYLGGTVQVVPHVTDRIKKFISHNVK

SEQ ID NO: 196100 - protein, 188 aa, Unknown
  Bacterial polypetide isolated from the Sargasso Sea
MVKQKNTKYIFVLGGVMSGLGKGIAASSVGYLLKNANVNVTILKLDPYLNIDPGTMNPFQHGEVFVLDDGSETDLDLGHYERFIDVNMTKKNNATAGHIYSRVLEKERKGKYLGETVQVIPHVTDEIIKRIEDVNSNLLYDVVICEVGGTVGDIESLPFMEAIRQLSLEVGYNNYMIIHVTLLPFVKA

SEQ ID NO: 196101 - protein, 229 aa, Unknown
  Bacterial polypetide isolated from the Sargasso Sea
LVHGGLSNNLKFYLKRIDSETLKPANIKPLLKDVSGILIPGGFGKRGTEGKIAAIKYARLNNIPFFGICFGMQMAIIEAARNLLNIKDASTSEFGNNCTPVVGLLEEWKKGKKRIKGSEKNLGGTMRLGLYDAILKNNSLISKIYSEKKIKERHRHRYEVNIKYKSDFEKKGLIFSALSPDGTLPEIIELRDHPWFVGVQFHPEFKSRPFEPHPLFSSFIKAAGIKERK

SEQ ID NO: 196102 - protein, 282 aa, Unknown
  Bacterial polypetide isolated from the Sargasso Sea
MSPFQHGEVFVTDDGAETDLDLGHYERFTNISAKQSDNITTGRIYSEIIKKERLGGYLGKTVQVIPHVTDGIKEFIKKDITNEDFVICEIGGTVGDIESLPFLEAIRQFSNDIGRSKSLFIHLTFVPFLKSSDEIKTKPTQHSVKELRSIGIQPDIVICRSQQSIPLDQRRKISLFCNVDIDNVIETVDVKTIYEAPISFFNQKLDTQVLKFFKIKSKKRPNLLPWKKITDIVLNTKKIVNIAIIGKYVNLKDAYKSLDEALTHGGISNKIKVNLVRIESDK

SEQ ID NO: 196103 - protein, 185 aa, Unknown
  Bacterial polypetide isolated from the Sargasso Sea
MGKVSPTKFIFVLGGVMSGLGKGIAASSIGYLLKNSGLKVTILKLDPYLNVDPGTMNPYQHGEVFVLDDGSETDLDLGHYERFIDVSMTKNNNATAGQIYSTVLDKERKGEYLGETVQVIPHVTDEIINRIKNINKPKRYDVVICEVGGTVGDIESLPFMEAIRQLSLQVGYHNHLIVHVTLLPY

SEQ ID NO: 196104 - protein, 279 aa, Unknown
  Bacterial polypetide isolated from the Sargasso Sea
SRKFKVRIRKLDPYLNVDPGTMSPYQHGEVYVTDDGAETDLDLGHYERFTNQSAKKSDSVSSGKIYSNVLIKERKGDYLGSTIQVIPHVTNEIKSFINSDLKNEDIAIYEIGGTVGDIESLPFLEAIRQIRNDKNISSALIHMTYIPYLSSAGELKTKPTQHSVKELLNAGIQPDIIMCRSEQLIDKDSISKISLFCNVKKESVIPALNAKSIYEVPSLYSKYGLDEALLQQLGYNPKNHKLNLKPWIDLQKKIKKKKHKVKIAVVGKYTNLKDSYKSL

SEQ ID NO: 196105 - protein, 226 aa, Unknown
  Bacterial polypetide isolated from the Sargasso Sea
GGISNKIKVNLIRIESDKLKPNQISKKLKNVSGLLIPGGFGKRGTEGKISAIKYARERKIPFLGICFGMQMAIIEFARNKLKIKKSGSTELDKKCYPVVGLIDEWNKDGKIIKGTDKDLGGTMRLGLYEAKLRNNSAIKNIYKSNSIKERHRHRYEVNNNLKSQFERKGLIFSGMSPDNKLPEIIELKNHPWFIGVQFHPEFKSRPLLPHPLFSSFIKAAKSFNGK

SEQ ID NO: 196106 - protein, 177 aa, Unknown
  Bacterial polypetide isolated from the Sargasso Sea
AAIGYARKNKIPFLGICFGMQMAVIEFARNKLNIKNATSSEFGPSKASVVGLMNEWTKDGKLMRGTDKDLGGTMRLGSYEARLKKDTKISKIYNSVKIKERHRHRYEVNINYKDDFESKGMIFSGLSPDSKLPETIELKDHPWFIGVQFHPEFKSRPLTPHPLFSSFIKAAKINSKK

SEQ ID NO: 196107 - protein, 204 aa, Unknown
  Bacterial polypetide isolated from the Sargasso Sea
NTSLMKKLKGCDGILIPGGFGIRGINGKINAIKYARENNIPFFGICLGMQLAVIEIAQNVLKIKNAHSSEFKKTTKSVVGLMTEWVNKNKIEKRDKNSDKGGTMRLGAYKAVLKKNSKIFSIYKNKVISERHRHRYEVNQKFLSKFENKGYYFSGMSPDGLLPEVLESKKHKWFIGVQFHPELKSRPLDPHPLFVSFIKAAIND

SEQ ID NO: 196108 - protein, 246 aa, Unknown
  Bacterial polypetide isolated from the Sargasso Sea
MKYVIVSGGVLSGLGKGVTASSLGVLLKSAGLRPTAIKIDPYLNTDAGTMSPFEHGEVFVLDDGGEVDLDLGNYERFLDVNLTRDNNLTTGKVYSKVIEAERRGDYLGKTVQVIPHITDAVQDWIEEVAARPSDDSGAKPDVCVIELGGTVGDIESAPFIEALRQFQFRVGPENVCFVHVSLVPVIGVVGEQKTKPTQHTVKELRSLGITPDMLVCRSERPLEDDVRDKLALFCHVSSEAVLSAHD

SEQ ID NO: 196109 - protein, 217 aa, Unknown
  Bacterial polypetide isolated from the Sargasso Sea
KLVRIDSEKLKPSQIKSKLNNISGILIPGGFGKRGTSGKIESIRFARVNKIPFLGICYGMQMAIIEFARNKLKIRNATSSEFDKKGISIIGLMNEWNKDGIKIKGTDKDLGGTMRLGSYDAKLKENSLVRKIYKSKIIKERHRHRYEVNISYKEKFEKNGLIFSGLSPDNTLPEIVELKNHPWFIGVQFHPEFKSRPFNPHPLFSSFIKAAKKKYAK

SEQ ID NO: 196110 - protein, 129 aa, Unknown
  Bacterial polypetide isolated from the Sargasso Sea
VVGLMSEWTKDGKLMKGTDKNLGGTMRLGSYEARLKKDTKISKIYNSLKIRERHRHRYEVNINFRKEFENKGMIFSGLSPDNKLPEIIELKDHPWFIGVQFHPEFKSRPLSPHPLFSSFIKAAKIKSNK

SEQ ID NO: 196111 - protein, 206 aa, Unknown
  Bacterial polypetide isolated from the Sargasso Sea
MARFIFITGGVVSSLGKGLSSASLGALLQSHGYKVKLRKLDPYLNVDPGTMNPIQHGEVFVTDDGAETDLDLGHYERFTDVSATKFDNITSGKIYQDIIQNERKGDYLGGTVQVIPHVTDAIKEFITQYTDDVDFLLCEIGGTVGDIEALPFFEAIRQLRNELSPENCLFIHLTLLPFIAAAGELKTKPTQHSVKELTSIGIQPDI

SEQ ID NO: 196112 - protein, 86 aa, Unknown
  Bacterial polypetide isolated from the Sargasso Sea
MARYIFVTGGVVSSLGKGLSSASLAYLLKSRGFKVRIRKMDPYLNVDPGTMSPFQHGEVFVTDDGAETDLDLGHYERFTEISCKQS

SEQ ID NO: 196113 - protein, 99 aa, Unknown
  Bacterial polypetide isolated from the Sargasso Sea
CRLTKNTTGKNLYDEDVIYERHRHRYEFNNYYKQSFLDSGYKISGTSPDGRLVELIELENHPYFLACQYHPEFLSRPGKPHPLFKGLIKASQDKLTQSN

SEQ ID NO: 196114 - protein, 226 aa, Unknown
  Bacterial polypetide isolated from the Sargasso Sea
GISNNLKVNLNRIDSEDLENNKSKSVLKEVSGILIPGGFGKRGSEGKIAAIKYARLNNIPFFGICFGMQMAIIEAARNLLNIKNASSSEFGNNCTPVVGLLEEWQKGKKKFKGSQEKLGGTMRLGSYEAILKNNSLIKKIYSMNKINERHRHRYEVNIKYKNEFEKKGLIFSALSPDGLLPEIIELKNHPWFVGVQFHPEFKSRPFTPHPLFSSFVKAVQINQERN

SEQ ID NO: 196115 - protein, 85 aa, Unknown
  Bacterial polypetide isolated from the Sargasso Sea
MHFVFITGGVASSLGKGIASASLAALLKSRKFKVRIRKLDPYLNVDPGTMSPYQHGEVYVTDDGAETDLDLGHYERFTNQSAKQT

SEQ ID NO: 196116 - protein, 107 aa, Unknown
  Bacterial polypetide isolated from the Sargasso Sea
MARYIFVTGGVVSSLGKGLSSASLAYLLQSRGFKVRLRKLDPYLNVDPGTMSPFQHGEVFVTDDGAETDLDLGHYERFSGITAKKTDNITTGKIYNDVLRKERKGIY

SEQ ID NO: 196117 - protein, 207 aa, Unknown
  Bacterial polypetide isolated from the Sargasso Sea
DEIKTKPTQHSVKELRSIGIQPDIIICRSERPIPLEHRKKISLFCNVDIKNVIETVDVKTIYEASISFFREKLDAQVLNYFKLKSKKPVTLNPWKKITKIILQNKKEVNIAIIGKYVELKDAYKSLDEALTHGGIDNKIKVNLVRIDSEKLKISEIKKKLKNISGILIPGGFGKRGTDGKIEAIKHARISKIPFLGICYGMQMAIIE

SEQ ID NO: 196118 - protein, 301 aa, Unknown
  Bacterial polypetide isolated from the Sargasso Sea
ALIHMTYVPYLSSAGELKTKPTQHSVKELLNSGIQPDIIMCRCEKEINKESLEKISQFCNVKKDSVIPALNAKSIYEVPSIYSKAGLDKVLLEHLGHESAKYPLNLKAWENLIFKINNLQQHVTIGIVGKYTNLKDSYKSLIEALTHGGIENNVKVKIEWINAEKIETNQLINVLKLVDGILIPGGFGYRGVEGKIQAIKFARENDIPFFGICLGMQLSVIEIARNVLGKKDSNSTEFESSSNPVVSLMTEWNNQNKIEKRNLYSDKGGTMRLGAYKATLKKGSKINQIYKLNEISERHRH

SEQ ID NO: 196119 - protein, 97 aa, Unknown
  Bacterial polypetide isolated from the Sargasso Sea
MANKPKYIFVSGGVVSSLGKGILSSSLGAILESRGLKVTILKLDPYINLDPGTMSPFQHGEVFVTDDGSETDLDLGHYERFLNSKMSNKNNFTAGQV

SEQ ID NO: 196120 - protein, 260 aa, Unknown
  Bacterial polypetide isolated from the Sargasso Sea
FFNEGLDKRAFEYFRLESKKEIDLKMWSQVSKRILEPKGSIEIGIVGKYTGLADAYKSLNEALSHGGIFNNVKVKLNWIESEELNSSNIKKKLNNCHGILVPGGFGERGAEGKIAAIKYARENKIPYFGICFGMQLAVIEMARNILGIKEANSSEFADCKESIVGLMTEWSNIDNTTEKRTKESDLGGSMRLGAYEAKLDNNSKAREIYGRDLISERHRHRYEVNNNYAKDFESNGVHFSGYSPDGLLPEIVELKITHGL

SEQ ID NO: 196121 - protein, 263 aa, Unknown
  Bacterial polypetide isolated from the Sargasso Sea
PWKKITKTVLNTKKIVNIAIIGKYVNLKDAYKSLDEALIHGGISNNVKVNLVRIESDKLKPSQINKLLKNVSGILIPGGFGKRGTEGKISAIRYARKNKIPFLGICFGMQMAVIEFARNTLKIKNAGSSELDKNCYPVIGLLNEWNKDGKLIKGTNKDLGGTMRLGSYEAKLRHNSLIENIYKSKSIFERHRHRYEVNNNLKNKFENKGMIFSGMSPDKKLPEIIELKNHPWFVGVQYHPEFKSRPLSPHPLFSSFIKAAKFY

SEQ ID NO: 196122 - protein, 86 aa, Unknown
  Bacterial polypetide isolated from the Sargasso Sea
MARYIFVTGGVVSSLGKGLSSASLAYLLKSQGYKVRLRKMDPYLNVDPGTMSPFQHGEVFVTDDGAETDLDLGHYERFTNISSKKS

SEQ ID NO: 196123 - protein, 106 aa, Unknown
  Bacterial polypetide isolated from the Sargasso Sea
MARYIFVTGGVVSSLGKGLSSASLAYLLQSRGFKVRLRKLDPYLNVDPGTMSPFQHGEVFVTDDGAETDLDLGHYERFSGITAKKTDNITTGKIYNDVLKRERKGK

SEQ ID NO: 196124 - protein, 286 aa, Unknown
  Bacterial polypetide isolated from the Sargasso Sea
VICEIGGTVGDIESLPFLEAIRQFSNENGNKKSLFIHLTLVPFLKSSDEIKTKPTQHSVKELRSLGIQPDIVICRSQKSIPLDQRKKISLFCNVPIENVIETVDVRTIYEAPISFYNEKLDKRVLEFFKLKPKKKVNLQPWKKITKSVLSKKKEINIAIIGKYVNLKDAYKSLDEALIHGGIDNNVKVNLVRIESDKLMPSHINKILKNVSGILIPGGFGKRGTEGKISAIAYARKHKIPFLGICFGMQMAVIEFARNVLKIKKSGSTEIDKRCFPVIGLLNEWNK

SEQ ID NO: 196125 - protein, 246 aa, Unknown
  Bacterial polypetide isolated from the Sargasso Sea
LPFIEAIRQMGIYKDGYEVAYVHLTLVPYIKASSEIKTKPTQHSVRELRAIGIQPDALVCRSELPLPKEHFDKIALFTNVEKKAVISAHDAEDIYQIPLILREQCLDDIIVEKLKLDVPKADLTPWENVFKESKNSDSKVKIAMVGKYVDFKDSYISLSEALRHAGFKNSKGVEIVYVESEDIQENGTDCLSEMDAILIPGGFGDRGIEGMIQSIEYARKNNIPFLGICLGMQAAVIEYARKCFES

SEQ ID NO: 196126 - protein, 217 aa, Unknown
  Bacterial polypetide isolated from the Sargasso Sea
KVNVRWVDTEELEVNDNADVVFRDIDGILIPGGFGDRGIEGKIMSSRFARENKIPFFGICLGMQCAVIDFARYLCNMKAANSTEFNKRTKFPVIDLMKSQKKVTDKGGSMRLGSYKCSVASRTNASSAYRKKIVKERHRHRYEFNNKYKTKLKNAGLKISGVNEKLNLVEMIEISNHPWYVGVQFHPELKSTVVNVHPLFKDFISASIKYRDGKQII

SEQ ID NO: 196127 - protein, 260 aa, Unknown
  Bacterial polypetide isolated from the Sargasso Sea
CSVPNESVISMHDVDTVYSVPILLNKQKVDKTIIEKLKIKAKQPNLNDWKRVVKAKLMPEKEVNVSFVGKYTELKDSYKSINEALEHAGIKNKAKVNINFVEAENISSKNIKKTLKNADAVLVPGGFGERGIEGMILACKYARENNIPYLGICLGMQVAIIEYARNVLNLKGANSTEFDQNTKHPVIGLITEWNDISGKKEKRDKNSDLGGTMRLGGQLCKLKKGSNSLRMYKNSEIIERHRHRYEVNPKYKDDMIKKGL

SEQ ID NO: 196128 - protein, 145 aa, Unknown
  Bacterial polypetide isolated from the Sargasso Sea
NVFGLADSHSTEFQSSKNPVVSLMTEWNNKNKIEKRDHTSEKGGTMRLGAYKAILNKNSKVSEIYNTNEITERHRHRYEVDLSLTKDFEKKGFIFSGMSPDNVLPEILESMNHKWFIGVQYHPELKSRPLAPHPLFSSFIKHCIK

SEQ ID NO: 196129 - protein, 298 aa, Unknown
  Bacterial polypetide isolated from the Sargasso Sea
VDINNVIETVDVNTIYEAPISFFNQKLDKQVLKFFKINSRKRPNLLPWKKITNIVLNTKKVVKIAIIGKYVNLKDAYKSLDEALTHGGISNKVKVNLVRIESDKLKSKEIKAKLNDVSGILIPGGFGKRGTEGKIEAIKYAREKNIPFLGICFGMQMAMIEFARNILKIKNAGSSELDKNCFPVIGLINEWNKDGKIIKGTDKNLGGTMRLGLYEAKLRKNSAIKKIYKSNNIQERHRHRYEVNINLMEKFEKKGLIFSGISPDNKLPEIIELKNHSWFFGVQFHPEFKSRPLNPHPL

SEQ ID NO: 196130 - protein, 191 aa, Unknown
  Bacterial polypetide isolated from the Sargasso Sea
LIPGGFGKRGTEGKIAAIKYARIKKIPFLGICFGMQMAIIEFARNVLKIKNASSTELNPKCKPVVGLIHEWEKNGIMIKGTDKNLGGTMRLGSYDAELLNNSLIKKIYKSKIIKERHRHRYEVNINYKNQFEKKGLIFSGNSPDKNLPEIIELKNHPWFIAVQFHPEFKSRPLSPHPLFSSFIKAAKNHKK

SEQ ID NO: 196131 - protein, 296 aa, Unknown
  Bacterial polypetide isolated from the Sargasso Sea
VTGGVVSSLGKGLSSASLAYLLKSQGYKVRIRKMDPYLNVDPGTMSPFQHGEVFVTDDGAETDLDLGHYERFTNISAKKSDNITTGKIYSDIIKKERKGKYLGKTVQVIPHVTDRIREFIKGDITNEDFVICEIGGTVGDIESLPFVEAIRQFSNNVGRSKSLFIHLTFVPFLKSSDEIKTKPTQHSVKELRSLGIQPDIIICRSQKSIPLDQRKKISLFCNVSIDNVIETVDVRTIYEAPISFYNEKLDKQVLKYFKLKPRKKVNLLPWKKITKTVLNTKKIINIAIIGKYVNLK

SEQ ID NO: 196132 - protein, 148 aa, Unknown
  Bacterial polypetide isolated from the Sargasso Sea
MARYVFVTGGVVSSLGKGLSSASLAALLQSRGFKVRVRKLDPYLNVDPGTMNPFQHGEVFVTDDGAETDLDIGHYERFTGISGTKSDNITTGGIYSDIIKKERKGDYLGGTVQVVPHVTDRIKKFLSQDIKNEDFVICEIGGTVGDIE

SEQ ID NO: 196133 - protein, 162 aa, Unknown
  Bacterial polypetide isolated from the Sargasso Sea
FGMQMAVIEAARNLAGIKDATSSEFRECDNPIVGLMTEWMKGNDLEKRAQDGDMGGTMRLGAYENVFKHDSKIATIYGSTRVEERHRHRYEVNMAYREKLEAAGMSFAGTSPDGLLPETVELPDHPWFIGVQYHPELKSKPFEPHPLFASFVGAALTQSRLV

SEQ ID NO: 196134 - protein, 262 aa, Unknown
  Bacterial polypetide isolated from the Sargasso Sea
DLSKWKNITSKVLNPKKDVNIGIIGKYVNLKDAYKSLDEALIHGGISNNVKVNLKRIDSESLKPENIKLLLKNVSGVLIPGGFGKRGSEGKIAAIKYARLNSIPFFGICFGMQMAIIEAARNLLNIKNASTSEFGNNCTPVVGLLEEWQKGKKRIKGSEKDLGGTMRLGLYDAVLKNNSLISKIYSSKKIKERHRHRYEVNIKYKDDFEKKGLIFSALSPDGMLPEIIELKNHPWFVGVQFHPEFKSRPFTPHPLFSSFIKS

SEQ ID NO: 196135 - protein, 264 aa, Unknown
  Bacterial polypetide isolated from the Sargasso Sea
FEAIRQLRNELNPENCLFIHLTLLPFIAAAGELKTKPTQHSVKELTSIGIQPDIIILRCDRDIPEDERKKISSFCNVPFSRIIPAVDVGNIYDVPMNLHQNGLDSEVLSIFNLKQKNKPNFIKWKKISSNASSLEESVKVSIVGKYIQLQDAYKSLDEAIYHAGLINKIKVNVEWIDSELLESSPPIDYLDSTDAILVPGGFGQRGSEGKINAIRFAREKKVPYLGICFGMQMAIVEMSRSLLKLPGANTTEFGDTDHPVVDLM

SEQ ID NO: 196136 - protein, 298 aa, Unknown
  Bacterial polypetide isolated from the Sargasso Sea
IYEAPISFYNQKLDKQVLKYFKIKSKKKPNLNPWKNITSTVLKNNKVINIGIIGKYVNLKDAYKSLDEALTHGGIANNVKINLVRIESDKLKKNEISKKLRSVSGILIPGGFGKRGTEGKIAAIKYAREKKIPFFGICFGMQMAIIEFARNKLNIKNAGSTELDKKCYPVIGLIHEWNKNGKVFKGTEKNLGGTMRLGLYTAKLKNNSAIKKIYKSNEIKERHRHRYEVNNNQRTKFEKKGLIFSGMSPDNKLPEIIELKNHPWFIGVQFHPEFKSRPLSPHPLFKSFIKASKNYHGK

SEQ ID NO: 196137 - protein, 282 aa, Unknown
  Bacterial polypetide isolated from the Sargasso Sea
LSYFNIKNKKSPDLSKWKNITSKVVNPRKDVNIGIIGKYVNLKDAYKSLDEALIHGGISNNVKVNLKRIDSENIKPEKIKPLLKNVSGVLIPGGFGKRGSEGKIAAIKYARLNHIPFFGICFGMQMAIIEAARNLLNIKNASSSEFGNNCTPVVGLLDEWKKGKKRIKGSEKNLGGTMRLGLYDAVLKNNSLISKIYSEKKIKERHRHRYEVNIKYKEDFEKKGLIFSALSPDGMLPEIIELKNHPWFVGVQFHPEFKSRPFTPHPLFSSFIKAAEINRRSN

SEQ ID NO: 196138 - protein, 224 aa, Unknown
  Bacterial polypetide isolated from the Sargasso Sea
MRKKFIFVTGGVLSSLGKGLSGAAMGALMEARGLRVTNIKMDPYINVDPGTMSPYQHGEVFVTDDGAESDLDLGHYERFTNTTMHQRNNFTTGRVYQNVIERERKGEYLGHTVQVIPHITDEIKRLVWEGVTEADVAIVEVGGTVGDIESLPYLEAIRQFRNDAGSDNVLYVHLTLVPFIKTSGELKTKPTQHSVKMLREIGIQPDILLCRSDRDIPRDTREKI

SEQ ID NO: 196139 - protein, 96 aa, Unknown
  Bacterial polypetide isolated from the Sargasso Sea
MTRYIFITGGVVSSLGKGITSASLAAILEARGLKITMLKLDPYINVDPGTMSPFQHGEVFVTEDGAETDLDLGHYERFSRATMRRDNNFTTGRVYE

SEQ ID NO: 196140 - protein, 296 aa, Unknown
  Bacterial polypetide isolated from the Sargasso Sea
QPDIVICRSQKSIPIDQRKKISLFCNVSINNVIETVDVRTIYEAPLSFYNEKLDKQVLKYFKLKPKKKVNLLPWKKITKSVLNTKRAVNIAIIGKYVNLKDAYKSLDEALIHGGIENDIKVNLIRIESDKLKSKEVHKLLKNVSGILIPGGFGKRGTEGKISAINYARKNKIPFLGICFGMQMAIIEYARNSLKIKNAGSSELDKKCYPVVGLLNEWNKNGIIIKGTNKDLGGTMRLGLYEAKLRHNSLIHKIYKSKTIFERHRHRYEVNINLQSKFEKKGMIFSGISPDNKLPEI

SEQ ID NO: 196141 - protein, 212 aa, Unknown
  Bacterial polypetide isolated from the Sargasso Sea
MSRFIFVTGGVVSSLGKGITSASLATLLEARGLNVTLIKMDPYINVDPGTMSPYQHGEVFVTEDGAETDLDLGHYERFIRTRLNRRNSFTTGRVYQHVLDKERRGEYLGATVQVIPHITDEIKLKIREGAGDADVAIVEIGGTAGDIESLPFLEAARQMRVELGSSQSLLVHLTLVPYIATAGEIKTKPTQHSVKELRSIGLQPDILVCRGG

SEQ ID NO: 196142 - protein, 298 aa, Unknown
  Bacterial polypetide isolated from the Sargasso Sea
PSSYIQVSEELKTKPTQHSVKELRSLGLQPDCLICRLEKELPHDEKKKIALFCSVDPNSVISMHDAETVYSIPLLLHSQGVDKILLKKLNLTKVKSPKLNDWKKVVDAKINPKKKVSIAIVGKYVDLKDSYKSLNEALDHAGIKNLARVEINMIDAAKITKRNVSKILKAFQAVLIPGGFGTRGIEGMIIACKYARENKLPYFGICLGMQIAIIEFSRNILNLKNANSTEFNKKTKYPVIGLVTEWKDASGKTEHRTENSNLGGTMRLGGQKCLIKKSSHSYKLYKKLTITERHRHRY

SEQ ID NO: 196143 - protein, 209 aa, Unknown
  Bacterial polypetide isolated from the Sargasso Sea
MARYIFVTGGVVSSLGKGLSSASLAYLLQSRGYKVRLRKLDPYLNVDPGTMSPFQHGEVYVTDDGAETDLDLGHYERFSGVSAKKSDNITTGKIYNDVLKKERRGEYLGKTVQVIPHITDRIKQFIKNDSSKEDFVICEIGGIVGDIESLPFVEAIRQFANDVGKKNALFIHLTLVPYLKASDEIKTKPTQHSVKELRSIGIQPEYNYL

SEQ ID NO: 196144 - protein, 320 aa, Unknown
  Bacterial polypetide isolated from the Sargasso Sea
LFVNRRKVGDIESLPFLEAIRQFSNENGRKNTLFIHLTLVPYMKASDEIKTKPTQHSVKELRSIGIQPDIIICRSERTIPLDQRKKISLFCNVAIEDVIETVDVKTIYEAPISFNKEKLDERVIKYFKLKSRKRVNLLPWKKITNLVLNTKKNVNIAIIGKYVELKDAYKSLDEALTHGGIANNLKVNLIRIESDFLKPGEIKGKLKNVTGVLIPGGFGKRGTEGKIAAINYARKNKIPFLGICFGMQMAVIEFARNKLNIKNATSSEFGSSKTSVVGLMSEWTKDGKLMKGTVKNLGGTMRLGSYEARLKKDTKISKNL

SEQ ID NO: 196145 - protein, 293 aa, Unknown
  Bacterial polypetide isolated from the Sargasso Sea
YLLQSRGYKVRIRKLDPYLNVDPGTMSPFQHGEVFVTDDGAETDLDLGHYERFSGISAKKTDNITTGKIYSDVLKRERQGKYLGKTVQVIPHITNRIKEFIKNDVSKEDFVICEIGGTVGDIESLPFLEAIRQFSNEVEKKNTLFIHLTLVPYMRASDEIKTKPTQHSVKELRSIGIQPDIIICRSERTIPLDQRKKISLFCNVAIEDVIETVDVKTIYEAPISFNKEKLDERVLKFFKVKSRKKVNLLPWKKIKNLVLNTKDKVNIAIIGKYVELKDAYKSLDEALTHGGIA

SEQ ID NO: 196146 - protein, 229 aa, Unknown
  Bacterial polypetide isolated from the Sargasso Sea
MAGFKNNKGVEIVYVESEDIQKNGADCLSEMDAILIPGGFGDRGIEGMIQSIEYARKNDVPFLGICLGMQAAVIEYARNVLDHKDANSTEFNSSTSAPVIAMITEWMNDDGSKENRDENSDLGGTMRLGAQECLFAKATKAKDIYGADSVIERHRHRYEFNNRYREELEKNGLVFSGFSKDGLAEMIEIKDHPWFIGCQFHPEFTSSPLSGHPLFYSFIKAAVEYSKKN

SEQ ID NO: 196147 - protein, 88 aa, Unknown
  Bacterial polypetide isolated from the Sargasso Sea
SIYKKTKVSERHRHRYEVNMNFKDKFQKKGMIFSALSPDKTLTEGVELIDHPWFIGVQFHPEFKSRPMSVHPLFNSFINASKINKNEK

SEQ ID NO: 196148 - protein, 277 aa, Unknown
  Bacterial polypetide isolated from the Sargasso Sea
DNITTGKIYQDILSKERKGEYLGKTVQVIPHVTERIKEFIKKDIRSEDFVICEIGGTVGDIESLPFLEAIRQFANDIGKEKALFIHLTLVPFLKSSDEIKTKPTQHSVKELRSIGIQPDIVICRSQQSIPIDQRKKISLFCNIPIDRVIETVDVKTIYEAPISFFKEGLDKQVFKYFKMKPKKKINLSPWKKVTRIITNKNTKQVNIAIIGKYVDLKDAYKSLDEALVHGGIQNKVKINLNRIESDRLKINEINNKLKNISGILIPGGFGKRGTEGK

SEQ ID NO: 196149 - protein, 268 aa, Unknown
  Bacterial polypetide isolated from the Sargasso Sea
PQESKEKIALFCSMPKNGVFSLPNLDTIYQVPVFLANQGIDEILTQKMHLDKTKPNLTAWKTVVKRKLFPKKQVNVSFVGKYVDLKDAYFSLTEALDHAGIKNDTKVNINLINSEDLNSRNYKRALKKSDAILVPGGFGDRGIEGMILAARFSREHNIPYLGICLGLQIAIIDIARSLCGLKDANSTEFKPRTKNKVISLVTEWQNKDGSTEKRNKNSDLGGTMRLGSQKAHIIKGTKASRLYKTKTIFERHRHRFEVNPEYLNLLEG

SEQ ID NO: 196150 - protein, 271 aa, Unknown
  Bacterial polypetide isolated from the Sargasso Sea
FISKDISNEDFIICEIGGTVGDIESLPFLEAIRQFSNDHGRSRTLFVHLTLVPFMKSSDEIKTKPTQHSVKELRSIGIQPDIVICRSEQHIPLEQRKKISLFCNVDIKNVIETVDVRTIYEAPISFYNQKLDKQVLKYFKIKSKKKPNLNPWKSITSTVLKNNKVINIGIIGKYVNLKDAYKSLDEALTHGGIANNVKVNLVRIESDKLKKKEISKKLKSVSGILIPGGFGKRGTDGKIAAIKYAREKKIPFFGICFGMQMAIIEFARNKL

SEQ ID NO: 196151 - protein, 303 aa, Unknown
  Bacterial polypetide isolated from the Sargasso Sea
SEIKTKPTQHSVRELRAIGIQPDALVCRSELPLPKEHFDKIALFTNVEKKAVISAHDAEDIYQIPLILREQCLDDIIVEKLKLDVPKADLTPWENVFKESKNSDSKVTIAMVGKYVDFKDSYISLSEALRHAGFKNSKGVEIVYVESEDIQENGTDCLSEMDAILIPGGFGDRGIEGMIQSIEYARKNDIPFLGICLGMQAAVIEYARNVLDHKDANSTEFNSSTSAPVIAMITEWMNDDGSKENRDENSDLGGTMRLGAQECLFTKGTKAKDIYGADSVVERHRHRYEFNNRYREELKKMVW

SEQ ID NO: 196152 - protein, 240 aa, Unknown
  Bacterial polypetide isolated from the Sargasso Sea
MARYIFVTGGVVSSLGKGLSSASLAYLLKSQGYKVRLRKMDPYLNVDPGTMSPFQHGEVFVTDDGAETDLDLGHYERFTNISSKQSDNITTGRIYSDVIKRERKGGYLGKTVQVIPHITNRIKEFIKKDITNEDFVICEIGGTVGDIESLPFVEAIRQFSNEHGKSKTLFIHLTFVPFLKSSDEIKTKPTQHSVKELRSIGIQPDIIICRSQQSIPLDQRKKISLFCNVPIDNVIETVDV

SEQ ID NO: 196153 - protein, 145 aa, Unknown
  Bacterial polypetide isolated from the Sargasso Sea
MARFIFITGGVVSSLGKGLTSASLGALLQARGFSVRLRKLDPYLNVDPGTMSPFEHGEVFVTDDGAETDLDLGHYERFTGVAAQSTDSVSSGRIYSTVLERERKGDYLGETIQVIPHVTNEIKRFLEKHEDEVDFMLCEIGGTIG

SEQ ID NO: 196154 - protein, 148 aa, Unknown
  Bacterial polypetide isolated from the Sargasso Sea
IEWARNVANLPNASSSELEPNTPNPVIHLLPEQEDVVDLGGTMRLGVYPCRLTKNTTGKNLYNEDIIYERHRHRYEFNNYYKQSFLDSGYKISGTSPDGRLVELIELENHPYFLACQYHPEFLSRPGKPHPLFKGLIKASQDKLTQSN

SEQ ID NO: 196155 - protein, 176 aa, Unknown
  Bacterial polypetide isolated from the Sargasso Sea
MARYIFVTGGVVSSLGKGLSSASLGYLLRSQGYKVRIRKMDPYLNVDPGTMSPFQHGEVFVTDDGAETDLDLGHYERFTNISAKQSDNITTGRIYSDIIKKERRGGYLGKTVQVIPHVTDRIKEFIKKDITNEDFVICEIGGTVGDIESLPFLEAIRQFSNDYGRSKSLFIHLTFV

SEQ ID NO: 196156 - protein, 285 aa, Unknown
  Bacterial polypetide isolated from the Sargasso Sea
YLGGTVQVVPHVTDRIKKFISHDVKNEDFIICEIGGTVGDIESLPFLEAIRQFSNDVGKKNSLFIHLTLVPYLKASGELKTKPTQHSVKELRSLGIQPDIIVCRSEREIPKTERRKISLFCNVPIENVIETVDVRTIYEAPICFHKEKLDDRVLSFFNIKSKKSPDLSKWKNITSRVLNPKKDVNIGIIGKYVDLKDAYKSLDEALIHGGISNNVKVNLKRIDSENLKPDKIKPLLKDVTGVLIPGGFGKRGTEGKIAAIKYARLNNIPFFGICFGMQMAVIEAA

SEQ ID NO: 196157 - protein, 300 aa, Unknown
  Bacterial polypetide isolated from the Sargasso Sea
ALFTNVNAESVISMPDVDSIYKIPIELNSQQVDEIVLSKLSLNSSKKPNLNDWKKVIKEDLEPKERVTISMVGKYTDLADAYKSLNEALKHGGFKNNLKVQINYVDSEQLNSKNTHQKLKNTDAILVPGGFGERGIEGMVCAVKYARTRSIPYLGICLGMQIAVIEFARHIAGLKSANSTEFNEKTKYPVVGLIHEWLDSEGSIERRDSNSNLGGTMRLGAQDCLLNKDSLTYKLYKKVKIKERHRHRYEVNNNLIETLTANGLSVAGKSVDKMLVEVIEIKDHPWFIGCQFHPEFTSDP

SEQ ID NO: 196158 - protein, 249 aa, Unknown
  Bacterial polypetide isolated from the Sargasso Sea
VNIAIIGKYVDLKDAYKSLDEALTHGGIENNVKVNLIRIDSEKLKVSEIKSKLKNISGILIPGGFGKRGTDGKIDAIKYARINKIPFLGICYGMQMAIIEFARNKLNLSKATSSEFDKKGLPIIGLINEWVKDGKIIKGTDIDLGGTMRLGSYEAKLKKNSKINKIYGKNFIKERHRHRYEVNINYKEKFEKKGMYFSGLSPNGMLPEIIELKNHPWFIGVQFHPEFRSRPLAPHPLFSSFIKASKNHK

SEQ ID NO: 196159 - protein, 179 aa, Unknown
  Bacterial polypetide isolated from the Sargasso Sea
MGKIESIKYARKNKVPFLGICYGMQMAIIEFARNQLSLKKATSSEFDRNGIPVIGLINEWIKDGKTIKGTDKNLGGTMRLGSYDAKLQDNSKIKKIYGKKIIKERHRHRYEVNINLKDKFEKKGMSFSGLSPDGFLPEIIELKDHPWFIGVQFHPEFKSRPFAPHPLFSSFIKASKNHK

SEQ ID NO: 196160 - protein, 313 aa, Unknown
  Bacterial polypetide isolated from the Sargasso Sea
RLFSIRLRKLDPYINVDPGTMSPYQHGEVFVTDDGAETDLDLGHYERFTGVPATKSDNITTGKIYQKVIQKERTGDYLGSTVQVIPHITDAIKEFISKDIGNCDFVLVEIGGTVGDIESLPFLEAIRQFGNEEGRNRSMYVHLTLIPYIETSNEQKTKPTQHSVRELREIGIQPNILLCRCDRNIEENEKEKIALFCNVSPEQVIQGIDVKNIYNVPIVYNSEGLDSQVLKYFSIKKKKKINLKHWEKIIFRMKSPKRNIKVGIVGKYTDFPDAYKSLSEAIVHGSLTNRSEAKIVWINSENLKTSNIEDNLS

SEQ ID NO: 196161 - protein, 94 aa, Unknown
  Bacterial polypetide isolated from the Sargasso Sea
MARYIFVTGGVVSSLGKGLSSASLAYLLQSRGYKVRIRKLDPYLNVDPGTMSPFQHGEVFVTDDGAETDLDLGHYERFSGISAKKSDNITTGKI

SEQ ID NO: 196162 - protein, 193 aa, Unknown
  Bacterial polypetide isolated from the Sargasso Sea
NKVDAIVVPGGFGNRGVNGKISAIKFARENKIPFLGLCLGMQCAVIEWARNLANLPDASSSELDPNTPNPVIHLLPEQEDVVDLGGTMRLGVYPCRLTKNTTGKKLYDEDVIYERHRHRYEFNNYYKQSFLDSGYKISGTSPDGRLVELIELENHPYFLACQYHPEFLSRPGKPHPLFKGLIKASQDKLTQSN

SEQ ID NO: 196163 - protein, 238 aa, Unknown
  Bacterial polypetide isolated from the Sargasso Sea
MARFIFVTGGVVSSLGKGLSSASLAYLLQSRGYKVRLRKLDPYLNVDPGTMSPFQHGEVFVTDDGAETDLDLGHYERFSGVLAKKSDNITTGKIYNDVLIKERRGSYLGKTVQVIPHITDRIKEFIKNDSSKEDFIICEIGGTVGDIESLPFVEAIRQFANDIGKKKALFIHLTLVPYLKSSDEIKTKPTQHSVKELRSIGVQPDIIICRSERPIPLEHRKKISLFCNIKFKMLSKQL

SEQ ID NO: 196164 - protein, 193 aa, Unknown
  Bacterial polypetide isolated from the Sargasso Sea
MARYIFVTGGVVSSLGKGLSSASLAYLLQSRGFKVRIRKLDPYLNVDPGTMSPFQHGEVYVTDDGAETDLDLGHYERFSGVSAKKSDNITTGRIYNDVLKKERKGEYLGKTVQVIPHITDRIKQFIKNDSSKEDFVICEIGGIVGDIESLPFVEAIRQFANDVGKKNALFIHLTLVPYLKASDEIKTKPTQHS

SEQ ID NO: 196165 - protein, 283 aa, Unknown
  Bacterial polypetide isolated from the Sargasso Sea
LEFPNSSWAFVHLTLVPFINASGELKTKPTQHSVKELRSLGISPDLLVCRSEQELPKDEKKKIALFCSVPNESVISMHDVDTVYSVPILLNKQKVDKTIIEKLKIKAKQPNLNDWKRVVKAKLMPEKEVNVSFVGKYTELKDSYKSINEALEHAGIKNKAKVNINFVEAENITSKNIKKTLKNADAVLVPGGFGERGIEGMILACKYARENNIPYLGICLGMQVAIIEYARNVLNLKGANSTEFDHNTKHPVKGLITEWNDISGKKKRRDKNSDLGRTMRLGG

SEQ ID NO: 196166 - protein, 118 aa, Unknown
  Bacterial polypetide isolated from the Sargasso Sea
MARFIFITGGVVSSLGKGLASAALGALLQARGYSVRLRKLDPYLNVDPGTMSPFEHGEVFVTDDGAETDLDLGHYERFTGVSARMTDSVSSGRIYSNVLEKERRGNYLGKTIQVIPHV

SEQ ID NO: 196167 - protein, 146 aa, Unknown
  Bacterial polypetide isolated from the Sargasso Sea
MSAKYIFVTGGVVSSIGKGITVASIGRILKNRGFDISVIKLDPYLNVDPGTMSPYQHGEVFVTEDGGETDLDLGHYERFIDIELNKKSNVTAGQVYLSLITKERKGDFLGGTIQTIPHVTNEIKHHITDLAESLDVDVMVVEVGGT

SEQ ID NO: 196168 - protein, 184 aa, Unknown
  Bacterial polypetide isolated from the Sargasso Sea
MQTKFIFITGGVVSGLGKGIAAASIGALLESRGLTISLMKLDPYINVDAGTMNPFQHGEVFVTVDGAETDLDLGHYERYTNAVLTRRHNRTTGQIYDSVIRKERSGKYLGATVQVIPHVIDEIKQTISDAAILISNNDNSKNADICIVEIGGTAGDIESLPFLEAIRQYRNDFGRENTLFITSH

SEQ ID NO: 196169 - protein, 106 aa, Unknown
  Bacterial polypetide isolated from the Sargasso Sea
MARYIFVTGGVVSSLGKGLSSASLAYLLKSQGYKVRIRKMDPYLNVDPGTMSPFQHGEVFVTDDGAETDLDLGHYERFTNISSKKSDNITTGRIYSDIIKKERKGM

SEQ ID NO: 196170 - protein, 157 aa, Unknown
  Bacterial polypetide isolated from the Sargasso Sea
MARFIFVTGGVVSSLGKGLSSASLAYLLKSQGYKVRLRKMDPYLNVDPGTMSPFQHGEVFVTDDGAETDLDLGHYERFTDISCKQSDNITTGRIYSDVIRRERKGGYLGKTVQVIPHVTNRIKEFIKKDITNEDFVICEIGGTVGDIESLPFVEAIR

SEQ ID NO: 196171 - protein, 179 aa, Unknown
  Bacterial polypetide isolated from the Sargasso Sea
IAAIKYARLNNIPFFGICFGMQMAIIEAARNLLNIKNASTSEFGNNCTPVVGLLEEWKKGKKRIKGSEKNLGGTMRLGLYDAILKNNSLISKIYSEKKIKERHRHRYEVNIKYKNNFEKKGLIFSAMSPDGTLPEIIELKNHPWFIGVQFHPEFKSRPFAPHPLFSSFIKAAGIKGRKN

SEQ ID NO: 196172 - protein, 231 aa, Unknown
  Bacterial polypetide isolated from the Sargasso Sea
MTRYVFITGGVVSSLGKGIAAASLASLFKLRGFKVSLQKLDPYINLDPGTMSPIQHGEVFVTEDGAETDLDLGHYERFVGIQMSQDSNVTAGRVYSNVINKERKGDYLGSTVQVIPHITDEIKRLVIKGAKKADIAFVEVGGTVGDIESLPFLESIRQFSLDLGKKRSMFVHLTLLPYIDVTNEIKTKPTQHSVKELRSIGIQPDVLLCRGKNEINQSLKNKLALFTNVSK

SEQ ID NO: 196173 - protein, 60 aa, Unknown
  Bacterial polypetide isolated from the Sargasso Sea
PYLNVDPGTMSPFEHGEVFVTDDGAETDLDLGHYERFTGVAAKKTDSISSGKIYSSVLDK

SEQ ID NO: 196174 - protein, 286 aa, Unknown
  Bacterial polypetide isolated from the Sargasso Sea
KVIKTICEKLKIKAKQPNLNDWKRVVKAKLMPEKEVNVSFVGKYTELKDSYKSINEALEHAGIKNKSKVNINFVEAENISSKNIKKTLKNADAVLVPGGFGERGIEGMILACKYARENNIPYLGICLGMQVAIIEYARNVLNLKGANSTEFDQNTKHPVIGLITEWNDISGKKEKRDKNSDLGGTMRLGGQLCKLKKGSNSLRMYKNSEIIERHRHRYEVNPKYKDDMIKKGLDVVGTSIDGKLVEMIEIPKHKWFLACQFHPEFTSNPRDGHPIFNSYIKSTLRK

SEQ ID NO: 196175 - protein, 317 aa, Unknown
  Bacterial polypetide isolated from the Sargasso Sea
LTVTMLKLDPYINVDPAQMSPIQHVEVFVTDDGAETDLDLGHYERFIRTRMTKRNNFTTGRVYEEVLKRERRGDYLGATIQVIPHITNEIKRRVIEGAEGHEVAIVEVGGTVGDIESQPFLEAIRQLGTEVGRERAMYMHLTLVPYMPASGEVKTKPTQHSVKELRSIGIQPDILVCRSVGALPTSERSKIALFTNVADKAVISLKDVDSIYRIPAALKAQGMDQLVVDRFGFDCPEADLVEWEQVLYAESNPTAEVNIGMIGKYVELPDAYKSVNEALKHAGLKNRLTVNIHHIDSQDVESKGTQILEKLDAILVP

SEQ ID NO: 196176 - protein, 321 aa, Unknown
  Bacterial polypetide isolated from the Sargasso Sea
SISARGGIVTEDGCETDLDLGHYERFLDQSLLRYNNITSGMIYWDVLKKERKGDYLGKTVQIIPHVTNEIKNRINSCLDDKPFDIVITEIGGTIGDIEGLPFVEAIRQFQFANKGDSIHIHLTLVPFLKTSGEFKTKPTQHSVKELRSIGIQPDIVLCRSMMPLSQDIKEKIALFSDVDIKSVTSAIDVESIYDVPLILQNEKLDMVVCQKLGLENKECSMNSWKEYIKTLHDPTLTTIKIAVVGKYVNYSDCYISVVESLYHAATSHLCKVELVWVDSELLEKKDVATELSGVSGVLVPGGFGERGIEGKIMACQFAREN

SEQ ID NO: 196177 - protein, 248 aa, Unknown
  Bacterial polypetide isolated from the Sargasso Sea
SFVGKYTELKDSYKSINEALEHAGIKNKAKVNINFVEAENISSKNIKKTLKNADAVLVPGGFGERGIEGMILACKYARENNIPYLGICLGMQVAIIEYARNVLNLKGANSTEFDQNTKHPVIGLITEWNDISGKKEKRDKNSDLGGTMRLGGQLCKLKKGSNSLRMYKNSEIIERHRHRYEVNPKYKDDMIKKGLDVVGTSIDGKLVEMIEIPKHKWFLACQFHPEFTSNPRDGHPIFNSYIKSTLRK

SEQ ID NO: 196178 - protein, 282 aa, Unknown
  Bacterial polypetide isolated from the Sargasso Sea
ERTIPLDQRKKISLFCNVGIDDVIETVDVKTIYEAPISFNKEKLDERVLNFFKIKSRKKVNLIPWKKITKLVLNTKDIVNIAIIGKYVELKDAYKSLDEALTHGGIANNLKVNIIRIESDFLKPSEIKKKLKNVSGVLIPGGFGKRGTEGKIAAVNFSRKNKIPFLGICFGMQMAVIEFARNKLNIKNATSSEFGPSKASVIGLMSEWSKDGKLIKGTNKKLGGTMRLGSYEARLKKDTKISKIYNSLKIQERHRHRYEVNINYKEEFEKKGMIFSGLSPDN

SEQ ID NO: 196179 - protein, 261 aa, Unknown
  Bacterial polypetide isolated from the Sargasso Sea
ASLGAILEARGLKVGMMKLDPYLNVDPGTMSPYQHGEVFVTEDGTETDLDLGHYERYVNTITSKHSNFTAGKVYENVIAKERRGDYLGATVQVIPHVTDEIKNSIKDGSIGYDVTIVEIGGTVGDIESLPFIEAIRQMGIEKDGYEVAYVHLTLVPYIRASDEIKTKPTQHSVRELRAIGIQPDALVCRSELPLPKEHFEKIALFTNVDKQAVISAHDAEDIYQIPLILKEQGLDDIIVEKLKLNAPEADLSDWQNIMEAK

SEQ ID NO: 196180 - protein, 264 aa, Unknown
  Bacterial polypetide isolated from the Sargasso Sea
MHLTLLPFLKSAGETKTKPTQRSVKEMLSHGLQPDILVCRSDEPMEEEERKKIALFTNVKPNAVISMPDVDSIYKIPIELNYQKVDEIVLEKFKLNSSKKPNLRDWRKVIKEDLEPKDFVKISMVGKYTELADAYKSLNEALKHGGFKNNLKVDIDYVDSEKLDSKNVHRKLGKSDAILVPGGFGERGIEGMVTAVKYARTKLIPYLGICLGMQIAVIEFARNVAKLKLANSTEFDKTTNYPVVGLISEWLDSEGSIKRRDSNS

SEQ ID NO: 196181 - protein, 236 aa, Unknown
  Bacterial polypetide isolated from the Sargasso Sea
MGHYERFTNRSSKKTDSTSSGKIYSNVLKKERKGDYLGATIQVIPHVTDEIKLFINSNFEDEDIIIYEIGGTVGDIESLPFLEAIRQIRNDKNITSALIHMTYVPYLSSAGELKTKPTQHSVKELLNSGIQPDIIMCRCEKEINLESLEKISQFCNVKKDSVIPALNAKSIYEVPSIYSRAGLDNVLLEHLGYETSKYPLNLKAWENLTNKIKNLKKEVTIGVVGKYTNLKDSYKS

SEQ ID NO: 196182 - protein, 432 aa, Unknown
  Bacterial polypetide isolated from the Sargasso Sea
MTRYIFVTGGVVSSLGKGIASASLAAILEARGLKVTMLKLDPYINVDPGTMSPFQHGEVFVTHDGAETDLDLGHYERFIRTTMSKSNNFTTGRVYEDVLRKERRGDYLGATIQVIPHITDEIKRRIIKGAGDADVALVEIGGTVGDIESQPFLEAIRQLRVEVGAKRAMLMHLTLVPYIATAGETKTKPTQHSVKELRSIGLQPDVLVCRSDHPIDVSSRRKIALFTNVEERAVISLEDVDTIYKIPGVLHAQGLDDFVVERFGLECGGADLSEWDRVVDAKLNPEKEVTIAMVGKYMELLDAYKSLIEAMSHAGIQNRTKVNLRYIDSEDIENQGTALLEGVDAILVPGGFGLRGVEGKIKTVQYARENKIPYLGICLGMQVAVIEYARNVVGWTDANSSEFDMASAHPVVGLITEWQDAAGSVEQRSESS

SEQ ID NO: 196183 - protein, 424 aa, Unknown
  Bacterial polypetide isolated from the Sargasso Sea
MAKFVFITGGVVSSIGKGIVAASLGRLLKSRGYNVSILKLDPYLNVDPGTMSPIQHGEVFVTEDGAETDLDLGHYERFTDTAMSRLNSVTTGSIYQAVINKERRGDYNGGTVQVIPHITGEIRERIHRVAANSNADVVITEIGGTVGDIESLPFLEAIREFRGDVGRRDLAYIHVTLLPFIGTSGELKTKPTQHSVKELRSIGIQPDVLVCRSDRTISDEMKRKIGGFCGVPTRAVIPSLDADSIYAVPLTLEKEGLCCEVLDVLDLTDHDSDMAAWQELVHKLRNPGPAVKVALVGKYIQLNDAYLSVVEALRHACIAQDASLDLHWVCAEQIESDGAQTLLKGMDAVVVPGGFGNRGVDGKIAAIRWAREQRVPFLGLCLGMQTAVIEWARNQAGLTEATSAELDAGTPHPVIHLLPEQQDV

SEQ ID NO: 196184 - protein, 524 aa, Unknown
  Bacterial polypetide isolated from the Sargasso Sea
MNKPKYIFVTGGVTSSLGKGIVSASLARLLQAQGLNVSIQKLDPYINVDPGTLNPYEHGECYVTDDGAETDLDLGHYERFLSINTSQKNNITTGKIYQNVIEKERKGEFLGKTVQVIPHVTNEIKENIRNLNNKNNLDIIITEIGGTVGDIESLPFLEAVRQVIYEEGPENSMVIHLTLIPFLSATGELKTKPTQHSVKTLMELGLKADVLVCRTEKVLSDEIKNKLALFCNVRFDCVIQSIDVETIYDVPIKMMDEGLDRVTLEKFNIKESEPNLDKWKNFLHKLKNPTHQINIGLVGKYVELDDSYKSILESLIHAGAENEVKVVVNSIHSEYLDKENISKNLRQLDGIIVAPGFGQRGLDGKILAVEYARVNKIPFLGICLGMQMAVIEYARNVKKIRYANSTEISEKCKDPVIDLMTSQKEIINKGGTMRLGAWDCEIEKNTKSYKCYKKKLISERHRHRYEFNNNYTDRIFDDKFVIAGSNPDTKLVEIVENIDHPWFVGVQFHPEYKSSVYNPHPIFV

SEQ ID NO: 196185 - protein, 294 aa, Unknown
  Bacterial polypetide isolated from the Sargasso Sea
MARFIFVTGGVVSSLGKGLSSASLGFLLKSQGYKVRIRKMDPYLNVDPGTMSPFQHGEVFVTDDGAETDLDLGHYERFTNISAKKNDNITTGKIYSDIISKERKGDYLGKTVQVIPHVTERIKKFIKKDIKNEDFVICEIGGTVGDIESLPFLEAIRQFSNDIGKDKTLFVHLTLVPFLKSSDEIKTKPTQHSVKELRSIGIQPDIIICRSQRSIPLDQRKKISLFCNISIERVIETVDVKTIYEAPISFFNEGLDKQVLKYFKIKPKKKINLSPWKNVTKIVTDKNSKTINIA

SEQ ID NO: 196186 - protein, 457 aa, Unknown
  Bacterial polypetide isolated from the Sargasso Sea
MAQTKYIFITGGVVSSLGKGIAAASIGALFEARGLKVSLNKLDPYINVDPGTMSPFQHGEVFVTDDGTETDLDLGHYERFVRFQASKKNNFTAGKVYEEVIQNERRGDYLGGTVQVIPHITDEIKRRIKLGAKGADIAIVEIGGTVGDIESQPFIEAIRQMMLELPTNATALAHLTLVPYIQVSEELKTKPTQHSVKELRSLGLQPDCLICRLEKELPNDEKKKIALFCSVDPNSVISMHDAETVYSIPLLFYSQQVDKILLKKLNLSKVKSPRLNDWKRVVDAKLNPKKKVSIAIVGKYVDLKDSYKSLNEALDHAGIKNLAKVEINMIDATKITKVNVSKILKTYQAILIPGGFGSRGIEGMITACKYARENKIPYFGICLGMQIAIIEFSRNILNFKKANSTEFNQKTKYPVIGLVTEWTDSTGKIEHRNENSNLGGTMRLGGQKCLIKKSSLS

SEQ ID NO: 196187 - protein, 540 aa, Unknown
  Bacterial polypetide isolated from the Sargasso Sea
MARYIFVTGGVVSSLGKGLSSASLAYLLQSRGYKVRIRKLDPYLNVDPGTMSPFQHGEVFVTDDGAETDLDLGHYERFSGISAKKSDNITTGKIYNDVLKRERQGKYLGKTVQVIPHITNRIKEFIKNDVSKEDFVICEIGGTVGDIESLPFLEAIRQFSNELGRQNTLFIHLTLVPYMKASDEIKTKPTQHSVKELRSIGIQPDIIICRSERSIPLDQRKKISLFCNVAIEDVIETVDVKTIYEAPISFNKEKLDERVLKFFNIRSKKKVNLQPWRKITKLVLNTKNKVNIAIIGKYVELKDAYKSLDEALTHGGIANNLKVNLLRIESDRLKPRDIHNRLKGVSGILIPGGFGKRGTEGKIAAINYARKNKIPFLGICFGMQMAVIEFARNKLNIKKATSSEFGSSKASVVGLMSEWVKDGKLMKGTDKDLGGTMRLGSYEARLKKDTKISKIYKNLKIEERHRHRYEVNINFKEDFENKGMIFSGLSPDNKLPEIIELENHPWFIGVQFHPEFKSRPLSPHPLFSSFIKAAKINSKK

SEQ ID NO: 196188 - protein, 204 aa, Unknown
  Bacterial polypetide isolated from the Sargasso Sea
MASNPKYLFVTGGVVSSLGKGIFSASLGAILESRGLKVTIQKLDPYINLDPGTMSPFQHGEVFVTEDGSETDLDLGHYERFLNSKMSKLNNFTAGQVYEYVLKKERKGDFLGSTVQVIPHITDEIKKRIANCAKGYDLAIVEVGGTVGDIESQPFLEAIRQMKLELGGNRALFAHLTLIPYLASSGEIKTKPTQHSIKNLLSHG

SEQ ID NO: 196189 - protein, 536 aa, Unknown
  Bacterial polypetide isolated from the Sargasso Sea
MQYVFITGGVASSLGKGIASAAVASLLQQRNFKVRIRKLDPYLNVDPGTMSPYQHGEVFVTDDGAETDLDLGHYERFTNRSAKKTDSTSSGKIYSNVLKKERKGDYLGATIQVIPHVTDEIKLFINSNFEDEDIIIYEIGGTVGDIESLPFLDAIRQIRNDKKISSALIHMTYVPYLSSAGELKTKPTQHSVKELLNSGIQPDIIMCRCEKEINQESLEKISQFCNVKKDSVIPALNANSIYEVPSIYSKAGLDKVLLEHLGYDISKYPLNLEAWENLTNKINNLKKEVTIGVVGKYTNLKDSYKSLIEALNHGGIENNVKVEINWINAEKIKTSELVKELKSVDGILIPGGFGYRGVEGKILAIKYARENNIPFFGICLGMQLSVIEIARNVFDLSDSNSTEFQSTKNPVVSLMTEWHNKNKIEKRDQASDKGGTMRLGAYKAILKKDSKVSEIYNATEISERHRHRYEVDLSHTKDFDKKGFHFSGMSPDKVLPEVLESANHKWFIGVQFHPELKSRPLAPHPLFSSFIKHCIK

SEQ ID NO: 196190 - protein, 536 aa, Unknown
  Bacterial polypetide isolated from the Sargasso Sea
MHFVFITGGVASSLGKGIASASLAALLKSRNFKVRIRKLDPYLNVDPGTMSPYQHGEVYVTDDGAETDLDLGHYERFTNQSSKKSDSISSGKIYSTVLSKERKGDYLGATIQVIPHVTNEIKSFINSDLKNEDFAIYEIGGTVGDIESLPFLEAIRQIRNNKKISSALIHMTYIPYLSFAGELKTKPTQHSVKELLNAGIQPDIIMCRSEKPIDQESITKISLFCNVKKESVIPALNANSIYEVPSLYSKYGLDESLLKHLDYKSKNHPLDLNPWNRLLKKIKNQKSQVRIAVVGKYTNLKDSYKSLSEALMHGGIENSVNVKIKWINSEKLKKQKLILALKDCDGILVPGGFGSRGIEGKIDAIKYARKYNIPFFGICLGMQLAVIEIAQNVLNIKNANSSEFKQTSNSVIGLMTEWVKGNKIEKRSKNSNKGGTMRLGSYKAKLKKNSKIYSIYNKQLISERHRHRYEVNKKFISKFNNKGYYFSGMSPDGLLPEVLESENHKWFIGVQYHPELKSRPLKPHPLFVSFIKNCIK

SEQ ID NO: 196191 - protein, 109 aa, Unknown
  Bacterial polypetide isolated from the Sargasso Sea
MQTKYIFITGGVVSGLGKGIAAASIGALLESRGLTVSLMKLDPYINVDAGTMNPFQHGEVFVTVDGAETDLDLGHYERYTNAVLTRRHNRTTGQIYDTVIRKERAGDYL

SEQ ID NO: 196192 - protein, 175 aa, Unknown
  Bacterial polypetide isolated from the Sargasso Sea
MAQTKYIFITGGVVSSLGKGIAAASIGALFEARGLKVSLNKLDPYINVDPGTMSPFQHGEVFVTDDGTETDLDLGHYERFVRFQASKKNNFTAGKVYEEVIQNERRGDYLGGTVQVIPHITDEIKRRIKLGAKGADIALVEIGGTVGDIESQPFIEAIRQMMLELPNSSTALAHL

SEQ ID NO: 196193 - protein, 192 aa, Unknown
  Bacterial polypetide isolated from the Sargasso Sea
LLIPGGFGYRGVEGKIQAIQYARENNIPFFGICLGMQLAVIEIARNLMNLSEANSTEFKRTNTPIVSLMTEWINNDKIEKRNLNSNKGGTMRLGAYKALLKEGSKINSIYKSKEIIERHRHRYEVDSFFTKGFEKQGFEFTGMSPDNILPEVLESKNLKWFIGVQFHPELKSRPQEPHPLFVSFIKNCKKND

SEQ ID NO: 196194 - protein, 335 aa, Unknown
  Bacterial polypetide isolated from the Sargasso Sea
IIICRSQKSIPFDQRKKISLFCNVPIENVIETVDVRTIYEAPISFFNQKLDKQVLNYFRLKPKKRANLLPWKKITKITLNTKKSINIAIIGKYVNLKDAYKSLDEALTHGGISNKVKINLVRIESDKLKPNQISKKLKGVSGLLIPGGFGKRGTEGKISAIKYAREKKIPFLGICFGMQMAIIEFARNKLKIKRAGSTELDKNCYPVIGLIEEWSKDGKIIKGTDIDLGGTMRLGLYEAKLRNNSAIKKIYKSNSIKERHRHRYEVNNNLNNQFEKKGLIFSGMSPDNNLPEIIELKNHPWFIGVQFHPEFKSRPLLPHPLFSSFIKAAKSFNGK

SEQ ID NO: 196195 - protein, 373 aa, Unknown
  Bacterial polypetide isolated from the Sargasso Sea
NRIKEFIKKDITNEDFVICEIGGTVGDIESLPFLEAIRQFSNDIGRSKSLFIHLTFVPFLKSSDEIKTKPTQHSVKELRSIGIQPDIVICRSQQSIPLDQRRKISLFCNVDIDNVIETVDVKTIYEAPISFFNQKLDKQVLKFFKLKSKKRPNLLPWKKITKIVLNTKKIVNIAIIGKYVNLKDAYKSLDEALTHGGISNNIKVNLVRIESDKLKLKEIKSKLKNVSGILIPGGFGKRGTEGKIEAIKHARQNKIPFLGICFGMQMAMVEFARNKLNIKKAGSSELDKNCFPVIGLINEWNKDGKIIKGTDKNLGGTMRLGLYKAKLRNNSAIKNVYKSNVIEERHRHRYEININLMQQFEKKGLMFTGVSPR

SEQ ID NO: 196196 - protein, 537 aa, Unknown
  Bacterial polypetide isolated from the Sargasso Sea
MHFVFITGGVASSLGKGIASASLATLLKSRKFKVRIRKLDPYLNVDPGTMSPYQHGEVYVTDDGAETDLDLGHYERFTNQSAKQSDSVSSGKIYSNVLLKERKGDYLGSTIQVIPHVTNEIKSFINSDLKNEDIAIYEIGGTVGDIESLPFLEAIRQIRNDKNISSALIHMTYIPYLSSAGELKTKPTQHSVKELLNAGIQPDIIMCRSEQPIDNDSISKISLFCNVKKESVIPALNANSIYEVPSLYSKYGLDEALLKQLGFKPKNHKLNLKPWINLQKKIKIRKHKVKIAVVGKYTNLKDSYKSLNEALVHGGIENSADVDIQWINSEKENNISLMKKLKGCDGILIPGGFGIRGINGKINAIKYARENNIPFFGICLGMQLAVIEIAQNVLKIKNAHSSEFKKTTKSVVGLMTEWVNKNKIEKRDKNSDKGGTMRLGAYKAVLKKNSKIFSIYKNKVISERHRHRYEVNQKFLSKFENKGYYFSGMSPDGLLPEVLESKKHKWFIGVQFHPELKSRPLDPHPLFVSFIKAAIND

SEQ ID NO: 196197 - protein, 395 aa, Unknown
  Bacterial polypetide isolated from the Sargasso Sea
MARFIFVTGGVVSSLGKGLSSASLAYLLQSRGYKVRLRKLDPYLNVDPGTMSPFQHGEVFVTDDGAETDLDLGHYERFSGVSAKKCDNITTGKIYNDVLKKERKGKYLGKTVQVIPHITDRIKEFIKNDSSKEDFVICEIGGIVGDIESLPFVEAIRQFANDIEKKNALFIHLTLVPYLKASDEIKTKPTQHSVKELRSIGIQPDIIICRSERSIPLEHRKKISLFCNVDIKNVIETVDVKTIYEAPISFFKEKLDVQVLNYFKMKSKKPVNLNPWKKITKIILQTKKEVNIAIIGKYVELKDAYKSLDEALTHGGIENKIKVNLIRIDSDKLRVSEIKSKLKNISGILIPGGFGKRGTDGKIEAIRYARNNKIPFLGICYGMQMAIIEFARNKL

SEQ ID NO: 196198 - protein, 310 aa, Unknown
  Bacterial polypetide isolated from the Sargasso Sea
SNVISMHDVDTVYSIPLLLHKQKVDEIVLKDLGLKTKKPNLNDWKKVVQAKLNPKKSVEVAMVGKYTELKDSYKSLNEALDHAGIKNNAKVNITFVEAEKLTRRNVKAKLKFADAVLVPGGFGSRGIEGMIIACEYARLKKIPYFGICLGMQIALIEFARNMLGLRGANSTEFDSKTNYPVVALITEWKDKTGKTEKRTADSDLGGTMRLGGQTCVVKKSSNVFRMYKKLEIVERHRHRYEVNPEFRDGFNTKGMNIVGTSVDDMLVEMIEIQNHPWFLGCQFHPEFTSNPRDGHPIFNSFISSTIKTKK

SEQ ID NO: 196199 - protein, 548 aa, Unknown
  Bacterial polypetide isolated from the Sargasso Sea
MGNKQTRFLFVTGGVVSSLGKGVAAASLGAVLESRGLSVTILKLDPYINLDPGTMSPFQHGEVFVTEDGSETDLDLGHYERFLTSKMSKSNNFTTGQVYEEVLRKERKGDYLGGTVQVIPHITDEIKKRIIKGAGNSDVAIVEIGGTVGDIESQPFLEAIRQMKIDLQSYQTLYMHLTLLPFLKSAGETKTKPTQRSVKEMLSHGLQPDILVCRSDKPMEEEERKKIALFTNVKPNAVISMPDVDSIYKIPIELNYQKVDEIVLEKFKLNSSKKPNLRDWRKVIKEDLEPKESVKISMVGKYTELADAYKSLNEALKHGGFKNNLKVDIDYVDSEKLDIKNVHRKLGKSNAILVPGGFGERGIEGMITAVKYARTKLIPYLGICLGMQIAVIEFARNIARLKLANSTEFDKTTNYPVVGLISEWLDSEGSIKRRDSNSDLGGTMRLGSQECILDNNSLTRVLYKKSRIQERHRHRYEVNNNLIDILVSKGLKVVGKSADKMLVEVIEIDEHPWFIGCQFHPEFTSDPRSGHPLFTGFIKAAKKNKISK

SEQ ID NO: 196200 - protein, 266 aa, Unknown
  Bacterial polypetide isolated from the Sargasso Sea
MRKRNTKFIFVTGGVMSSLGKGLASACIGALLEARGISISIQKLDPYINVDPGTMNPYQHGEVFVTDDGAETDLDLGHYERFTNVKLSQSNNVTTGRVYNEVISKERRGDYLGQTVQVIPHITDEIISRVFDLQGKTDISIVEIGGTVGDIESLPYLEAIRQIRTQLGKENALFVHLTYVPYISAAGELKTKPTQHSVKDLLQIGIQPDILLCRTDRFLSNELKKKIALFCNLNVESVITAKDVDIIYEVPLIFHKEGLDDIILES

SEQ ID NO: 196201 - protein, 355 aa, Unknown
  Bacterial polypetide isolated from the Sargasso Sea
MARYIFVTGGVVSSLGKGLSSASLAYLLKSQGYKVRLRKMDPYLNVDPGTMSPFQHGEVFVTDDGAETDLDLGHYERFTNISSKQSDNITTGRIYSDVIKRERKGGYLGKTVQVIPHITDRIKEFIKKDITNEDFVICEIGGTVGDIESLPFVEAIRQFSNEQGKSKTLFIHLTFVPFLKSSDEIKTKPTQHSVKELRSIGIQPDIIICRSQQSIPLDQRKKISLFCNVPIDNVIETVDVRTIYEAPISFFNQKLDKQVLKYFKLKPKKRANLNPWKRITKIVLNTKKSVNIAIIGKYVNLKDAYKSLDEALIHGGISNKVKVNLIRIESDNLKSNEIKKRLKNVSGLLIPRWFW

SEQ ID NO: 196202 - protein, 342 aa, Unknown
  Bacterial polypetide isolated from the Sargasso Sea
SLGISPDVLICRSDQELPSDEKNKIALFCSVPNDSVISMHDVETVYSVPLLLHSQKVDKTILKKLKINTKQAQLNDWKRVVKAKLLPEKEVTVSFVGKYTELKDSYKSINEALEHAGIKNKTRVNINFVEAETLTPKNIHKTLKNSDAILVPGGFGERGIEGMILACKYAREKDIPYLGICLGMQVAIIEYARNVLKLKGANSTEFDQNTKYPVIGLITEWNDISGKKEKRDKHSDLGGSMRLGGQVCKLKKKSNSYKMYKNLEIVERHRHRYEVNPKFKDKMISAGLDVVGTSIDGNLVEMIEIPNHKWFLACQFHPEFTSNPRDGHPIFNSYIKSTLKNN

SEQ ID NO: 196203 - protein, 362 aa, Unknown
  Bacterial polypetide isolated from the Sargasso Sea
KPTQHSVGKLREIGIQPDILICRTSNSLSDHLRRKISLFTNVQEDAVVDGLEVESVYEAPLMFQQQGLDNTIANYLKMWTRRPMLQPWIELVNRLKNPKDAVDIAFVGKYVQQRDSYESLNEALMHGGIANQLKPRLHYIDSEMLETEKIEDLLSGMDGILVAPGFGERGMEGKIAAVEFARTRNIPFFGICLGLQMAIVECARNLGGIKDAHSAEFRPDHKNNVVDLMPSQAGLQETGGSMRLGSYPAQLQKGSKIASIYQSTDISERHRHRYEVMNHFIPMLEKCGMQISGRNPELNLVETIERADHPWFIACQFHPELKSKPLLPHPLFASYIQAAYEFRKFRLGQERRQVEKARTSHG

SEQ ID NO: 196204 - protein, 541 aa, Unknown
  Bacterial polypetide isolated from the Sargasso Sea
MTRFIFVTGGVVSSLGKGLASASLASLLQHHGYKVRIRKLDPYLNVDPGTMSPYQHGEVYVTDDGAETDLDLGHYERFTGVVSKKSDNITSGRVYQKIITRERKGEYLGATVQVIPHVTNEIKEFISNDLEQENFVICEIGGTIGDIESLPFIEAIRQFHNDNGHENSLFIHVTLVPYIASSGELKTKPTQHSVKELRSLGIQPNILLCRSDRIIPEGERKKIGLFCNVQHNCVIQAINANSIYEVPINFYNEGLDKRVLEYFNLDANKTINLKMWSQVSKHVLEPEGKVVIGIVGKYTGLADAYKSLNEALSHGGIFNNVKVELKWFESEELNSSNTSSLLANCHGILVPGGFGERGSEGKIAAIKYAREKNIPYFGICFGMQLAVIEMARNILGIQDANSSEFSNCTNSIVGLMTEWTTSDNTTEKRSKNDDLGGTMRLGSYEAKLRKGSKIYNIYKDEIINERHRHRYEVNNKFAEEFENKGVIFSGYSPDGLLPETVELKDHPWFIGVQYHPELKSKPFEPHPLFKSFIDAAKKIER

SEQ ID NO: 196205 - protein, 370 aa, Unknown
  Bacterial polypetide isolated from the Sargasso Sea
MARYIFVTGGVVSSLGKGLSSASLGYLLKSQGYKVRIRKMDPYLNVDPGTMSPFQHGEVFVTDDGAETDLDLGHYERFTNISAKQSDNITTGKIYSDIIKKERRGGYLGKTVQVIPHVTDRIKEFIKKDITNEDFVICEIGGTVGDIESLPFLEAIRQFSNDNGRSKSLFIHLTFVPFLKSSDEIKTKPTQHSVKELRSIGIQPDIVICRSQQSIPLDQRRKISLFCNVDIANVIETVDVKTIYEAPISFFNQKLDKQVLKFFKIKSRKRPNLLPWKKITNIVLKTNRTVNIAIIGKYVNLKDAYKSLDEALTHGGISNKVKVNLVRIESDKLRSKEIRSKLKNVSGILIPGGFGKRGTEGKIEAIRYAR

SEQ ID NO: 196206 - protein, 347 aa, Unknown
  Bacterial polypetide isolated from the Sargasso Sea
SVKELLNAGIQPDIIMCRSEQPIDNDSISKISLFCNVKKESVIPALNAKSIYEVPSLYSKYGLDEALLKQLGYKPKNHKLNLKPWIDLQKKIKKRKHKVKIAVVGKYTNLKDSYKSLNEALVHGGIENSADVDIQWINSEIENNASLIKKLKGCHGILIPGGFGIRGINGKISAIKYARENNIPFFGICLGMQLAVIEIAQNVLKIKNAHSSEFKKTTKSVVGLMTEWVNKNKIEKRDKNSDKGGTMRLGAYKAILKKNSKIFSIYKNRVISERHRHRYEVNQKFLSKFENKGYYFSGMSPDGLLPEVLESKKHKWFIGVQFHPELKSRPLDPHPLFVSFIKAAIND

SEQ ID NO: 196207 - protein, 218 aa, Unknown
  Bacterial polypetide isolated from the Sargasso Sea
MARYIFVTGGVVSSLGKGLSSASLAYLLKSQGYKIRLRKMDPYLNVDPGTMSPFQHGEVFVTDDGAETDLDLGHYERFSNISAKKSDNITTGKIYSDIIKKERTGKYLGKTVQVIPHVTDRIKEFIKGDITDEDFVICEIGGTVGDIESLPFVEAIRQFSNDVGKKRSLFIHLTLVPFLKSSDEIKTKPTQHSVKELRSLGIQPDIVICRSQKSIPMD

SEQ ID NO: 196208 - protein, 497 aa, Unknown
  Bacterial polypetide isolated from the Sargasso Sea
MAKFVFVTGGVVSSIGKGIVAASLGRLLKSRGYRVSILKLDPYLNVDPGTMSPFQHGEVFVTEDGAETDLDLGHYERFTDTAMSRLNSVTTGSVYQSVINKERRGDYNGGTVQVIPHITGEIRERIHRVAANSNADVVITEIGGTVGDIESLPYLEAIREFRGDVGRNDLAYVHVTLLPFIGTSGELKTKPTQHSVKELRSIGIQPDILVCRSDRPIDDELKAKIGGFCGVPTKAVVPSLDADSIYAVPIALEKGGLCRQVLDALSLQDHESDMASWEALVQKLRNPGPAVKVALVGKYVQLNDAYLSVVEALRHACIHCDSALDLHWICAEQIEEQGADGLLKGMDAVVVPGGFGNRGVDGKIAAIRWAREQRVPFLGLCLGMQTAVIEWARNTAGLVGATSAELEPATTHPVIHLLPEQQDVVDLGGTMRLGVYPCRLSSGSKAHELYGEEVVYERHRHRYEFNNAYRSLFLESGYEISGVSPDGRLVELIELKG

SEQ ID NO: 196209 - protein, 548 aa, Unknown
  Bacterial polypetide isolated from the Sargasso Sea
MGNKHTRFIFVTGGVVSSLGKGIASASLGALIESRGLTVTILKLDPYINLDPGTMSPFQHGEVFVTEDGSETDLDLGHYERFLNSKMSKSNNFTTGQVYEEVLRKERKGDYLGGTVQVIPHITDEIKNRIIKGAGNSDLAIVEIGGTVGDIESQPFLEAIRQMKIDLQSHQTLFMHLTLLPFLKSAGETKTKPTQRSVKEMLSHGLQPDLLICRSDETMEAEERRKIALFTNVQENSVISMPDVDSIYKIPIELNHQNVDEIVLEKLKLNSKRKPNLSDWKKVIKEDLEPKESVKISMVGKYTELADAYKSLNEALKHGGFKNNLKVDIDYVDSERLNSKNVHSILKNSDAILVPGGFGERGIEGMISAVKYARTKSVPYLGICLGMQIAVIEFARNVAKLKLANSTEFDDKTNYPVVGLISEWLDLEGSIEKRDSNSDLGGTMRLGAQECILDKNSLTSKLYKKVKIKERHRHRYEVNNNLIHKLTSNGLKVVGKSKDKMLVEVVELHDHPWFVGCQFHPEFTSDPRKGHPLFAGFIKAAKKNKNKK

SEQ ID NO: 196210 - protein, 538 aa, Unknown
  Bacterial polypetide isolated from the Sargasso Sea
MNKPKYIFVTGGVTSSLGKGIISASLAKLLQSQGYNAAIQKLDPYINVDPGTLNPYEHGECYVTDDGAETDLDLGHYERFLGTTTSQKNNITTGRIYQNVINKERKGEFLGKTVQVIPHITNEIKENIRNLSDNKSLDIVITEIGGTVGDIESLPYIEAVRQIIYEEGSENAIVIHLTLLPYLNATGELKTKPTQHSVKTLMELGLKPDILVCRSEKSVSLDLRKKIALFCNVMVDSVIESIDVDTIYDVPLKMMEEGLDSISLKKLSLKSKEPNLDKWKNFLHKLRNPENEIEIGLIGKYIELNDSYKSILESLIHAGTENDVKVNVRSIHSEYIDEENMNTKLDGLNGIIVAPGFGQRGIDGKILTIHYARVNNIPFFGICLGMQMAVIEYAKNVKKIFDANSTEISKKCKNPVIDLMTNQKEIINKGGTMRLGAWDCEIIKDTKSYSIYNKKLISERHRHRYEFNNNYNDKIFDENFVKAGVNPKTDLVEIIENKSHPWFIGVQFHPEYKSSVSNPHPLFVNFVEASLNNYLNNN

SEQ ID NO: 196211 - protein, 546 aa, Unknown
  Bacterial polypetide isolated from the Sargasso Sea
MTTRYIFVTGGVVSSLGKGIAAASLAAILEARGLNVTIMKLDPYINVDPGTMSPTQHGEVFVTEDGAETDLDLGHYERFIRTKMNRRNNFTTGRIYEEVLRKERRGDYLGATIQVIPHITNAIKEKVIAGGEGHDVAIVEIGGTVGDIESLPFLESIRQLGVELGRDRTLFMHLTLVPFLGAAGEVKTKPTQHSVKELRSIGIAPDVLICRGDRAIPANERAKISLFCNVEERAVISLKDVDSIYKIPALLRSQGLDDLVVKRFGLECREADLSEWENVIYQEANPNGEVVIGMVGKYIELPDAYKSVNEALKHAGLKNRVSVSIKYIDSQTVEAKGDEVLQGLDGILVPGGFGERGVEGKILAAKYARENELPYFGICLGMQVALIEFARNVAGMTDAHSTEFNKATPFPVVGLITEWVDEEGNVEQRHEASDLGGTMRLGAQLCHLLEGSKAAQAYKGNTCVERHRHRYEVNNKYRERLEQAGLVFSGLSSDRKLVEMIELKDHPWFVAGQFHPEFTSTPRDGHPLFEGFVAAASAHQKRDLKK

SEQ ID NO: 196212 - protein, 493 aa, Unknown
  Bacterial polypetide isolated from the Sargasso Sea
MKYVVVTGGVLSGLGKGVTASSIGVLLKSAGLRVTAVKIDPYLNEDAGTMSPFEHGEVFVLDDGGEVDLDLGNYERFLDVCLTRDNNITTGKVYNKVIQKERRGDYLGKTVQVIPHITNEIQDWIERVAHTPSDGNGKEPDACVIELGGTVGDIESAPFVEALRQFQFRVGQENVCFVHVSLIPVMGPVGEQKTKPTQHTVKELRGLGINPHMLVCRSKSPLIDETRNKISAFCHVPPEAVVSAHDVSNIYQVPIMLESQGVTSMLADRFGFEIPAKRKVLDDWKELADHVDTLDDAEEVHIAVAGKYTDLADSYLSVIKALQHASFKVNRKLVIDWIESSALDGETEKSDSESHNSAWELLRSADGILVPGGFGIRGIEGKIKAAEYARENKIPYLGVCLGLQVATIEFCRNVLGMEGANSTEFDEEPAHAAVVFMPEISKTHMGGTMRLGTKPTPFLVDDCKIRRLYGGEGHVDERHRHRYEVNPELIGDI

SEQ ID NO: 196213 - protein, 545 aa, Unknown
  Bacterial polypetide isolated from the Sargasso Sea
MKDTRFIFVTGGVVSSLGKGIASASIGSILESKGYKVSVIKLDPYFNVDPGTMSPFQHGEVFVLEDGTETDLDLGHYERFIDNVCSKKNNFTAGKVYYSVLRKERKGEYLGKTVQIIPHITDEIKRKILNASKNCDIAIVEIGGTVGDIEGQPFIEAIRQLGLELKSYQTSYLHLTLVPYLSNAGELKTKPTQHSVKEYRTLGVQPDILICRSDYALPQESKEKIALFCSMPKDGVISLPNLETIYQVPLFLAEEGIDKILTKRLQLDKTTPNLKDWKKVVKRKLKPSNELNVSFVGKYVDLKDAYFSLIEALDHAGIHNDTKININYVNSEKIEQSNYKKVLKNSDAILVPGGFGNRGIEGMILAARFARENKIPYFGICLGLQIAIIEMARNLLNLKDANSTEFKPRTKNKVISLVTEWKNKDGTIERRNKKSDKGGTMRLGAQKASLLSGSLARTLYKKKTIFERHRHRYEVNPEYIAMLEREGLIVSARSEVHNLVEMIELRDHPWFLGCQFHPEFTSKPKTGHPLFNDFIKTAVKLKKKK

SEQ ID NO: 196214 - protein, 373 aa, Unknown
  Bacterial polypetide isolated from the Sargasso Sea
MARYIFVTGGVVSSLGKGLSSASLAYLLISQGYKVRVRKMDPYLNVDPGTMSPFQHGEVFVTDDGAETDLDLGHYERFTNVSSKKSDNITTGRIYRDIILEERKGNYLGKTVQVIPHVTDRIKKFITKDINKEDFVICEIGGTVGDIESLPFLEAIRQFSNEIGKNKTLFIHLTLVPYLKSSDEIKTKPTQHSVKELRSIGIQPDIVICRSQKSIPKDQKKKISLFCNVPYENVIETVDVKTIYEAPISFSNQKLDKQVLKFFDIKPRKKVDLLPWKKVTNIVLNSPKTVNIALIGKYVNLKDAYKSLDEALIHGGIQNKTKVNLMRIESDKINKNQLKDKLKNISGILIPGGFGSRGTEGKIEAINLLGLIK

SEQ ID NO: 196215 - protein, 540 aa, Unknown
  Bacterial polypetide isolated from the Sargasso Sea
MAKTKYIFITGGVVSSLGKGIAAASIGALLESRGLSVSLIKVDPYINVDPGTMSPFQHGEVFVTNDGTETDLDLGHYERFVRFQASRKNNFTAGKVYETVIRNERKGSYLGGTVQVIPHITNEIKKRIKEGGQNKDIAIVEVGGTVGDIESQPFVEALRQMALELPTSSWAFVHLTLVPFIDASGELKTKPTQHSVKELRSLGISPDVLICRSTQELPKDEKNKIALFCSVPNKSVISMHDVETVYSVPILLNKQKVDKAILDKLNIKTNNPKLNDWKRVVQAKLHPEKEVNVSFVGKYTELKDSYKSINEALEHAGIKNKAKVNINFVEAENITPKNIRKTLKNADAILVPGGFGERGVEGMILACKYAREKNIPYLGICLGMQVAIIEYARNVLNLKGANSTEFDHETNYPVIGLITEWNDISGKKEKRDKNSDLGGTMRLGGQICKLKKSSNSYKMYKNVEIMERHRHRYEVNPKFKDDMIKNGLEVVGTSIDDKLVEMIEIPTHKWFLACQFHPEFTSNPRDGHPIFNSYIKSTIT

SEQ ID NO: 196216 - protein, 541 aa, Unknown
  Bacterial polypetide isolated from the Sargasso Sea
MSDYIFVTGGVVSALGKGVTSASLGAILEARGLKVGMMKLDPYLNVDPGTMSPYQHGEVFVTEDGTETDLDLGHYERYVSTVTGKHSNYTAGKIYETVIAKERRGDYLGATVQVIPHVTDEIRKSIVKGSQGHDVTIVEIGGTVGDIESLPFVEAIRQMGIYKDGYEVAYVHLTLVPYIKASSEIKTKPTQHSVRELRAIGIQPDALVCRSELPLPKEHFDKIALFTNVEKNAVISAHDAEDIYQIPLILKEQGLDDIIVEKLKLDVPKADLTQWEKVFTASKNSDSKVKIAMVGKYVDFKDSYISLSEALRHAGFSNNKSVEIVYVESEDIQENGTDCLSEMDAILIPGGFGDRGIEGMIQSIEFARNKNIPFLGICLGMQAAVIEYARNVLGHKDANSTEFNPETSAPVIAMIREWMNQDGSTENRDENSDLGGSMRLGAQECLFQKGTRAKDIYDADSVIERHRHRYEFNNTYREELENNGLVFSGFSKDGLAEMIEIHDHPWFIGCQFHPEFTSSPLGGHPLFHSFIKAAVEYSKKN

SEQ ID NO: 196217 - protein, 293 aa, Unknown
  Bacterial polypetide isolated from the Sargasso Sea
MARYIFVTGGVVSSLGKGLSSASLAYLLKSQGYKVRIRKMDPYLNVDPGTMSPFQHGEVFVTDDGAETDLDLGHYERFTNISSKQSDNITTGRIYSDVIKKERKGGYLGKTVQVIPHVTNRIKDFIKKDITNEDFVICEIGGTVGDIESLPFVEAIRQFSNENGKSKTLFIHLTFVPFLKSSDEIKTKPTQHSVKELRSIGIQPDIIICRSQQSIPLDQRKKISLFCNVPIENVIETVDVRTIYEAPISFFNQKLDKQVLKYFKIKSKKRANLTPWKRITKNVLNTKKIVNIA

SEQ ID NO: 196218 - protein, 468 aa, Unknown
  Bacterial polypetide isolated from the Sargasso Sea
DLDLGHYERFTDTAMTRLNSVTTGSIYQAVINKERKGNYNGGTVQVIPHITGEIRERIHRVAANSNADIIITEIGGTVGDIESLPFLEAIREFKNDVNRNDVAYIHVTLLPYIKTSGEIKTKPTQHSVKELRSIGIQPDLLVCRSDKSINEALKKKLSGFCGVNINSVIEALDADSIYSVPLSLKKEGLCKETLKYLDLEDKKCDLKNWEQLIHNLRNPGDPIKVALVGKYIELGDAYLSVVEALRHACIEQRALLDLHWVSAEMIEKNSAETYLNEVDAIVVPGGFGNRGVNGKISAIKFARENKIPFLGLCLGMQCAVIEWARNVANLPDASSSELDPNTPNPVIHLLPEQEDVVDLGGTMRLGVYPCRLTKNTTGKNLYDEDVIYERHRHRYEFNNYYKQSFLDSGYKISGTSPDGRLVELIELENHPYFLACQYHPEFLSRPGKPHPLFKGLIKASQDKLTQSN

SEQ ID NO: 196219 - protein, 166 aa, Unknown
  Bacterial polypetide isolated from the Sargasso Sea
MSKFVFVTGGVVSSIGKGIVAASLGRLLKSRGYSVSILKLDPYLNVDPGTMSPFQHGEVFVTEDGAETDLDLGHYERFTDTAMTRLNSVTTGSIYQAVINKERRGSYDGGTVQVIPHITGEIRERIHRVAANSNAEIIITEIGGTVGDIESLPFLEAIREFKNDVN

SEQ ID NO: 196220 - protein, 479 aa, Unknown
  Bacterial polypetide isolated from the Sargasso Sea
EVFVTEDGAETDLDLGHYERFTDTAMTRLNSVTTGSIYQSVINKERRGSYNGGTVQVIPHITGEIRERIHRVSANSNADIIITEIGGTVGDIESLPFLEAIREFKNDVNRNDVAYIHVTLLPYIKTSGEIKTKPTQHSVKELRSIGIQPDLLVCRSDKPINEGLKKKLSGFCGVSINSVIEALDADSIYSVPLSLKKEGLCRETLSYLHLEDKKCDLKNWEQLIHNLRNPGNPIKVALVGKYIELGDAYLSVVEALRHACIEQKALLDLHWVSAEMIEKNSAETYLNEVDAIVVPGGFGNRGVNGKISAIKFARENKIPFLGLCLGMQCAVIEWARNVANLPDASSSELDPKTPNPVIHLLPEQEDVVDLGGTMRLGVYPCRLTKNTTGKSLYDEDVIYERHRHRYEFNNYYKQSFLDSGYKISGTSPDGRLVELIELENHPYFLACQYHPEFLSRPGKPHPLFKGLIKASQDKLTQSN

SEQ ID NO: 196221 - protein, 311 aa, Unknown
  Bacterial polypetide isolated from the Sargasso Sea
MGIKKTKFIFVTGGVVSSLGKGIASASLGALLESRGLSVTILKLDPYINLDPGTMSPFQHGEVFVTEDGSETDLDLGHYERFLTSKMTSSNNFTTGQVYETVLRNERKGEYLGGTVQVIPHITDEIKRRIIKGASNSDIAIVEIGGTVGDIESQPFLEAIRQMKIELGPKQTLYMHLTLVPYIAAAGEIKTKPTQRSAKEMLSHGLQPDILVCRSEVELSQEAKEKIALFTNVEKDSVISMPDAKSIYEIPIHLNSQGVDNLVARKFGLKSKKPDLKEWDRVVKAHLNPTKEVKVSMVGKYMDLKDAYKSL

SEQ ID NO: 196222 - protein, 438 aa, Unknown
  Bacterial polypetide isolated from the Sargasso Sea
MAQTKYIFITGGVVSSLGKGIAAASIGALLESRGLSVSLIKVDPYINVDPGTMSPFQHGEVFVTNDGTETDLDLGHYERFVRFEASKKNNFTAGKVYETVIRNERRGNYLGGTVQVIPHITNEIKKRIKSGGQGKDVAIVEVGGTVGDIESQPFVEALRQMALELPSSSWAFVHLTLVPFINASGELKTKPTQHSVKELRSLGISPDVLICRSDKELPKDERNKIALFCSVPNKSVISMHDVDTVYSIPILLNKQKVDKTILEKLKIKSKNPQLNDWKRVVKAKLLPEKEVNVAFVGKYTELKDSYKSINEALEHAGIKNKTKVNINFVEAENLTTRNVNKILKKADAILVPGGFGERGIEGMILACKFSREKNIPYLGICLGMQVAIIEYARNVLKLKGANSTEFDQQTKHPVIGLITEWSDISGKKETRSKNSDLG

SEQ ID NO: 196223 - protein, 238 aa, Unknown
  Bacterial polypetide isolated from the Sargasso Sea
MARYIFVTGGVVSSLGKGLSSASLAYLLQSRGFKVRIRKLDPYLNVDPGTMSPFQHGEVYVTDDGAETDLDLGHYERFSGVSAKKSDNITTGKIYNDVLKKERKGEYLGKTVQVIPHITDRIKQFIKNDSSKEDFVICEIGGIVGDIESLPFVEAIRQFANDIGKKNALFIHLTLVPYLRASDEIKTKPTQHSVKELRSIGIQPDIIICRSERSIPLEHRKKISLFCNVNIKNVIETI

SEQ ID NO: 196224 - protein, 294 aa, Unknown
  Bacterial polypetide isolated from the Sargasso Sea
MGQKTPIKYIFVLGGVISGLGKGIAAASIGYLLKSAGLKVTILKLDPYLNVDPGTMNPYQHGEVFVLDDGSETDLDLGHYERFIDVDMAKINNATTGQVYSTVLGRERKGDYLGATIQVIPHITDEIIARIKAINKPKKFDVVICEVGGTVGDIESLPFMEAIRQLSLEVGYHNHTIMHVTLVPYIQASEELKTKPTQHSVMKLREIGLSPDMILCRTEYKLTKDVKNKIGLFGNVNPEHVIEGSEVKSIYEVPLTLYNQKVSEIIMDRLQLNGKANIAYLKNFIKNSNTQNIK

SEQ ID NO: 196225 - protein, 547 aa, Unknown
  Bacterial polypetide isolated from the Sargasso Sea
MTQYIFITGGVASSLGKGLTSAALGALLQSRGFSVKIKKLDPYLNVDPGTMNPFQHGEVFVTDDGAETDLDLGHYERFTNVPASINDNITTGQIYKRIISKERKGDYLGRTVQIIPHVTDEIKKFILSNNENIDFCLCEIGGTVGDIEGLPFFEAIRQLSNELKKNMTCFLHLTLVPYISAAGEVKTKPTQHSVKELRSIGIQPDILVCRCDRKISKSDIRKISVFCNVNENSVIQAIDVDTIYAVPRDLKNNGLDIAVLNALGKNTIPKSNLRKWNTVVDRIRKPIGEVKIGVVGKYLDLNDAYKSLFEALTHGGISNNVRVKIKNIDTDKLEKSKNKKIFADVNGILVPGGFGKRGSEGKIFASKYARENNIPFFGICFGMQMAVVDAARNLIGYKSASSSEFGKTEIPVIGLLTEWIKDKEIQTRDLESEYGGTMRLGSYPAVLSKNSKVRDIYGSKKINERHRHRYEVNMSFVDELEKAGLRFVGMSPDGLLPEIVELKNHPWFIGVQFHPELKSRPFNPHPLFSSFIKASVKKSKTNGKIKK

SEQ ID NO: 196226 - protein, 399 aa, Unknown
  Bacterial polypetide isolated from the Sargasso Sea
KQDVSIVEIGGTVGDIESLPFLESIRQIRSQLGRENAIFIHLTYVPYLTAAGELKTKPTQHSVKDLLQIGIQPDILLCRTDRFLSNDIKKKIALFCNLNVESVITAKDVDIIYEIPLVLHKEGLDDIILENLKIWTKEPDFSKWENIVSKIKKLKKEVTIGVVGKYIDLKDAYKSLHEALYHASFHNNVKLKINYIDSEDLQKDTPKNLLSDCDGILVPGGFGNRGFEGKISAIKYAREKNIPFFGICLGLQMAVIEYARNVCDLKNANSRESGRKIKDFVIDIMEDQKNLDSKGGNMRLGDYPCEIKKSTKVAEAYRKTKILERHRHRYEVNPKYHNILSKKGLILSGLSPDGKLAETIEIKEHPWFVACQFHPEFKSKPFQPHPLFLNFIKASSKKS

SEQ ID NO: 196227 - protein, 167 aa, Unknown
  Bacterial polypetide isolated from the Sargasso Sea
MARYIFVTGGVVSSLGKGLSSASLAYLLKSQGFKVRVRKMDPYLNVDPGTMSPFQHGEVFVTDDGAETDLDLGHYERFTDISSTKNDNITTGKIYSDIITKERKGDYLGKTVQVIPHVTNRIKEFIKNGIKNEDFVICEIGGTVGDIESLPFLEAIRQFANDIGKEK

SEQ ID NO: 196228 - protein, 183 aa, Unknown
  Bacterial polypetide isolated from the Sargasso Sea
MERGTEGKIACINYARTKKIPFLGICFGMQMAVIEFARNVLKIKNAGSSEFDKNCYPVIGLIEEWNKNGRKIKGTVKNLGGTMRLGLYPAKLQHNSLIKEIYKSSQIKERHRHRYEVNVNLRKKFEIHGLNFSGMSPDNNLPEIVEIKNHPWFIGVQFHPEFKSRPLQPHPLFSSFIEAAKKK

SEQ ID NO: 196229 - protein, 405 aa, Unknown
  Bacterial polypetide isolated from the Sargasso Sea
MARYIFVTGGVVSSLGKGLSSASLAYLLQSRGFKVRIRKLDPYLNVDPGTMSPFQHGEVYVTDDGAETDLDLGHYERFSGVSAKKSDNITTGKIYNDVLKKERKGEYLGKTVQVIPHITDRIKQFIKHDSSKEDFVICEIGGIVGDIESLPFVEAIRQFANDVGKKNALFIHLTLVPYLKASDEIKTKPTQHSVKELRSIGIQPDIIICRSERPIPLEHRKKISLFCNVDIKNVIETVDVKTIYEAPISFFREKLDVQVLNYFKLKTKKPANLNPWKKITKIILQNKRQVNIAIIGKYVELQDAYKSLDEALTHGGIDNKIKVNLVRIDSEKLKITEIKKKLKNISGILIPGGFGKRGTDGKIQAIKHARMNKIPFLGICYGMQMAIIEFARNELNLKNATSSEF

SEQ ID NO: 196230 - protein, 381 aa, Unknown
  Bacterial polypetide isolated from the Sargasso Sea
MAKTKYIFITGGVVSSLGKGIAAASIGALLEARGLKVSLLKLDPYINVDPGTMSPFQHGEVFVTNDGTETDLDLGHYERFVRFEASKKNNFTAGIVYESVIKNERKGKYLGGTVQVIPHITDEIKRRIKAGAAGSDVAIVEIGGTIGDIESQPFVEAIRQMSLDHPSKSTSFVHLTLVPYIDVSGELKTKPTQHSVKELRSLGIGPNCLICRSETELPKDEKKKIALFCSVDISNVISMHDVDTVYSIPLLLHKQKVDEIVLKDLGLKTKKPDLNDWKKVVKAKLNPKKSIEIAMVGKYTELKDSYKSLNEALDHAGIKNNAKVNITFVEAEKLTKRNIKTKLKFADAVLVPGGFGSRGIEGMIIACEYARVKNIPYFWNM

SEQ ID NO: 196231 - protein, 337 aa, Unknown
  Bacterial polypetide isolated from the Sargasso Sea
MARYIFVTGGVVSSLGKGLASASLAYLLKSQGYKVRIRKMDPYLNVDPGTMSPFQHGEVFVTDDGAETDLDLGHYERFTNISSKKSDNITTGRIYSDIIYKERKGSYLGKTVQVIPHVTDRIKEFIKKDITNEDFVICEIGGTVGDIESLPFLEAIRQFSNDNGKNKTLFIHLTLVPYMKASDEIKTKPTQHSVKELRSLGIQPDIVICRSERSIPLDQRKKISLFCNVPIENVIETVDVKTIYEAPISFFKEKLDKQVLKHFKINSKRTANLKPWKKITDIILKTNTQINIAIIGKYVNLKDAYKSLDEALTHGGIDNKVKVNLIRIESDNLKSNK

SEQ ID NO: 196232 - protein, 537 aa, Unknown
  Bacterial polypetide isolated from the Sargasso Sea
MNKPKYIFVTGGVTSSLGKGIISASLARLLQAQGLNVAIQKLDPYINVDPGTLNPYEHGECYVTDDGAETDLDLGHYERFLSTNTSQRNNVTTGKIYQDVIEKERKGEFLGKTVQVIPHITNEIKENIRNLDHKNNLEIIITEIGGTVGDIESLPFIEAVRQVIYEEGPDNSMVIHLTLIPFLSATGELKTKPTQHSVKTLMELGLKADVLVCRSERDLSDEVKKKLALFCNVKLDCVIQSIDVETIYDVPMKMRDEGLDKVTLEKLKIDESEPNLDKWKNFLHRLKNPTHQINIGLVGKYVELNDSYKSILESLIHGGTENEVKVNVKSIHSEYLNKENINKELVDLDGIIVAPGFGQRGLDGKILAVEYSRINKIPFLGICLGMQMAVIEYARNVKKIRYANSTEISEKCKDPVIDLMTSQKEIINKGGTMRLGAWDCEILKDTVSRKIYSKKMISERHRHRYEFNNEYSKEIFDENFIVAGRNPDTNLVEIVENKDHPWFVGVQFHPEYKSSVYNPHPIFVNFVKASLKNYLKK

SEQ ID NO: 196233 - protein, 407 aa, Unknown
  Bacterial polypetide isolated from the Sargasso Sea
RFVICEIGGTVGDIESLPFLEAIRQFSNEIGKKNTLFIHLTLVPYMRASDEIKTKPTQHSVKELRSIGIQPDIIICRSERSIPLDQRKKISLFCNVSIEDVIETVDVKTIYEAPISFNKEKLDERVLNYFKIKSKKKVNLTPWKKITKKVLNTKNKVNIAIIGKYVELKDAYKSLDEALTHGGIANDLKVNLIRVESDYLQPKQIKKRLNKASGILIPGGFGKRGTEGKIAAVNFARKNKIPFLGICFGMQMAVIEFARNKLNIKKATSSEFGPSKVSVVGLMSEWSKDGKLMKGTDKDLGGTMRLGSYEARLKKDTKISKIYNSLRIEERHRHRYEVNINFKKNFENKGMIFSGMSPDNKLPEIIELKDHPWFIGVQFHPEFKSRPLSPHPLFSSFIKAAKNNSKK

SEQ ID NO: 196234 - protein, 426 aa, Unknown
  Bacterial polypetide isolated from the Sargasso Sea
MSDYIFVTGGVVSALGKGVTSASLGAILEARGLKIGMMKLDPYLNVDPGTMSPYQHGEVFVTEDGTETDLDLGHYERYVSTITGKHSNYTAGKIYETVIAKERRGDYLGATVQVIPHVTDEIRKSIVKGSQGYDVTIVEIGGTVGDIESLPFIEAIRQMGIYKDDYEVAYVHLTLVPYIKASSEIKTKPTQHSVRELRAIGIQPDALVCRSELPLPKEHFDKIALFTNVEKKAVISAHDAEDIYQIPLILREQCLDDIIVQKLKLDVPKADLSPWENVFTESRNSDSKVKIAMVGKYVDFKDSYISLSEALRHAGFKNSKGVEIVYVESEDIQENGTDCLSEMDAILIPGGFGDRGIEGMIQSIEYARKNDIPFLGICLGMQAAVIEYARNVLDHKDANSTEFYSRTSAPVIAMITEWMNDDGSKE

SEQ ID NO: 196235 - protein, 215 aa, Unknown
  Bacterial polypetide isolated from the Sargasso Sea
MQNNFEVENLQDMNGVIVPGGFGYRGIEGKISAIEYIRKNNIPFLGICLGLQCAVIEFARNVCGIDDANSSEFSKNTKNYVIDLLPNQDLEKDDVGASMRLGTYPCKLNDDSLAAQIYSDEVIYERHRHRYEVNNKYRDILVEKGLKIGGVSPDNNLVEMIEIPDHPFFIASQFHPEFKSRPWDPAPLFKEFVLASIKNISIKSENIVSETIKEK

SEQ ID NO: 196236 - protein, 541 aa, Unknown
  Bacterial polypetide isolated from the Sargasso Sea
MAQTKYIFITGGVVSSLGKGIAAASIGALLESRGLSVSLIKVDPYINVDPGTMSPFQHGEVFVTNDGTETDLDLGHYERFVRFQASKKNNFTAGKVYETVIRNERKGLYLGGTVQVIPHITNEIKKRIKEGGQNKDIAIVEVGGTVGDIESQPFVEALRQMALELPSASWAFVHLTLVPYINASGELKTKPTQHSVKELRSLGISPDVLICRSDQELPSDEKNKIALFCSVPNDSVISMHDVETVYSVPLLLHSQKVDKSILKKLKINTKQAQLNDWKRVVKAKLLPEKEVTVSFVGKYTELKDSYKSINEALEHAGIKNKTRVNINFVEAESLTSKNIHKTLKNSDAILVPGGFGERGIEGMILACKYAREKNIPYLGICLGMQVAIIEYARNVLKLKGANSTEFDQNTKYPVIGLITEWNDISGKKEKRDKHSDLGGTMRLGGQVCKLKKKSNSYRMYKNLEIVERHRHRYEVNPKFKDKMISAGLDVVGTSIDGKLVEMIEIPNHKWFLACQFHPEFTSNPRDGHPIFNSYIKSTLKR

SEQ ID NO: 196237 - protein, 509 aa, Unknown
  Bacterial polypetide isolated from the Sargasso Sea
SRGFKVRIRKLDPYLNVDPGTMSPFQHGEVYVTDDGAETDLDLGHYERFSGVSAKKSDNITTGKIYNDVLKKERKGEYLGKTVQVIPHITDRIKQFIKHDSSKEDFVICEIGGIVGDIESLPFVEAIRQFANDIGKKNALFIHLTLVPYLKASDEIKTKPTQHSVKELRSIGIQPDIIICRSERPIPLDHRKKISLFCNVDIKNVIETVDVKTIYEAPISFFREKLDVQVLNYFKLKTKKPANLNPWKKITKIILQNKRQVNIAIIGKYVELQDAYKSLDEALTHGGIDNKIKVNLVRIDSEKLKISEIKKKLKNISGILIPGGFGKRGTDGKIEAIKHARMNKIPFLGICYGMQMAIIEFARNQLNLKNATSSEFDKKGLPIIGLLNEWSKDGKTIKGTDKDLGGTMRLGSYDAKLQNNTKIRKIYNSKLIKERHRHRYEVNIAYREKFEKKGMIFSGLSPDNQLPEIIELKNHPWFIGVQFHPEFKSRPLSPHPLFSSFIKAAKNHK

SEQ ID NO: 196238 - protein, 317 aa, Unknown
  Bacterial polypetide isolated from the Sargasso Sea
MAQTKYIFITGGVVSSLGKGIAAASIGALFEARGLKVSLNKLDPYINVDPGTMSPFQHGEVFVTDDGTETDLDLGHYERFVRFQASKKNNFTAGKVYEEVIQNERRGDYLGGTVQVIPHITDEIKRRIKEGAKGADIAIIEIGGTVGDIESQPFIEAIRQMMLELPSPNTALAHLTLVPYIQVSEELKTKPTQHSVKELRSLGLQPDCLICRLEKELPNDEKKKIALFCSVDLNSVISMHDAETVYSIPLLLYSQGVDKILLKKLNLLKVKSPRLNDWKRVVDAKLNPKKKVTIAVVGKYVDLKDSYKSLNEALDHA

SEQ ID NO: 196239 - protein, 165 aa, Unknown
  Bacterial polypetide isolated from the Sargasso Sea
MQVALIEFARNVAGMTDAHSTEFNKATPFPVVGLITEWVDEEGNVEQRHEASDLGGTMRLGAQLCHLLEGSKAAQAYKGNTCVERHRHRYEVNNKYRERLEQAGLVFSGLSSDRKLVEMIELKDHPWFVAGQFHPEFTSTPRDGHPLFEGFVAAASAHQKRDLKK

SEQ ID NO: 196240 - protein, 189 aa, Unknown
  Bacterial polypetide isolated from the Sargasso Sea
RGIEGMIIACEYARLNAKPYFGICLGMQIALIEFARNVLNLSDANSTEFDPKTNHPVVALITEWQDASGKKEIRNEKSDLGGTMRLGGQLCILDKKSKSYKMYKKTSIVERHRHRYEVNPTYRDSFDQKGMSIVGTSEDGKLIEMIEVKKHPWFLGCQFHPEFTSNPRDGHPIFNSFISSTIKQKNETN

SEQ ID NO: 196241 - protein, 408 aa, Unknown
  Bacterial polypetide isolated from the Sargasso Sea
MQYVFITGGVASSLGKGIASAAVASLLQQRNFKVRIRKLDPYLNVDPGTMSPYQHGEVFVTDDGAETDLDLGHYERFTNRSAKKTDSTSSGKIYSNVLKKERKGDYLGATIQVIPHVTDEIKLFINSNFEDEEIIIYEIGGTVGDIESLPFLDAIRQIRNDKKISSALIHMTYVPYLSSAGELKTKPTQHSVKELLNSGIQPDIIMCRCEKEINEESLEKISQFCNVKKDSVIPALNANSIYEVPSIYSKAGLDKVLLEHLGYDVSKHPLNLEDWENLTNKINNLKKEVTIGVVGKYTNLKDSYKSLIEALNHGGIENNVKVKINWINAEKIKTSELVQELKSVDGILIPGGFGYRGVEGKILAIKYARENNIPFFGICLGMQLSVIEIARNVFDLSDSNSTEFQSTK

SEQ ID NO: 196242 - protein, 187 aa, Unknown
  Bacterial polypetide isolated from the Sargasso Sea
MSNSTKYVFVTGGVTSSLGKGIISASLAKLLQARGYTATIQKLDPYINVDPGTLNPYEHGECFVTDDGAETDLDLGHYERFLDVPTSQANNVTTGKIYQSVIEKERKGEFLGKTVQVIPHITDEIKHCIQLLGKNGDFDIVITEIGGTIGDIESLPYVEAVRQMMWEFENDCIVVHLTLVPYLSAAG

SEQ ID NO: 196243 - protein, 546 aa, Unknown
  Bacterial polypetide isolated from the Sargasso Sea
MTTRYIFVTGGVVSSLGKGIAAASLAAILEARGLNVTIMKLDPYINVDPGTMSPTQHGEVFVTEDGAETDLDLGHYERFIRTKMNRRNNFTTGRIYEEILRKERRGDYLGATIQVIPHITNAIKEKVLAGGEGHDVAIVEIGGTVGDIESLPFLESIRQLGVELGRDRTLFMHLTLVPFLGAAGEVKTKPTQHSVKELRSIGIAPDVLICRGDRAIPANERAKISLFCNVEERAVISLKDVDSIYKIPALLRSQGLDDLVVKRFGLECREADLSEWENVIYQEANPNGEVVIGMVGKYIELPDAYKSVNEALKHAGLKNRVSVTIKYIDSQTVEAKGDEVLQGLDGILVPGGFGERGVEGKIQAAKFARENNLPYFGICLGMQVALIEFARNVAGMADAHSTEFNKATPFPVVGLITEWVDEEGNVEQRHEASDLGGTMRLGAQLCHLLEGSKAAQAYKGNTCVERHRHRYEVNNKYRERLEQAGLVFSGLSSDRKLVEMIELKDHPWFVAGQFHPEFTSTPRDGHPLFEGFVAAASAHQKRDLKK

SEQ ID NO: 196244 - protein, 507 aa, Unknown
  Bacterial polypetide isolated from the Sargasso Sea
LSVSLIKVDPYINVDPGTMSPFQHGEVFVTNDGTETDLDLGHYERFVRFEASKKNNFTAGKVYETVIKNERKGKYLGGTVQVIPHITNEIKKRIKEGGQNKDIAIVEVGGTVGDIESQPFVEALRQMALEMPNSSSAFVHLTLVPYINASGELKTKPTQHSVKELRSLGISPDVLICRSEQELPKDEKNKIALFCSVPNNSVISMHDVETVYSIPILLNKQKVDKTILDKLNIKSKDPKLNDWKRVVKAKLLPEREVNISFVGKYTELKDAYKSINEALEHAGIVNKTKVNINFVQAADLTAKNISKKLRKADAILVPGGFGHRGVEGMILACKFARENNIPYLGICLGMQVAIIEYARNVLKLKNAHSTEFDQHTEFPVIGLITEWNDISGKKEIRNKNSDLGGTMRLGGQICKLKKSSNSYKMYKNTEIVERHRHRYEVNPKYKEVMIEEGLDVVGTSIDGKLVEMIEIPKHKWFLACQFHPEFTSNPRDGHPIFNSYIKSTIKR

SEQ ID NO: 196245 - protein, 386 aa, Unknown
  Bacterial polypetide isolated from the Sargasso Sea
MARYIFVTGGVVSSLGKGLSSASLAYLLQSRGYKVRLRKLDPYLNVDPGTMSPFQHGEVFVTDDGAETDLDLGHYERFSGVTAKKTDNITTGKIYSDVLRKERKGEYLGKTVQVIPHITDRIKEFIKHDTSKEDFVICEIGGIVGDIESLPFIEAIRQFSNDIGKNNALFIHLTLVPYLKASDEIKTKPTQHSVKELRSIGVQPDIIICRSERPIPLEHRKKISLFCNVDIKNVIETVDVKTIYEAPISFAKEKLDVQVLNYFKLKSKKSNNLKPWKKITKIILNTKKQVNIAIIGKYVELKDAYKSLDEALTHGGLANNLNVNLIRIDSEKLKPSEIKSKLKNVSGILIPGGFGKRGTEGKIEAIKYARVNNVPFLGICYGMQMA

SEQ ID NO: 196246 - protein, 67 aa, Unknown
  Bacterial polypetide isolated from the Sargasso Sea
MSKFIFITGGVVSSLGKGLASAALGTLLQSRGYKVRLRKLDPYLNVDPGTMSPYQHGEVYVTDDGAE

SEQ ID NO: 196247 - protein, 265 aa, Unknown
  Bacterial polypetide isolated from the Sargasso Sea
WKRVVKAKLMPEKEVNVSFVGKYTELKDSYKSINEALEHAGIKNKAKVNINFVEAENISSKNIKKTLKNADAVLVPGGFGERGIEGMILACKYARENNIPYLGICLGMQVAIIEYARNVLNLKGANSTEFDQNTKHPVIGLITEWNDISGKKEKRDKNSDLGGTMRLGGQLCKLKKGSNSLRMYKNPEIIERHRHRYEVNPKYKDDMIKKGLDVVGTSIDGKLVEMIEIPKHKWFLACQFHPEFTSNPRDGHPIFNSYIKSTLRK

SEQ ID NO: 196248 - protein, 542 aa, Unknown
  Bacterial polypetide isolated from the Sargasso Sea
MPNFIFITGGVVSSLGKGLASAALGAILQSRGFKVRLRKLDPYLNVDPGTMSPTQHGEVFVTDDGAETDLDLGHYERFTGVSAKKSDNVTTGQIYSQVIAKERKGEYLGATIQVIPHVTNAIKDFIISDLKNEDFILCEIGGTVGDIESLPFLEAIRQLGNELGRDKTCFIHLTLVPFIAAAGELKTKPTQHSVKELQSVGIRPDVVLCRTEEHIPDDQKDKIALFCNIPKKSVIEAIDADSIYDVPLVYHKNGLDAVICDHFGIKPKEPNLKIWLDIKSAIKNPEGEINIAVVGKYTSLIDSYKSLDEALTHGGIANKTKVKVHWIDSSELEDENKFNTIFENIHGILVPGGFGERGSEGKILSIKYARENNIPFLGICFGMQMAVIEAARNLTSIPDPGSSEFGSFKSSIVGLLLEWTKGNTVEIRSSEDDLGGSMRLGAYECHISDGSLAKDVYQKDIIFERHRHRYEVNIKFKPELERAGLKFSGMSPDGLLPEIVEHENHPWFLGVQFHPELKSKPFEPHPLFKDFVSAASKFSRLV

SEQ ID NO: 196249 - protein, 192 aa, Unknown
  Bacterial polypetide isolated from the Sargasso Sea
WILIPGGFGKRGTDGKIMSIRFARQMKIPFLGICFGMQLAVIEFARNVLKIKNAGSSELDTKCEPVVGLMEEWDKNGSIIKGSNMDLGGTMRLGSYNAKLRHNSLIKKIYKKSYISERHRHRYEVNFNIKEKFEKKGMIFSGSSPDNKLTEIVELISHPWFIGVQFHPEFKSRPLYPHPLFSSFIKAAKKNK

SEQ ID NO: 196250 - protein, 449 aa, Unknown
  Bacterial polypetide isolated from the Sargasso Sea
MGQIYSDVLKKERKGKYLGKTVQVIPHITDRIKQFIKSDIKNEDFVICEIGGTVGDIESLPFVEAIRQFSNDVGKKNTLFIHLTLVPFMKASDEIKTKPTQHSVKELRSIGVQPDIIICRCEKNISLDQKKKISLFCNVDIKNVIQTIDVKTIYEAPISFNKENLDKQVLSYFKIKSKKNVNLNPWKKITKIVLSTKKNVNIAIIGKYVNLKDAYKSLDEALVHGGIYNNLKVNLVRIESDNLKSSEVKNKLKDVSGVLIPGGFGKRGTEGKIEAIKYARKNKIPFLGICFGMQMAIIEFARNVLKIKKASSSELNSKCVPVVGLINEWKKDGKTIKGTDRELGGTMRLGSYPAELLNNSLIKNIYKSKIITERHRHRYEVNMNYKGQFEKKGLLFSGNSPDKSLPEIIELKNHPWFIGVQFHPEFKSRPLAPHPLFSSFIKAAKNHKK

SEQ ID NO: 196251 - protein, 115 aa, Unknown
  Bacterial polypetide isolated from the Sargasso Sea
VIIKGTKKELGGTMRLGLYEARLKENSLIKKIYSSNFIKERHRHRYEVNINYKDKFEKKGMIFSALSPDKKLPEIIELKNHPWFIGVQFHPEFKSRPLAPHPLFSSFIKAAKNHR

SEQ ID NO: 196252 - protein, 102 aa, Unknown
  Bacterial polypetide isolated from the Sargasso Sea
MARYIFVTGGVVSSLGKGLSSASLAYLLKSQGYKVRIRKMDPYLNVDPGTMSPFQHGEVFVTNDGAETDLDLGHYERFTNISAKKSDNITTGKIYSDIIKKE

SEQ ID NO: 196253 - protein, 267 aa, Unknown
  Bacterial polypetide isolated from the Sargasso Sea
NLKPWIDLKKKIKKKKHKIKIAVVGKYTNLKDSYKSLNEALVHGGIENSAEVIIQWINSEKENNISLMKKLKGCDGILIPGGFGIRGINGKINAIKYARENNIPFFGICLGMQLAVIEIAQNVLKIKNAHSSEFKKTTKSVVGLMTEWVNKNKIEKRDKNSDKGGTMRLGAYKAILKKNSKIFSIYKNKVISERHRHRYEVNQKFLSKFENKGYYFSGMSPDGLLPEVLESKKHKWFIGVQFHPELKSRPLDPHPLFVSFIKATIND

SEQ ID NO: 196254 - protein, 139 aa, Unknown
  Bacterial polypetide isolated from the Sargasso Sea
MLKDTRFIFVTGGVVSSLGKGIASASIGAILESKGYKVGVIKLDPYFNVDPGTMSPFQHGEVFVLEDGTETDLDLGHYERFINSTCTKKNNFTAGKIYYSVLRKERKGEYLGKTVQIIPHITDEIKRRIIEASKDCDIA

SEQ ID NO: 196255 - protein, 539 aa, Unknown
  Bacterial polypetide isolated from the Sargasso Sea
QTKYIFITGGVVSSLGKGIAAASIGALLESRGLSVSLIKVDPYINVDPGTMSPFQHGEVFVTNDGTETDLDLGHYERFVRFQASKKNNFTAGKVYETVIRNERKGDYLGGTVQVIPHITNEIKKRIKEGGQNKDIAIVEVGGTVGDIESQPFVEALRQMALELPNSSWAFVHLTLVPYINASGELKTKPTQHSVKELRSLGISPDVLICRSDQELPKDEKNKIALFCSVPNDSVISMHDVETVYSVPLLLHSQKVDKTILKKLKISTKKAQLNDWRRVVKAKLLPEKEITVSFVGKYTELKDSYKSINEALEHAGIKNKARVNIDFVEAENLTPKNISKTLKNSDAILVPGGFGERGIEGMILACKYARINNIPYLGICLGMQVAIIEYARNVLKLKGANSTEFDLNTKYPVIGLITEWNDISGKKEKRDMDSDLGGTMRLGGQVCKLKKKSNSYKMYKKLEIVERHRHRYEVNPKYKNRMIEAGLDVVGTSVDGRLVEMIEIPNHKWFLACQFHPEFTSNPRDGHPIFNSYIKSTLSK

SEQ ID NO: 196256 - protein, 473 aa, Unknown
  Bacterial polypetide isolated from the Sargasso Sea
MARYIFVTGGVVSSLGKGLSSASLAYLLKSQGYKVRIRKMDPYLNVDPGTMSPFQHGEVFVTNDGAETDLDLGHYERFTNISAKKSDNITTGKIYSDIIKKERQGKYLGKTVQVIPHVTDRIRDFIKDDITNEDFVICEIGGTVGDIESLPFVEAIRQFSNEVGRSKSLFIHLTFVPFLKYSDEIKTKPTQHSVKELRSIGIQPDILVCRSEKIISNQDKKKIALFTNVEAKAVINSVDVDDIYEVPLLLHSQGLDNIIVEKLNLSCKKTSLEAWKKYKDKRNNLKKKISIKIIAKYGNYSESYKSLNEAVRHAGVNLGVNVEIDYVDAEKLEEKDNSLLQNASGVIVPGGFGGRGIEGKINAIKYAREKKIPFLGICLGMQAAVIEFARNVCNLDNANSTEFDKNTEYPVIGLIEEWLDNTGSVEYRDINSNIGGTMRLGEQVCMLEKDSNIFNAYKTKSVLERHRHRYEFN

SEQ ID NO: 196257 - protein, 233 aa, Unknown
  Bacterial polypetide isolated from the Sargasso Sea
SLNESLLHASVYNNNSLEIDFIDSEDITKKNIKRLKNLQGIVVPGGFGNRGVEGKILAANFARVNHIPYFGICLGMQISVIEFARNILGFKNANSTEFDLKTPFPVISLVTEWDDYKKGRLKGSIHQLGGTMRLGAQSCTLVKKSLAHSLYKKNIISERHRHRYEVNNKFVDEFNDTDLLFSGYSGDKVLMEMLEIKHHPWYLASQFHPEFTSSPLKGHPLFNSFIKTAYETK

SEQ ID NO: 196258 - protein, 355 aa, Unknown
  Bacterial polypetide isolated from the Sargasso Sea
MARYIFVTGGVVSSLGKGLSSASLAYLLKSQGYKVRIRKMDPYLNVDPGTMSPFQHGEVFVTDDGAETDLDLGHYERFTNISAKKSDNITTGKIYSDIIKKERKGNYLGKTVQVIPHVTDRIREFIKGDITNEDFVICEIGGTVGDIESLPFVEAIRQFSNEVGSNKSLFIHLTFVPFLKSSDEIKTKPTQHSVKELRSLGIQPDIIICRSQKSIPLDQRKKISLFCNVSIENVIETVDVRTIYEAPISFYNEKLDKQVLKYFKLKPKKKVNLLPWKKITKTVLKTKKIVNIAIIGKYVNLKDAYKSLDEALIHGGINNNVKVNLVRIESDKLKPSEISKVLKNVSGILIPGGFG

SEQ ID NO: 196259 - protein, 165 aa, Unknown
  Bacterial polypetide isolated from the Sargasso Sea
NPFLGDMLWNANGNYRICEKSIKLKKATSSEFDRNGIPVIGLINEWIKDGKTIKGTDKNLGGTMRLGSYDAKLQNNSKIKKIYGKKIIKERHRHRYEVNINLKDKFEKKGMSFSGLSPDGFLPEIIELKNHPWFIGVQFHPEFKSRPFAPHPLFSSFIKASKNHK

SEQ ID NO: 196260 - protein, 249 aa, Unknown
  Bacterial polypetide isolated from the Sargasso Sea
MARYIFVTGGVVSSLGKGLSSASLAYLLKSQGYKVRLRKMDPYLNVDPGTMSPFQHGEVFVTDDGAETDLDLGHYERFTNISSKQSDNITTGRIYSDVIKRERRGGYLGKTVQVIPHITNRIKEFIKKDITNEDFVICEIGGTVGDIESLPFVEAIRQFSNEHGKSKTLFIHLTFVPFLKSSDEIKTKPTQHSVKELRSIGIQPDIIICRSQQSIPLDQRKKISLFCNVPIENVIETVDVRTIYEAPIS

SEQ ID NO: 196261 - protein, 152 aa, Unknown
  Bacterial polypetide isolated from the Sargasso Sea
MARYIFVTGGVVSSLGKGLSSASLAYLLKSQGYKVRIRKMDPYLNVDPGTMSPFQHGEVFVTNDGAETDLDLGHYERFTNISAKKSDNITTGKIYSDIIKKERKGNYLGKTVQVIPHVTDRIREFIRGDITKEDFVICEIGGTVGDIESLPF

SEQ ID NO: 196262 - protein, 185 aa, Unknown
  Bacterial polypetide isolated from the Sargasso Sea
MARYIFVTGGVVSSLGKGLSSASLAYLLQSRGYKVRLRKLDPYLNVDPGTMSPFQHGEVYVTDDGAETDLDLGHYERFSGVSAKKSDNITTGKIYNDVLKKERKGEYLGKTVQVIPHVTDRIKQFIKNESSKEDFVICEIGGIVGDIESLPFVEAIRQFANDVGKKNALFIHLTLVPYLKASDEI

SEQ ID NO: 196263 - protein, 104 aa, Unknown
  Bacterial polypetide isolated from the Sargasso Sea
MRLGLYTAKLKNNSAIKKIYKSNEIKERHRHRYEVNNNQKSKFEKKGLIFSGMSPDNKLPEIIELKNHPWFIGVQFHPEFKSRPLSPHPLFKSFIKASKNYHGK

SEQ ID NO: 196264 - protein, 65 aa, Unknown
  Bacterial polypetide isolated from the Sargasso Sea
MARYIFVTGGVVSSLGKGLSSASLAYLLKSQGYKVRLRKMDPYLNVDPGTMSPFQHGEVFVTDDG

SEQ ID NO: 196265 - protein, 581 aa, Unknown
  Bacterial polypetide isolated from the Sargasso Sea
MSPGIHWVETLLYGIIRFSREHPAMTKYVFVTGGVVSSLGKGIAAASLAAILESRGLKVTLLKLDPYINVDPGTMSPFQHGEVFVTEDGAETDLDLGHYERFISTKMRKANNFTTGQIYESVIRKERRGDYLGKTVQVIPHITNEIQAFIERGAASATCGEPDVAIVEVGGTVGDIESLPFLEAARQMSLRMGRNSACFVHLTLVPWVATAGELKTKPTQHSVQKLREIGISPHVLLCRADRRIPDDERAKISMFSNVPEDAVISVWDADSIYKIPQMLHDQGLDAIICEELKLTPKPADLSMWANLVEKLEHPKHEVTIGMVGKYVDLTESYKSLIEALRHASMHTSTKVNIEYIDSEEIETQGVESLKHLDAVLVPGGFGRRGTEGKIAAIRYAREAKVPYLGICLGMQLAVIEFARDVVGLKDANSTEFDPETENRVVALITEWYDREGRVEKRTEESDLGGTMRLGSQRCPIKPGTMAEEIYGKDVNERHRHRYEVNNRFVPQLEAGGLIISARTPSEDLPEMMELPRSMHPWFVGVQFHPEFTSTPRDGHPLFKSFVEAALAHQQPRTTAEVGEKA

SEQ ID NO: 196266 - protein, 437 aa, Unknown
  Bacterial polypetide isolated from the Sargasso Sea
MGGTVQVIPHITDEIKNRIVKGAGDSEVAIVEIGGTVGDIESQPFLEAIRQMKLELGSSKTLFIHLTLVPFLQSAGETKTKPTQRSVKEMLSHGLQPDILICRSNGVLANEERKKIALFTNVEESSVISMPDVNSIYKIPVELNNQKVDEIVVKKLNLICRKASLVDWKRVIDEDLNPKDSVTVSMVGKYTELADAYKSLNEALRHGGLKNNLKVDIRYIDSELINTRNAKSLLKGSDAILVPGGFGERGIEGMIAAVKFARISKIPYLGICLGLQIAVIEFARNVVGLRGANSTEFDKETKHPVIGLISEWMDLEGIIEKRDENSDLGGTMRLGAQECMLDKDSLSRSLYKKAKVLERHRHRYEVNNNYLDMLISSGMKVAGRSKDRSLVEVIELNSHPWFVGCQFHPEFTSNPRAGHPLFSGFIKAAKKYKRLKK

SEQ ID NO: 196267 - protein, 399 aa, Unknown
  Bacterial polypetide isolated from the Sargasso Sea
MHFVFITGGVASSLGKGIASASLATLLKSRKFKVRIRKLDPYLNVDPGTMSPYQHGEVYVTDDGAETDLDLGHYERFTNQSAKQSDSVSSGKIYSNVLLKERKGDYLGSTIQVIPHVTNEIKSFINSDLKNEDIAIYEIGGTVGDIESLPFLEAIRQIRNDKNISSALIHMTYIPYLSSAGELKTKPTQHSVKELLNAGIQPDIIMCRSEQPIDKDSISKISLFCNVKKESVIPALNAKSIYEVPSLYSKYGLDEALLKQLGYKPKNHKLNLKPWNDLQKKIKKRKHKVKIAVVGKYTNLKDSYKSLNEALVHGGIENYADVDIKWINSEKENNISLIKKLKGNDGILIPGGFGIRGINGKINAIKYARENNIPFFGICLGMQLAVIEIAQNVLKIKNA

SEQ ID NO: 196268 - protein, 302 aa, Unknown
  Bacterial polypetide isolated from the Sargasso Sea
MARYIFVTGGVVSSLGKGLSSASLAFLLKSQGFNVRLRKMDPYLNIDPGTMSPFQHGEVFVTDDGAETDLDLGHYERFTNISARKSDNVTTGKIYSDILKKERKGEYLGKTVQVIPHVTNQIKEFIKKDITKEDFVICEIGGTVGDIESLPFLEAIRQFSNEDGYKKSLFIHLTLVPFLKSSDEIKTKPTQHSVKELRSLGIQPDIIICRSEKPIPLDQRKKISLFCNVRYKNVIETVDVKTIYEAPKSFYDEKLDKQVLSFFKIKPKRKVNLRPWNKITKTILKSKNEVNIALIGKYVNLK

SEQ ID NO: 196269 - protein, 228 aa, Unknown
  Bacterial polypetide isolated from the Sargasso Sea
MSDYIFVTGGVVSALGKGVTSASLGAILEARGLKVGMMKLDPYLNVDPGTMSPYQHGEVFVTEDGTETDLDLGHYERYVSTVTSKHSNYTAGKIYETVIAKERRGDYLGATVQVIPHVTDEIRKSIVKGSQGHDVTIVEIGGTVGDIESLPFVEAIRQMGIYKDDYEVAYVHLTLVPYIKASSEIKTKPTQHSVRELRAIGIQPDALVCRSELPLPKEHLTRLLFLQM

SEQ ID NO: 196270 - protein, 538 aa, Unknown
  Bacterial polypetide isolated from the Sargasso Sea
MARYIFVTGGVVSSLGKGLSSASLAYLLKSRGFKVRVRKMDPYLNVDPGTMSPFQHGEVFVTDDGAETDLDLGHYERFTEISSKQSDNITTGKIYSDIIKKERKGKYLGKTVQVIPHVTDKIKDFIKGDIKDEDFVICEIGGTVGDIESLPFLEAIRQFSNDIGKNKTLFIHLTLVPFLKSSDEIKTKPTQHSVKELRSIGIQPDIVICRSQQSIPFDQRKKISLFCNVSIENVIETVDVRTIYEAPISFYNEKLDKQVLKYFKLKPKKKVNLSPWKKITKTVLNTKKIVNIAIIGKYVNLKDAYKSLDEALIHGGISNNIKVNLVRIESDKLKSNQIKQVLKNVSGILIPGGFGKRGTEGKISAITYARKYKIPFLGICFGMQMAVIEFARNTLKIKNAGSSELDKKCYPVIGLLNEWNKNGRLIKGTSIDLGGTMRLGLYEAKLRHNSLIQKIYKSKSIFERHRHRYEVNSNLKEKFESKGMLFSGMSPDNKLPEIVELKNHPWFIGVQFHPEFRSRPLTPHPLFSSFIKAAKFYK

SEQ ID NO: 196271 - protein, 358 aa, Unknown
  Bacterial polypetide isolated from the Sargasso Sea
GHYERFTDTAMTRLNSVTTGSIYQAVINKERRGSYNGGTVQVIPHITREIRERIHRVAANSNADIVITEIGGTVGDIESLPFLEAIREFKNDVNKNDVAYIHVTLLPYIKTSGEIKTKPTQHSVKELRSIGIQPDLLVCRSDKEINEGLKRKLSGFCGVNLNCVIEALDADSIYSVPLSLKNEGLCKQTLTCLELEDKECDLENWEKIIHNLRNPGNPIKVALVGKYIELGDAYLSVVEALRHACIEQKALLDLYWVSAEMIEEKSAEEYLNDVDAIVVPGGFGNRGVNGKIEAIKFAREKKIPFLGLCLGMQCAVIEWARNLAQLPDASSSELNPDSQNPVTHLLPEQEDIVDLEGL

SEQ ID NO: 196272 - protein, 137 aa, Unknown
  Bacterial polypetide isolated from the Sargasso Sea
MKTKFIFVLGGVMSGLGKGISASSIGYLLKSAGLKVNILKLDPYLNVDPGTMNPYQHGEVFVLDDGSETDLDLGHYERFIDENMSSKNNATAGQIYSTVLDKERSGSYLGETVQVIPHITDEIKNRMNALSDSKKYD

SEQ ID NO: 196273 - protein, 538 aa, Unknown
  Bacterial polypetide isolated from the Sargasso Sea
MARYIFVTGGVVSSLGKGLSSASLAYLLQSRGYKVRLRKLDPYLNVDPGTMSPFQHGEVFVTDDGAETDLDLGHYERFSGVTAKKTDNITTGKIYSDVLRKERKGQYLGKTVQVIPHITDRIKEFIKHDTSKEDFVICEIGGIVGDIESLPFVEAIRQFSNDIGKKNALFIHLTLVPYLKASDEIKTKPTQHSVKELRSIGIQPDIIICRSERPIPLDHRKKISLFCNVDIKNVIETVDVKTIYEAPISFFNQKLDIQVLNYFKLKSKKPANLNPWKKITKITLNTKRHVNIAIIGKYVELKDAYKSLDEALTHGGISNNLKVNLVRIDSEKLKVSEIKNKLKNVSGILIPGGFGKRGTEGKIEAIRYARINKIPFLGICYGMQMAIIEFARNQLKIKKATSSEFDKGGVHIIGLMHEWEKSGRKVKGTDKDLGGTMRLGSYDAILKDKSKIRDIYKSRLIKERHRHRYEVDISYKEKFEKKGLIFSGLSPDHKLPEIIELKNHPWFIGVQFHPEFKSRPLNPHPLFSSFIKAAKNHR

SEQ ID NO: 196274 - protein, 342 aa, Unknown
  Bacterial polypetide isolated from the Sargasso Sea
ILVCRCDRKISKSDIRKISVFCNVDEDSVIQAIDVDTIYAVPKDLKTNGLDVAVLNALGKNTFPKSNLRKWNKVVERIRKPIGEVTIGVVGKYLDLNDAYKSLFEALTHGGISNNVKVNIKNIDTDKLEKNKNKTVFNGLSGILVPGGFGKRGSEGKIFASKYARENKIPFFGICFGMQMAVVDVARNLLEYKSASSSEFGKTDTPVIGLLTEWIKDEEIQKRDLQSEYGGTMRLGSYPAILKKGSKVRNIYGSKKVNERHRHRYEVNMSFIDDLERVGLRFVGMSPDGLLPEIVELKNHPWFIGVQFHPELKSRPFNPHPLFSSFIKASVKKSKISGKVKK

SEQ ID NO: 196275 - protein, 199 aa, Unknown
  Bacterial polypetide isolated from the Sargasso Sea
MCDYGGRKIARFIFITGGVVSSLGKGLASAALGALLQSRGYSVRLRKLDPYLNVDPGTMSPFEHGEVFVTDDGAETDLDLGHYERFTGVAARHSDSVSSGRIYSNVLEKERRGDYLGKTIQVIPHVTNEIKDFISIGEDEVDFMLCEIGGTIGDIEGLPFFEAIRQFSQEKPRGECIFMHLTLLPFIKASGELKTKPTQ

SEQ ID NO: 196276 - protein, 108 aa, Unknown
  Bacterial polypetide isolated from the Sargasso Sea
MKTKFIFVLGGVMSGLGKGISASSIGYLLKSAGLKVNILKLDPYLNVDPGTMNPYQHGEVFVLDDGSETDLDLGHYERFIDENMSSKNNVTAGQIYSTVLDKERSGSI

SEQ ID NO: 196277 - protein, 189 aa, Unknown
  Bacterial polypetide isolated from the Sargasso Sea
MQTKFIFITGGVVSGLGKGIAASSIGALLESRGLTISLMKLDPYINVDAGTMNPFQHGEVFVTVDGAETDLDLGHYERYTNAVLTRRHNRTTGQIYDSVIRKERSGKFLGATVQVIPHVIDEIKQTISDAAKLLIKENDQKNADICIVEIGGTVGDIESLPFLEAIRQYRHDFGRENTLFIHLTLIVET

SEQ ID NO: 196278 - protein, 540 aa, Unknown
  Bacterial polypetide isolated from the Sargasso Sea
MARYIFVTGGVVSSLGKGLSSASLAYLLKSQGYKVRIRKMDPYLNVDPGTMSPFQHGEVFVTDDGAETDLDLGHYERFTNISSKQSDNITTGKIYSDVIKKERQGGYLGKTVQVIPHITDRIKKFISKDISIEDFVICEIGGTVGDIESLPFLEAIRQFSNDHGRSRTLFVHLTLVPFMKSSDEIKTKPTQHSVKELRSIGIQPDIVICRSEQHIPLEQRKKISLFCNVDIENVIETVDVRTIYEAPISFYNQKLDKQVLKYFKIKSKNKPNLNPWKNITSTVLKNNKLINIGIIGKYVNLKDAYKSLDEALTHGGIANNVKVNLVRIESDKLKKNEITKKLKSVSGILIPGGFGKRGTEGKIAAIKYAREKKIPFFGICFGMQMAIIEFARNKLNIKNAGSTELDKKCYPVIGLIHEWNRNGKVFKGTEINLGGTMRLGLYTAKLKNNSAIKKIYKLNEIKERHRHRYEVNNNQRSKFEKKGLIFSGMSPDNKLPEIIELKNHPWFIGVQFHPEFKSRPLSPHPLFKSFIRASKNYHGK

SEQ ID NO: 196279 - protein, 153 aa, Unknown; identical to SEQ ID NO: 195992
  Bacterial polypetide isolated from the Sargasso Sea

SEQ ID NO: 196280 - protein, 204 aa, Unknown
  Bacterial polypetide isolated from the Sargasso Sea
MIEKNSAETYLNEVDAIVVPGGFGNRGVNGKISAIKFARENKIPFLGLCLGMQCAVIEWARNVANLPDASSSELDPNTPNPVIHLLPEQEDVVDLGGTMRLGVYPCRLTKNTTGKNLYDEDVIYERHRHRYEFNNYYKQSFLDSGYKISGTSPDGRLVELIELENHPYFLACQYHPEFLSRPGKPHPLFKGLIKASQDKLTQSN

SEQ ID NO: 196281 - protein, 417 aa, Unknown
  Bacterial polypetide isolated from the Sargasso Sea
RIKEFIKGDITNEDFVICEIGGTVGDIESLPFLEAIRQFSNEVGKNKSLFIHLTLVPFLKSSDEIKTKPTQHSVKELRSLGIQPDIVICRSQKSIPLDQRKKISLFCNVSIENVIETVDVRTIYEAPISFYNEKLDKQVLKYFKLKARKKVNLLPWKKITKSVLSKKRTVNIAIIGKYVNLKDAYKSLDEALIHGGINNNVKVNLVRIESDKLKPFQVKKLLKNVSGILIPGGFGKRGTEGKISAINYARKQKIPFLGICFGMQMAVIEFARNVLKIKKAGSSELDKKCYPVVGLLNEWNKNGKLIKGTNIDLGGTMRLGLYEAKLRHNSLIQKIYKSKSIFERHRHRYEVNNQFLNSFEKKGMLFSGMSPDNKLPEIIELKNHPWFIGVQFHPEFKSRPLNPHPLFSSFIKAAKFY

SEQ ID NO: 196282 - protein, 221 aa, Unknown
  Bacterial polypetide isolated from the Sargasso Sea
MHYVFITGGVASSLGKGIASASIATLLKSRNFKVRIRKLDPYLNVDPGTMSPYQHGEVYVTDDGAETDLDLGHYERFTNQSAKKSDSISSGKIYSNVLNKERKGDYLGATIQVIPHVTNEIKNFINSDLNNEDIVIYEIGGTVGDIESLPFLEAIRQIRNDRSISSALIHMTYVPYLSSAGELKTKPTQHSVKELLNAGIQPDIIMCRSERSIDPDSFSKI

SEQ ID NO: 196283 - protein, 540 aa, Unknown
  Bacterial polypetide isolated from the Sargasso Sea
MARYIFVTGGVVSSLGKGLSSASLGYLLRSQGYKVRIRKMDPYLNVDPGTMSPFQHGEVFVTDDGAETDLDLGHYERFTNISAKQSDNITTGRIYSDIIKKERRGGYLGKTVQVIPHVTDRIKEFIKKDITNEDFVICEIGGTVGDIESLPFLEAIRQFSNDNGRLKSLFIHLTFVPFLKSSDEIKTKPTQHSVKELRSIGIQPDIVICRSQQSIPLDQRRKISLFCNVDIANVIETVDVKTIYEAPISFFNQKLDKQVLKFFKIKSRKRPNLLPWKKITNIVLKTKRTVNIAIIGKYVNLKDAYKSLDEALTHGGISNKVKVNLVRIESDKLKSKEIKSRLKNVSGILIPGGFGKRGTEGKIEAIKYAREKKIPFLGICFGMQMAMIEFARNILKIKKAGSSELDKKCFPVIGLIDEWNKDGKIIKGTDKNLGGTMRLGLYEAKLRNNSAIKNIYKSNMIKERHRHRYEVNINLMQKFEKKGLMFSGISPDNQLPEIIELKNHPWFIGVQFHPEFKSRPLNPHPLFSSFIKAAKSFNGK

SEQ ID NO: 196284 - protein, 198 aa, Unknown
  Bacterial polypetide isolated from the Sargasso Sea
MAKTKYIFITGGVVSSLGKGIAAASIGALLEARGLKVSLLKLDPYINVDPGTMSPFQHGEVFVTNDGTETDLDLGHYERFVRFEASKKNNFTAGIVYESVIKNERKGKYLGGTVQVIPHITDEIKRRIKAGAAGSDVAIVEIGGTIGDIESQPFVEAIRQMSLDLPSKSTSFVHLTLVPYINVSGELKTKPTQHSVKS

SEQ ID NO: 196285 - protein, 354 aa, Unknown
  Bacterial polypetide isolated from the Sargasso Sea
TKPTQHSVKELRSIGIQPDIIICRSERSIPLDQRKKISLFCNVSIDDVIETVDVKTIYEAPISFNKEKLDERVLKFFKIKSKRKVNLTPWKKITNSVLNNKKKVNIAIIGKYVELKDAYKSLDEALTHGGIANNLKVNLVRIESDYLKPKDVKNKLKEVSGILIPGGFGKRGTEGKIEAITYARKNNIPFLGICFGMQMAVIEFARNRLNIKNATSSEFGPSKGSVVGLMSEWIKDGKLMKGTDKELGGTMRLGSYEARLKKGSLINSIYKSAKIFERHRHRYEVNINFKDKFEDKGMIFSGLSPNMKLPEIIELKNHPWFIGVQFHPEFKSRPLAPHPLFSSFIKAAKIKSNK

SEQ ID NO: 196286 - protein, 265 aa, Unknown
  Bacterial polypetide isolated from the Sargasso Sea
MSKFVFVTGGVVSSIGKGIVAASLGRLLKSRGYSVSILKLDPYLNVDPGTMSPFQHGEVFVTEDGAETDLDLGHYERFTDTAMTRLNSVTTGSIYQSVINKERRGSYNGGTVQVIPHITGEIRERIHRVAANSNADIIITEIGGTVGDIESLPFLEAIREFKNDVNRNDVAYIHVTLLPYIKTSGEIKTKPTQHSVKELRSIGIQPDLLVCRSDKSINEALKKKLSGFCGVSINSVIEALDEDSIYSVPLSLKKEGLCKETLKYL

SEQ ID NO: 196287 - protein, 535 aa, Unknown
  Bacterial polypetide isolated from the Sargasso Sea
MKTKFIFVLGGVMSGLGKGISASSIGYLLKSAGLRVNILKLDPYLNVDPGTMNPYQHGEVFVLDDGSETDLDLGHYERFIDENMSKMNNATAGQIYSTVLDKERSGSYLGETVQVIPHITDEIKNRMNVLADTDKYDIVICEVGGTVGDIESLPFLEAIRQLSLELGYHNSLIIHLTLLPFIDASGELKTKPTQHSVMKLREIGLSPDFIFCRTDNEISQEIKDKLALFCNVKPEHVIENKDVSSIYEVPLLLENQNITKMICDRLNLKNKPSIKKLQNFIKTYKNPNSSIKIAMCGKYTELHDAYKSITESFIHAGVENSTKVQVIWVNTEKIKNDKDAFKAFEGIDGILLPGGFGSRGSEGKILTSKYARENNIPFLGICLGLQCAIIDYARNVCGINDANSSEFNSKSKNKVIDLMESQKAIKLKGGTMRLGSYDCEIDTGTKAFSIYRKKKISERHRHRFEVNNKYVSKMKKNGLIFSGINKKLGVVEIIELKNHPWFIGCQFHPELKSRVDKAHPLFREFVKASLKNSKI

SEQ ID NO: 196288 - protein, 290 aa, Unknown
  Bacterial polypetide isolated from the Sargasso Sea
YSKHGLDEALLKQLGYNPKNHKLNLKPWINLQKKIKNKKHEVKIAVVGKYTNLKDSYKSLNEALIHGGIENFSEVNIQWINSEKESKLSLIKKLKGCNGILVPGGFGFRGINGKINAIKFARENNIPFFGICLGMQLAVIEIAQNVLKIKNAHSSEFKKTNKSVVGLMTEWVNNNKIEKRDKNSNKGGTMRLGAYKAILKKNSKIFSIYKNKLISERHRHRYEVNQKFLSKFENKGYYFSGMSPDGLLPEVLESKNHKWFIGVQFHPELKSRPLDPHPLFVSFIKATIND

SEQ ID NO: 196289 - protein, 208 aa, Unknown
  Bacterial polypetide isolated from the Sargasso Sea
MHYVFITGGVASSLGKGIASASLAALLKSRNFRVRLRKLDPYLNVDPGTMSPYQHGEVYVTDDGAETDLDLGHYERFTNQSAKKSDSISSGKIYSNVLNKERKGDYLGATIQVIPHVTNEIKNFINSDLKKEDIVIYEIGGTVGDIESLPFLEAIRQIRNNRNISSALIHMTYIPYLTSAGELKTKPTQHSVKELLNAGIQPRYNYVP

SEQ ID NO: 196290 - protein, 544 aa, Unknown
  Bacterial polypetide isolated from the Sargasso Sea
MLKDTRFIFVTGGVVSSLGKGIASASIGSLLESKGYTVTVIKLDPYFNVDPGTMSPFQHGEVFVTEDGTETDLDLGHYERFINHKCTKENNFTAGKIYYSVLRKERKGEYLGKTVQVIPHITDEIKRKIIKGSKGYDIAIVEIGGTVGDIESQPFIEAIRQLGLELKNYQTSFIHLTLVPFLKNAGELKTKPTQHSVKEYRSLGVQPDILICRSDIKLPQESKEKIALFCSMPSNAVISLPDLETIYEVPLALDEEGIDKIITDKLQLEKNKPNLSAWKKVVKRKIKPSKSVNVSFVGKYVDLKDAYFSLTEALDHAGINNDTKVNINFVSSDELNNKNYSSKLKKSDAILVPGGFGGRGIEGMILAAKYAREKKVPYFGICLGLQIAIIEIARNLCGLKDANSTEFKPRTKHKVISLITEWKNEDGSIEKRDKNSDKGGTMRLGAQKAKLKKNSLAHKLYKKTNIFERHRHRYEVNPEYISELEKKGLLISARSEIHNLVEIIGIKNHPWYLGCQFHPEFTSKPKTGHPLFNDFIKTAVKLKR

SEQ ID NO: 196291 - protein, 197 aa, Unknown
  Bacterial polypetide isolated from the Sargasso Sea
DGILIPGGFGKRGIEGMIIAANYARRKNVPYFGICLGMQIAIIEFARYEAKLNQANSTEFNKLTPHPVIALVTEWKDKSGKLEQRNPNSDLGGTMRLGGQKCKLKKSSLSHRLYKKDNIIERHRHRYEVNPNYKDKLIEHGLEITGMSSDNKLVEMIEIKQHKWFIGCQFHPEFTSNPRDGHPLFNNFILKALKSTK

SEQ ID NO: 196292 - protein, 539 aa, Unknown
  Bacterial polypetide isolated from the Sargasso Sea
MTRYVFITGGVVSSLGKGIAAASLGSLFKLRGFKVSLQKLDPYINLDPGTMSPIQHGEVFVTKDGAETDLDLGHYERFVGIEMSQDSNVTAGRVYSNVINKERRGDYLGSTVQVIPHITDEIKKLIKRGSRGADIAFVEVGGTVGDIESLPFLEAIRQFSLEVGSNMSLFVHLTLLPYIDVTKEIKTKPTQHSVKELRSIGIQPDILLCRGKNEIDNRIKKKLALFTNVSKDAVFSAIDAETIYDIPVLLQKQNIDTYITKSLKLKNKKLNLKPWTDYRKKLNRCKRSTTIAMIGKYVDLEDSYKSLNEALYHAGIINGARVNIEYIDSEKINKTYLKNLKKVNGILVPGGFGNRGIEGKILAAMYARKNDIPYFGICLGMQISVIEYARNVINLTRANSTEFDLKTKNPVIALVEEWKNSSGKNILVDKKNLGGTMRLGSQKCDIIKNSLAFKMYNSLVINERHRHRYEVNSNFLDFFDNSNMIFSGRSHSDNLMEIIELNNHPWYLGCQFHPEFTSSPVNGHPLFNGFIKAAIKNKI

SEQ ID NO: 196293 - protein, 483 aa, Unknown
  Bacterial polypetide isolated from the Sargasso Sea
MARYIFVTGGVVSSLGKGLSSASLAYLLKSQGYNVRLRKMDPYLNVDPGTMSPFQHGEVFVTDDGAETDLDLGHYERFTNISSKQSDNITTGRIYSDVIKRERKGGYLGKTVQVIPHITNRIKEFIKKDITNEDFVICEIGGTVGDIESLPFVEAIRQFSNEHGKSKTLFIHLTFVPFLKSSDEIKTKPTQHSVKELRSIGIQPDIIICRSQQSIPLDQRKKISLFCNVPIDNVIETVDVRTIYEAPISFFKQKLDKQVLKYFKIKSKKRANLNPWKKITKIVLNTKRIVDIAIIGKYVNLKDAYKSLDEALIHGGISNKVKVNLIRIESDNLKTNEIKKKLKNVSGLLIPGGFGKRGTEGKISAIKYARENKIPFLGICFGMQMAIIEFARNKLNIKKAGSSELDKKCYPVIGLIDEWDKNGKIIKGTDKDLGGTMRLGLYEAKLRNNSAINRIYNSKTIKERHRHRYEVNNNLKNQLKKRG

SEQ ID NO: 196294 - protein, 63 aa, Unknown; identical to SEQ ID NO: 196071
  Bacterial polypetide isolated from the Sargasso Sea

SEQ ID NO: 196295 - protein, 253 aa, Unknown
  Bacterial polypetide isolated from the Sargasso Sea
KEVNVSFVGKYTELKDSYKSINEALEHAGIKNKAKVNINFVEAENISSKNIKKTLKNADAVLVPGGFGERGIEGMILACKYARENNIPYLGICLGMQVAIIEYARNVLNLKGANSTEFDQNTKHPVIGLITEWNDISGKKEKRDKNSDLGGTMRLGGQLCKLKKGSNSLRMYKNSEIIERHRHRYEVNPKYKDDMIKKGLDVVGTSIDGKLVEMIEIPKHKWFLACQFHPEFTSNPRDGHPIFNSYIKSTLRK

SEQ ID NO: 196296 - protein, 169 aa, Unknown
  Bacterial polypetide isolated from the Sargasso Sea
MAKTKYIFITGGVVSSLGKGIAAASIGALLESRGLSVSLIKVDPYINVDPGTMSPFQHGEVFVTNDGTETDLDLGHYERFVRFEASKKNNFTAGKIYETVIRNERKGKYLGGTVQVIPHITNEIKKRIKEGGLNKDIAIVEIGGTVGDIESQPFVEAIRQMALELPSSS

SEQ ID NO: 196297 - protein, 541 aa, Unknown
  Bacterial polypetide isolated from the Sargasso Sea
MAKTKYIFITGGVVSSLGKGIAAASIGALLESRGLSVSLIKVDPYINVDPGTMSPFQHGEVFVTNDGTETDLDLGHYERFVRFEASKKNNFTAGKVYETVIKNERKGKYLGGTVQVIPHITNEIKKRIKEGGQNKDIAIVEVGGTVGDIESQPFVESLRQMALEMPNSSSAFVHLTLVPYINASGELKTKPTQHSVKELRSLGISPDVLICRSEQELPKDEKNKIALFCSVPNKSVISMHDVETVYSIPALLNKQKVDKTILDKLNIKSKDPKLNDWKRVVKAKLLPDIEVNVSFVGKYTELKDAYKSINEALEHAGIVNKAKVNINFVQAADLTTKNIRKKLRKADAILVPGGFGHRGVEGMILACKFARENNIPYLGICLGMQVAIIEYARNVLKLKNANSTEFDQHTEFPVIGLITEWNDISGKKEIRNKNSDLGGTMRLGGQICKLKKSSNSYKMYKNLEIVERHRHRYEVNPKFKEAMIKEGLDVVGTSIDGKLVEMIEIPKHKWFLACQFHPEFTSNPRDGHPIFNSYIKSTIRK

SEQ ID NO: 196298 - protein, 381 aa, Unknown
  Bacterial polypetide isolated from the Sargasso Sea
EAIREFKNDVNRNDVAYIHVTLLPYIKTSGEIKTKPTQHSVKELRSIGIQPDLLVCRSDKSINEALKKKLSGFCGVSINSVIEALDADSIYSVPLSLKKEGLCKETLKYLDLEDKKCDLKNWEQLIHNLRNPGAPIKVALVGKYIELGDAYLSVVEALRHACIEQKALLDLHWVSAEMIEKNSSETYLNEVDAIVVPGGFGNRGVNGKISAIKFARENKIPFLGLCLGMQCAVIEWARNVANLPDASSSELDPNTPNPVIHLLPEQEDVVDLGGTMRLGVYPCRLTKNTTGKNLYDEDVIYERHRHRYEFNNYYKQSFLNSGYKISGTSPDGRLVELIELENHPYFLACQYHPEFLSRPGKPHPYFKGLIKASQDKLNQSN

SEQ ID NO: 196299 - protein, 474 aa, Unknown
  Bacterial polypetide isolated from the Sargasso Sea
RKHNRTPGQIYDTVIRKERAGDYLGATVQVIPHVIDEIKNTITEASRIFDKETKSFNAPNADICIVEIGGTVGDIESLPFLEAIRQFRHDHGKEHTLFAHLTLIVQTAEMKTKPTQHSVGKLREIGIQPDILICRTPEMLSEKVRSKISLFTNVPEDSVVNGLDVESVYEVPLMFHQQNLDKTIMAYLQMWTGSPKLQPWIDLIEKYKNPQDEVEIAFIGKYVAHLDSYESLKEALLHGGIANRLKVKLHYIDSELLTTENALELLEKMDGVLVAPGFGERGMEGKITAIQIARTANIPFFGICLGMQMAIVEFSRNVLGISGANSGESRPDHTENVIDLMPEQEGHIETGGTMRLGSQITVLKKGSRIAKMYNKTTISERHRHRYEVMNEFVPKLEEAGLMISGRHPERNLVETIELHEHPWFIGCQFHPELQSKPLKPHPMFSSFIKAAYANRQSRLRQVQTSLKKAKAPVA

SEQ ID NO: 196300 - protein, 537 aa, Unknown
  Bacterial polypetide isolated from the Sargasso Sea
MTKTPKYIFVTGGVSSSLGKGIISASLAKLLQSKGLKVTIQKFDPYINIDPGTLNPYEHGECYVTKDGTETDLDLGHYERFLSIQTTKTNNTTTGKIYQSVINRERRGDFLGKTVQVIPHITNEIKRRIQLISTEDSYDIIITELGGTVGDIESYPFIEAVRQFRWDVGEKNSLVIHLTLLPFLSAAGELKTKPTQHSVKKLMESGVNADIIVCRTERSIGQDLRSKIALFCNVDINSVIESIDAKTIYEVPLLMQQEKLDQVVLNKLNLPNTKSDLKDWKNFVKKLKNPKQNIKIGLIGKYVELQDSYKSILESFVHAGAINEVKIDVVPIHSESIESTNVAVELSKLDGILVAPGFGERGIEGKISSIKYARENNLPFLGICLGMQMAVIEFARNVLSLSSANSTEMDDSTKHPVISLMDDQVEVQDKGGTMRLGSWKCKIVKESLAYKIYNEETISERHRHRYELNFDYMDKLADSGMVFSGLNPKTGLVEIIEIPNHDWFLGVQFHPEYQSTVENPHPVFVSFVKACKNKSKK

SEQ ID NO: 196301 - protein, 380 aa, Unknown
  Bacterial polypetide isolated from the Sargasso Sea
MSKFVFVTGGVVSSIGKGIVAASLGRLLKSRGYSVSILKLDPYLNVDPGTMSPFQHGEVFVTEDGAETDLDLGHYERFTDTAMTRLNSVTTGSIYQAVINKERRGNYNGGTVQVIPHITGEIRERIHRVAANSNADIIITEIGGTVGDIESLPFLEAIREFKNDVNRNDVAYIHVTLLPYIKTSGEIKTKPTQHSVKELRSIGIQPDLLVCRSDKSINEGLKKKLSGFCGVNIKSVIEALDADSIYSVPLALKKEGLCKETLKYLELEDKECDLKNWEALIHNLRNPGDPIKVALVGKYIELGDAYLSVVEALRHACIENKALLDLQWVSAEMIEKDSAETYLNEVDAIVVPGGFGNRGVNGKISAIKFAREKKIPFLGL

SEQ ID NO: 196302 - protein, 177 aa, Unknown
  Bacterial polypetide isolated from the Sargasso Sea
MSKFIFVTGGVVSSLGKGIAVASIGKMLKSRGLTVSVMKLDPYLNVDPGTMSPYQHGEVFVTDDGSETDLDLGHYERFIDVELTHNSNITAGQIYSEVISKERSGEYLGGTIQTIPHVTNLIRDKIINLSKDSDVDIVIVEVGGTVGDIEGQPFLEAIRQVRNSVGRDDTFYVHLTL

SEQ ID NO: 196303 - protein, 454 aa, Unknown
  Bacterial polypetide isolated from the Sargasso Sea
DNITTGRIYSDIIKKERRGGYLGKTVQVIPHVTNRIKEFIKKDITNEDFVICEIGGTVGDIESLPFLEAIRQFSNDNGRSKSLFIHLTFVPFLKSSDEIKTKPTQHSVKELRSIGIQPDIVICRSQQSIPLDQRRKISLFCNVDIANVIETVDVKTIYEAPISFFNQKLDKQVLKFFKIKSRKRPNLLPWKKITNIVLKTKRTVNIAIIGKYVNLKDAYKSLDEALTHGGISNKVKVNLVRIESDKLRSKEIKSKLKNVSGILIPGGFGKRGTEGKIVSIRYARERKIPFLGICFGMQMAMIEFARNRLKIKKAGSSELDNNCFPVIGLIDEWNKDGKVIKGTDKNLGGTMRLGFYEAKLRNNSAIKNIYKSNMIKERHRHRYEVNINLMQKFEKKGLMFSGISPDNQLPEIIELKNHPWFIGVQFHPEFKSRPLNPHPLFSSFIKSAKSFNGK

SEQ ID NO: 196304 - protein, 366 aa, Unknown
  Bacterial polypetide isolated from the Sargasso Sea
MARFIFVTGGVVSSLGKGLASASLASLLQHHGYKVRIRKLDPYLNVDPGTMSPYQHGEVYVTDDGAETDLDLGHYERFTGVTSKKSDNITSGKVYQKIIAKERKGEYLGATVQVIPHVTNEIIEFISKDLDYEDFVICEIGGTIGDIESLPFIEAIRQFHNDNGHENSLFMHVTLVPYIASSGELKTKPTQHSVKELRSLGIQPNILLCRADREIPEDERRKIGLFCNVKGDCVIPAINANSIYEVPINFLNEGLDKRVLEYFRLESKKEIDLKMWSQVSKRILEPEGSIEIGIVGKYTGLADAYKSLNEALSHGGIYNNVKVKLNWIESEELNGSNIENMLNNCHGILVPGRFGERGAEGKIAAI

SEQ ID NO: 196305 - protein, 115 aa, Unknown
  Bacterial polypetide isolated from the Sargasso Sea
GRKIKGTLKNLGGTMRLGLYPAKLQHNSLIKEIYKSSQIRERHRHRYEVNVSLRKKFETHGLNFSGMSPDNNLPEIVEIKDHPWFIGVQFHPEFKSRPLQPHPLFSSFIGAAKNK

SEQ ID NO: 196306 - protein, 441 aa, Unknown
  Bacterial polypetide isolated from the Sargasso Sea
MAKTKYIFITGGVVSSLGKGIAAASIGALLEARSLSVSLIKVDPYINVDPGTMSPFQHGEVFVTNDGTETDLDLGHYERFVRFQASKKNNFTAGKVYEAVIRNERKGKYLGGTVQVIPHITNEIKKRIKEGGQNKDVAIVEIGGTVGDIESQPFVEAIRQMALELPNSSWAFVHLTLVPFINASGELKTKPTQHSVKELRSLGISPDVLVCRSEQELPKDEKKKIALFCSVPNESVISMHDVDTVYSVPILLNKQKVDKTIIEKLKIKAKQPNLNDWKRVVKAKLMPEKEVNVSFVGKYTELKDSYKSINEALEHAGIKNKAKVNINFVEAENISSKNIKKTLKNADAVLVPGGFGERGIEGMILACKYARENNIPYLGICLGMQVAIIEYARNVLNLKGANSTEFDQNTKHPVIGLITEWNDISGKKEKRDKNSDLGEQC

SEQ ID NO: 196307 - protein, 258 aa, Unknown
  Bacterial polypetide isolated from the Sargasso Sea
MAKAKPVKYIFVLGGVISGLGKGIAAASIGYLLKSAGLKVTILKLDPYLNVDPGTMNPYQHGEVFVLDDGSETDLDLGHYERFIDVDMGKINNTTTGQVYSTVLEKERRGDYLGATIQVIPHITDEIISRIKAINKPKKFDVVICEVGGTVGDIESLPFMEAIRQLSLEVGYHNHTMMHVTLVPYIQASEELKTKPTQHSVMKLREIGLSPDMILCRTDHKLTKDVRNKIGLFGNLNPDHVIEGSEVKSIYEVPLNPI

SEQ ID NO: 196308 - protein, 250 aa, Unknown
  Bacterial polypetide isolated from the Sargasso Sea
MKSHLTLYNQNVSEIIMDRLQLPGKADVSYLKTFIKKYKDPKHNVNIAMCGKYTELPDAYKSVLESFIHSGVENNARVNVHWVATEEIKNDLDAEKAFNKMDGILLLPGFGSRGSEGKIISCKYARENNVPFLGICLGLQCAVIEFARNVCGLNGANSTEFNKNTPYPVIDLMESQKAIKAKGGTMRLGAYSCKIKKGTKAFSAYRRKTISERHRHRWEVNNRFRDRLTKKGLVISGENSDLNLVEIVEL

SEQ ID NO: 196309 - protein, 412 aa, Unknown
  Bacterial polypetide isolated from the Sargasso Sea
MTTRYIFVTGGVVSSLGKGIAAASLAAILEARGLKVTILKLDPYINLDPGTMSPIQHGEVYVTEDGAETDLDLGHYERFIRTKMTKRNNFTQGRIYSDVLRRERRGDYLGATIQVIPHITNEIKSRVIAGAEGYDIAIVEIGGTVGDIESLPFLEAIRQLGTEIGRERAMFMHLTLVPYLGTAGEIKTKPTQHSVKELRSIGIQPDILVCRSDRAIPSNERAKIALFTNVEERAVISLKDVSSIYQIPALLKSQGLDELVVRRFHMTCPEADLTEWEQVLYQESNPTGEITVGMVGKYVELPDAYKSVNEALNHAGLKNRLTVHIKYIDSQDVESKGTDVLAGVDAILVPGGFGERGVEGKIMAARYARENKVPYLGICLGMQVALIEYARNVAGMKDAHSTEFNKKTPYPV

SEQ ID NO: 196310 - protein, 157 aa, Unknown
  Bacterial polypetide isolated from the Sargasso Sea
MCLGMQCAVIEWARNVANLPDASSSELNPNTPNPVIHLLPEQEDVVDLGGTMRLGVYPCRLTKNTTGKNLYDEDVIYERHRHRYEFNNYYKQSFLDSGYKISGTSPDGRLVELIELENHPYFLACQYHPEFLSRPGKPHPLFKGLIKASQDKLTQSN

SEQ ID NO: 196311 - protein, 116 aa, Unknown
  Bacterial polypetide isolated from the Sargasso Sea
MAKAKPIKYIFVLGGVISGLGKGIAAASIGYLLKSAGLKVTILKLDPYLNVDPGTMNPYQHGEVFVLDDGSETDLDLGHYERFIDVDMGKINNTTTGQVYSTVLEKERRGDYLGAT

SEQ ID NO: 196312 - protein, 291 aa, Unknown
  Bacterial polypetide isolated from the Sargasso Sea
MARYIFVTGGVVSSLGKGLSSASLAYLLKSQGYKVRLRKMDPYLNVDPGTMSPFQHGEVFVTDDGAETDLDLGHYERFTNISSKQSDNITTGRIYSDVIKKERKGGYLGKTVQVIPHITNRIKEFIKKDITNEDFVICEIGGTVGDIESLPFVEAIRQFSNEHGKSKTLFIHLTFVPFLKSSDEIKTKPTQHSVKELRSIGIQPDIIICRSQQSIPLDQRKKISLFCNVPIDSVIETVDVRTIYEAPISFFNQKLDKQVLKFFKLKPKKRPNLNPWKKITKIVLNTKKSVN

SEQ ID NO: 196313 - protein, 73 aa, Unknown
  Bacterial polypetide isolated from the Sargasso Sea
MARYIFVTGGVVSSLGKGLSSASLAYLLQSRGFKVRIRKLDPYLNVDPGTMSPFQHGEVYVTDDGAETDLDLG

SEQ ID NO: 196314 - protein, 233 aa, Unknown
  Bacterial polypetide isolated from the Sargasso Sea
MARYIFVTGGVVSSLGKGLSSASLAYLLQSRGFKVRIRKLDPYLNVDPGTMSPFQHGEVYVTDDGAETDLDLGHYERFSGVSAKKSDNITTGKIYNDVLKKERKGEYLGKTVQVIPHITDRIKQFIKHDSSKEDFVICEIGGIVGDIESLPFVEAIRQFANDVGKKNALFIHLTLVPYLKASDEIKTKPTQHSVKELRSIGIQPDIIICRSERPIPLEHRKKISLFCNVDIKN

SEQ ID NO: 196315 - protein, 335 aa, Unknown
  Bacterial polypetide isolated from the Sargasso Sea
MARYIFVTGGVVSSLGKGLSSASLASLLQLRGFKVRVRKLDPYLNVDPGTMNPFQHGEVFVTDDGAETDLDIGHYERFTGISATQSDNITTGGIYSDIIKKERKGDYLGGTVQVVPHVTDRIKKFISHNVKNEDFIICEIGGTVGDIESLPFLEAIRQFSNDQGKKNSLFVHLTLVPFLKASGELKTKPTQHSVKELRSLGIQPDIIICRSEKKIPIAERKKISLFCNVSADNVIETVDVRTIYEAPISFHREKFDERVLSFFNVKSKKLPNLSKWKNITSKVLSSRKNVNIGIIGKYVNLKDAYKSLDEALTHGGISNDLKVNLKRIDSENLRT

SEQ ID NO: 196316 - protein, 300 aa, Unknown
  Bacterial polypetide isolated from the Sargasso Sea
KTIYEAPISFFNQKLDKQVLKFFKIKSRKKPNLLPWKKITNIVLKTKRTVNIAIIGKYVNLKDAYKSLDEALTHGGISNKVKVKLVRIESDKLRSKEIKSKLKNVSGILIPGGFGKRGTEGKIEAIRYARERKIPFLGICFGMQMAMIEFARNILKIKKAGSSELDKNCFPVIGLIDEWNKDGKIIKGTDKNLGGTMRLGLYEAKLRNNSAIKNIYKSNMIKERHRHRYEVNINLMQKFEKKGLMFSGISPDNQLPEIIELKNHPWFIGVQFHPEFKSRPLNPHPLFSSFIKAAKSFNGK

SEQ ID NO: 196317 - protein, 156 aa, Unknown
  Bacterial polypetide isolated from the Sargasso Sea
MQMAMIEFARNVLKITNAGSSELNKNCYPVVGLINEWNKNGKIIKGTDKNLGGTMRLGLYKANLKKNTKIRNIYKNQSIQERHRHRYEVNINLKHKFEKKGLIFSGISPDNKLPEIIELKDHPWFIGVQFHPEFKSRPLSPHPLFSSFIKAAKIYK

SEQ ID NO: 196318 - protein, 415 aa, Unknown
  Bacterial polypetide isolated from the Sargasso Sea
MQTKFIFVTGGVMSGLGKGVVSSSICKLLQLSDQKVSCIKIDPYLNYDAGTMNPIAHGEVFVTDDGGECDMDIGNYERFLNQDIPKSHNITTAQIYSSVIESERKGEYLGACVQIIPHVTDAIKNRIKKIAADEELEILVVECGGTVGDIESLPFLEALRQIRVEEGSENVIFVHVTLAPSLDVVGEQKTKPTQHSVQELRRIGIQPDLLCVRCSMPLQDKTRNKISMFTNVTNNDVFSCHDVDSIFQVPEILYDQGLVDVIFKKFNKMGYVNASQNWDTWNKIVNSLHNEGDPINIAMVGKYVTLADSYVSVNHALKHAAASIGKKITIDWIDSENINGNVDTLSKYNGILVPGGFGTRGSEGIIKTANFAREQNIPYLGICFGFQLAAVSFARNVCSHTDANSTEIEQNTNNP

SEQ ID NO: 196319 - protein, 381 aa, Unknown
  Bacterial polypetide isolated from the Sargasso Sea
LDLPSKSTSFVHLTLVPYINVSGELKTKPTQHSVKELRSLGIGPNCLICRSETELPKDEKKKIALFCSVDMSNVISMHDVDTVYSIPLLLHKQKVDEIVLKDLGLKTKKPNLNDWKKVVKAKLNPKKSVEVAMVGKYTELKDSYKSLNEALDHAGIKNNAKVNITFIEAEKLTKRNVKTKLKFADAVLVPGGFGSRGIEGMIIACEYARIKKMPYFGICLGMQIALIEFARNMLGLKGANSTEFDLKTNYPVVALITEWKDKTGKTERRTADSDLGGTMRLGGQTCILKKNSNVFKMYKKNKIIERHRHRYEVNPEFRDGFNTKGMNIVGTSVDDMLVEMIEIKNHPWFLGCQFHPEFTSNPRDGHPIFNSFISSTIKTKK

SEQ ID NO: 196320 - protein, 299 aa, Unknown
  Bacterial polypetide isolated from the Sargasso Sea
VYTIPLLLHKQKVDEIVLKDLGLKTKKPNLNDWKKVLKAKLNPKKSVQVAMVGKYTELKDSYKSLNEALDHAGIKNNAKVNITFVEAEKLTKRNVKSKLKFADAVLVPGGFGSRGIEGMIIACEYARIKNIPYFGICLGMQIALIEFARNMLGLKGANSTEFNSKTNYPVVALITEWKDKTGKTERRTADSDLGGTMRLGGQTCILKKGSNVFKMYKKKKIVERHRHRYEVNPEFRDGFNTKGMNVVGTSVDDMLVEMIEIKNHPWFLGCQFHPEFTSNPRDGHPIFNSFISSTIKTKK

SEQ ID NO: 196321 - protein, 545 aa, Unknown
  Bacterial polypetide isolated from the Sargasso Sea
MKDTRFIFVTGGVVSSLGKGIASASIGSILESKGYKVSVIKLDPYFNVDPGTMSPFQHGEVFVLEDGTETDLDLGHYERFIDNVCTKKNNFTAGKVYYSVLRKERKGEYLGKTVQIIPHITDEIKRKILNASKNCDIAIVEIGGTVGDIEGQPFIEAIRQLGLELKSYQTSYLHLTLVPYLSNAGELKTKPTQHSVKEYRTLGVQPDILICRSDYALPQESKEKIALFCSMPKDGVISLPNLDTIYEAPLFLAEEGIDKILTKRLQLDKTVPNLKDWKKVVKRKLKPSKDLNVSFVGKYVDLKDAYFSLIEALDHAGIHNDTRVNINYVNSEKIELSNYKRVLKNSDAILVPGGFGNRGIEGMILAARFARENKVPYFGICLGLQIAIIEMTRNLLNLKDANSTEFKPRTSNKVISLVTEWKNKDGTIEKRNKDSDKGGTMRLGAQNASLLKESLARSLYKKKTIFERHRHRYEVNPDYVPMLENKGLVVSARSEVHNLVEMIELKDHPWFLGCQFHPEFTSKPKTGHPLFNDFIKTAVKLKNKK

SEQ ID NO: 196322 - protein, 538 aa, Unknown
  Bacterial polypetide isolated from the Sargasso Sea
MASKPKFLFVTGGVVSSLGKGILSASLGSLLESKKLKVTIMKLDPYINLDPGTMSPFQHGEVFVTEDGAETDLDLGHYERFLDEKMSQNNNFTAGQVYDSVLKKERKGEFLGATVQVIPHITDEIKKRIMKGAKGYDLAIVEIGGTVGDIESQPFLEAIRQLKIELGDQRTLFLHLTLVPFLSTSGETKTKPTQHSVKNLLSYGLQPDILICRSEKELQSSDKRKIALFTNVGLDSVFSLPDLPSIYAIPVFLSKEKLDEVVTRKMGIKSKKADLSDWRKVNRLEKASNKKITVSMVGKYTELADAYMSLNEALRHGGLQNKVDVNINYIDSENLKSNSQLKGSDAILIPGGFGHRGINGMIMATKYAREKKIPFFGICLGMQVAVIEFARNVLNLKANSTEFDKKTNHPVIALMHEWKDPEGSIQKRNASSDMGGTMRLGAQKCILSNNSKLKKMYKKSEIFERHRHRFEFNGNYENAMIEKGMKIVGRSRDKKLVEAIELDDHPWFLGCQFHPELTSNPKEGHPIFNDFIKAASKK

SEQ ID NO: 196323 - protein, 84 aa, Unknown
  Bacterial polypetide isolated from the Sargasso Sea
MARYIFVTGGVVSSLGKGLSSASLAYLLKSQGYKVRIRKMDPYLNVDPGTMSPFQHGEVFVTNDGAETDLDLGHYERFTNISAK

SEQ ID NO: 196324 - protein, 50 aa, Unknown
  Bacterial polypetide isolated from the Sargasso Sea
MARYIFVTGGVVSSLGKGLSSASLAYLLQSRGYKVRLRKLDPYLNVDPGT

SEQ ID NO: 196325 - protein, 336 aa, Unknown
  Bacterial polypetide isolated from the Sargasso Sea
ILVCRSEHELPDEQRKKIALFTNVNEEAVISAYDVDDLYKIPEMMHQQSLDSIVIKKLKLKTPDANLNEWKSIVRAKTSAKKEINIAMVGKYMDLRDAYISLTEALLHGGIKNLVKVNISYIESQDIEKEGTKLLESVDGIVVPGGFGDRGIEGKIETVRYAREKDVPYLGICLGMQVAIIETARNLANLKGAHSTEFNKDTKYPVIALITEWQKASGEIEERDEDSEMGGTMRLGAQEIYLQKNTFARSLYKKEVIKERHRHRYEFNNNFKDSLENAGIQFSGLSVDNLVEMIEIPDHPWFVASQFHPEFTSNPRDGHPLFSGFIEAVLKYKEKG

SEQ ID NO: 196326 - protein, 426 aa, Unknown
  Bacterial polypetide isolated from the Sargasso Sea
MARYIFVTGGVVSSLGKGLSSASLAYLLKSQGYKVRIRKMDPYLNVDPGTMSPFQHGEVFVTDDGAETDLDLGHYERFTNITAKKSDNITTGRIYSDIIKKERKGKYLGKTVQVIPHVTDRIKEFIKGDIKNEDFVICEIGGTVGDIESLPFVEAIRQFSNEVGRQKSLFIHLTLVPFLKSSDEIKTKPTQHSVKELRSLGIQPDIVICRSQKPIPLDQRKKISLFCNVSIDNVIETVDVRTIYEAPISFYNEKIDKQVLKFFKLKPRKKVNLIPWKKITKSVLNNKKIVNIAIIGKYVNLKDAYKSLDEALIHGGISNNVKINLIRIESDNLKSNQVKKLLKNISGILIPGGFGKRGTEGKISAINFARKKKIPFFGICFGMQMAVIEFARNVLKIKKAGSSELDKKCYPVIGLLNEWNKDGKLI

SEQ ID NO: 196327 - protein, 119 aa, Unknown
  Bacterial polypetide isolated from the Sargasso Sea
MARYIFVTGGVVSSLGKGLSSASLAYLLKSQGYKVRIRKMDPYLNVDPGTMSPFQHGEVFVTDDGAETDLDLGHYERFTNISSKQSDNITTGKIYSDVIKKERQGGYLGKTVQVIPHIT

SEQ ID NO: 196328 - protein, 510 aa, Unknown
  Bacterial polypetide isolated from the Sargasso Sea
MAKTKYIFITGGVVSSLGKGIAAASIGALLEARGLKVSLLKLDPYINVDPGTMSPFQHGEVFVTNDGTETDLDLGHYERFVRFEASKKNNFTAGIVYESVIKNERKGKYLGGTVQVIPHITDEIKRRIKAGSAGSDVAIVEIGGTIGDIESQPFVEAIRQMSLDLPSKSTSFVHLTLVPYINVSGELKTKPTQHSVKELRSLGIGPNCLICRSETELPKDEKKKIALFCSVDMSNVISMHDVDTVYSIPLLLHKQKVDEIVLKDLGLKTKKPNLNDWKKVVKAKLNPKKSVEVAMVGKYTELKDSYKSLNEALDHAGIKNNAKVNITFVEAEKLTKRNVKTKLKFADAVLVPGGFGSRGIEGMIIACEYSRLKNIPYFGICLGMQIALIEFARNMLGLKGANSTEFDSKTNYPVVALIAEWKDKTGKTERRTADSDLGGTMRLGGQTCILKKGSNVFKMYKKKEIVERHRHRYEVNPEFRDGFNTKGMNIVGTSVDDMLVEMIEIKNHPW

SEQ ID NO: 196329 - protein, 358 aa, Unknown
  Bacterial polypetide isolated from the Sargasso Sea
MTQYIFITGGVASSLGKGLTSAALGALLQSRGFNVKIKKLDPYLNVDPGTMNPFQHGEVFVTDDGAETDLDLGHYERFTNVPSSINDNITTGQIYKRIINKERKGDYLGRTVQIIPHVTDEIKKFILSNNDNIDFCLCEIGGTVGDIEGLPFFEAIRQLSNELKKNMTCFLHLTLVPYISAAGEVKTKPTQHSVKELRSIGIQPDILVCRCDREISKSDIRKISVFCNVNEDSVIQAIDVDTIYAVPKDLKTNGLDVAVLNALGKNSFPKSNLRKWNKVVERIRKPIGEVTIGVVGKYLDLNDAYKSLFEALTHGGISNNVKVNIKNIDTDKLEKNKNKTVFNGLSGILVPGGFGKRG

SEQ ID NO: 196330 - protein, 157 aa, Unknown
  Bacterial polypetide isolated from the Sargasso Sea
MGKGNPTKFIFVLGGVMSGLGKGIAASSIGYLLKNSGLKVTILKLDPYLNVDPGTMNPYQHGEVFVLDDGSETDLDLGHYERFIDVSMTKNNNATAGQIYSTVLDKERKGEYLGETVQVIPHVTDEIINRIKNINKPKRNDVVICEVGGTVGDIESL

SEQ ID NO: 196331 - protein, 206 aa, Unknown
  Bacterial polypetide isolated from the Sargasso Sea
MARYIFVTGGVVSSLGKGLSSASLGYLLRSQGFKVRIRKMDPYLNVDPGTMSPFQHGEVFVTDDGAETDLDLGHYERFTNISAKQSDNITTGRVYSDILKKERRGGYLGKTVQVIPHVTDRIKEFIKKDITNEDFVICEIGGTVGDIESLPFLEAIRQFSNDNGRSKSLFIHLTFVPFLKSSDEIKTKPTQHSVKELRSIGIQPDI

SEQ ID NO: 196332 - protein, 548 aa, Unknown
  Bacterial polypetide isolated from the Sargasso Sea
MGKVQTCFIFVTGGVVSSLGKGIASASIGALLESRGLTVTILKLDPYINLDPGTMSPFQHGEVFVTEDGSETDLDLGHYERFLKTKMTKDNNFTTGQVYEEVLRKERKGDYLGGTVQVIPHITDEIKNKIKKGAGNSEVAIVEIGGTVGDIESQPFLEAIRQMKLELGSSQTLFIHLTLVPFLKSAGETKTKPTQRSVKEMLSHGLQPDILICRSDGVLADEERSKIALFTNVEESSVISMPDVNSIYKIPVELNRQKVDEIVVNKLNLECKKASLTDWRRVIDEDLNPKNSVTISIVGKYTELADAYKSLNEALRHGGLKNDLKINIQYIDSELINTRNAKSLLKGSHAILVPGGFGERGIEGMISAVKFARLNKVPYLGICLGLQIAVIEYARNVVGLRGANSTEFNQETKYPVIGLISEWMDSGGKIEKRDENSDLGGTMRLGAQECFLDKDSLSRSLYKKARILERHRHRYEVNNNYLDMLISSGMKVAGRSKDKSLVEVIELKNHPWFVGCQFHPEFTSNPREGHPLFSGFIKAAKKYKRLKR

SEQ ID NO: 196333 - protein, 170 aa, Unknown
  Bacterial polypetide isolated from the Sargasso Sea
MTQYIFITGGVASSLGKGLTSAALGALLQSRGFNVKIKKLDPYLNVDPGTMNPFQHGEVFVTDDGAETDLDLGHYERFTNVPSSINDNITTGQIYKRIISKERKGDYLGRTVQIIPHVTDEIKEFILSNNDNIDFCLCEIGGTVGDIEGLPFFEAIRQLSNELKKNMTCS

SEQ ID NO: 196334 - protein, 348 aa, Unknown
  Bacterial polypetide isolated from the Sargasso Sea
HGEVFVTDDGAETDLDLGHYERFTDISSKKSDNITTGRIYSDIIKKERKGGYLGKTVQVIPHVTDRIKEFIKKDITNEDFVICEIGGTVGDIESLPFLEAIRQFSNENGKLKSLFIHLTLVPFMKSSDEIKTKPTQHSVKELRSIGIQPDIVICRSEQSIPIDQKRKISLFCNMQIENVIETVDVKTIYEAPISFFNQKLDKQVLKYFNLKSKRKPNLKPWKKITNTVLNTRKTVNIAIIGKYVNLKDAYKSLDEALTHGGIQNKVKINLIRIESDKLKSNNIRKKLKNVSGILIPGGFGKRGTEGKIACIKYAREKKIPFLGICFGMQMAVIEFARNVLKIKKSRIN

SEQ ID NO: 196335 - protein, 188 aa, Unknown
  Bacterial polypetide isolated from the Sargasso Sea
MARFIFVTGGVVSSLGKGLSSASLAYLLQSRGYKVRLRKLDPYLNVDPGTMSPFQHGEVFVTDDGAETDLDLGHYERFTGVSAKKSDNITTGKIYNDVLKKEREGKYLGSTVQVIPHITDRIKEFIKNDSLKEDFVICEIGGIVGDIESLPFIEAIRQFANDIGKKNALFIHLTLVPYLKSSDEIKTK

SEQ ID NO: 196336 - protein, 444 aa, Unknown
  Bacterial polypetide isolated from the Sargasso Sea
DIGHYERFTDISATKSDNITTGGIYSDIIKKERKGDFLGGTVQVVPHVTDRIKKFISHDVKNEDFIICEIGGTVGDIESLPFLEAIRQFANDIGKKNSLFIHLTLVPFLKASGELKTKPTQHSVKELRSLGIQPDIIICRSEKQIPKTERKKISLFCNVSIENVIETVDVKTIYEAPISFHKEKLDDRVLSYFNIKNKKSPDLSKWKNITSKVLNPKKDVNIGIIGKYVNLKDAYKSLDEALIHGGISNNVKVNLKRIDSENLKPEKIKPLLKDVSGVLIPGGFGKRGSEGKIAAIKYARLNNIPFFGICFGMQMAIIEAARNLLNIKNASTSEFGNNCTPVVGLLEEWQKGKKRIKGSEKNLGGTMRLGLYDAVLKNNSLISKIYSERKIKERHRHRYEVNIKYRGDFEKKGLIFSALSPDGMLPEIIELKNHPWFVGVQFHR

SEQ ID NO: 196337 - protein, 377 aa, Unknown
  Bacterial polypetide isolated from the Sargasso Sea
FANDVGKKNALFIHLTLVPYLKASDEIKTKPTQHSVKELRSIGIQPDIIICRSERPIPLEHRKKISLFCNVDIKNVIETVDVKTIYEAPISFFREKLDVQVLNYFKLKTKKPVNLNPWKKITKIILQNKRQVNIAIIGKYVELQDAYKSLDEALTHGGIDNKIKVNLVRIDSEKLKISEIKKKLKNISGILIPGGFGKRGTDGKIEAIKHARMNKIPFLGICYGMQMAIIEFARNQLNLKNATSSEFDKKGIPIIGLINEWSKDGKTIKGTDKDLGGTMRLGSYDARLQNNSKIRKIYKSKLIKERHRHRYEVNITYREKFEKKGMIFSGLSPDNQLPEIIELKNHPWFIGVQFHPEFKSRPLSPHPLFSSFIKAAK

SEQ ID NO: 196338 - protein, 401 aa, Unknown
  Bacterial polypetide isolated from the Sargasso Sea
MQTKFIFVTGGVMSGLGKGVVSSSICKLLQLSDQKVSCIKIDPYLNYDAGTMNPIAHGEVFVTDDGGECDMDIGNYERFLNQDIPKSHNITTAQIYSSVIESERKGEYLGACVQIIPHVTDAIKNRIKKIATDEELEILVVECGGTVGDIESLPFLEALRQIRVEEGSENVIFVHVTLAPSLDVVGEQKTKPTQHSVQELRRIGIQPDMLMVRCSSPLQDKTRNKISMFTNVTNNDVFSCHDVDSIFQVPEILYDQGLVDVIFKKFNKMGYVNASQNWDTWNKIVNSLHNEGEPINIAMVGKYVTLADSYVSVNHALKHAAASIGKKITIDWIDSENINGNVDTLSKYNGILVPGGFGTRGSEGIIKTANFARERNIPYLGICFGFQLAAVSFARNVCNHT

SEQ ID NO: 196339 - protein, 201 aa, Unknown
  Bacterial polypetide isolated from the Sargasso Sea
MAKTKYIFITGGVVSSLGKGIAAASIGALLEARGLTVSLIKVDPYINVDPGTMSPFQHGEVFVTDDGTETDLDLGHYERFVRFQASKKNNFTAGKVYEAVIRNERKGKYLGGTVQVIPHITNEIKKRIKEGGQNKDVAIVEIGGTVGDIESQPFVEAIRQMALELPNSSWAFVHLTLVPFINASGELKTKPTQHSLKNLDH

SEQ ID NO: 196340 - protein, 541 aa, Unknown
  Bacterial polypetide isolated from the Sargasso Sea
MRKKKSVKYIFVVGGVISGLGKGIAASSIGYLLKSAGLKVTILKLDPYLNVDPGTMNPYQHGEVFVLDDGSETDLDLGHYERFIDVNMSKYNNATTGQVYSTVLNRERKGDYLGATIQVIPHITDEIKKRIKLVNDKNKYDVVICEVGGTVGDIESLPFMESIRQMSVEVGYHNHLIVHVTLVPYIQASEELKTKPTQHSVMKLREIGLSPDIIMCRSNYTLTESVAEKIALFCNVPKSHVIEGKEVKSIYEVPLVFDKQKMGQIIMNRLELDGQPQVTKLNNFISKYKNPSKEVNIAMCGKYTELPDAYKSVLEAFIHAGVENDTRVKVSWISTEKIKDDKSAKNQFDNCDGILLLPGFGSRGSEGKILSCKYSRENNIPFLGLCLGLQCAVIEFARNVCRLNGANSTEFDKKTSHPVIDLMESQRAIRRKGGTMRLGAYSCELLPNTKAYKEYKKKNISERHRHRWEVNNRYRSRLEKGGLVISGINKELNLVEIIENPDHPWFIASQFHPELKSRLNKAHPLFRGFIGASLKYKLSKV

SEQ ID NO: 196341 - protein, 158 aa, Unknown
  Bacterial polypetide isolated from the Sargasso Sea
MKDTRFIFVTGGVVSSLGKGIASASIGSILESKGYKVSVIKLDPYFNVDPGTMSPFQHGEVFVLEDGTETDLDLGHYERFIDNVCTKKNNFTAGKVYYSVLRKERKGEYLGKTVQIIPHITDEIKRKILNASKNCDIAIVEIGGTVGDIEGQPFIEAI

SEQ ID NO: 196342 - protein, 425 aa, Unknown
  Bacterial polypetide isolated from the Sargasso Sea
QVIPHVTNEIKNFMNSDLNNEDIIIYEIGGTVGDIESLPFLEAIRQIRNDKNISSALIHMTYIPYLSSAGELKTKPTQHSVKELLNAGIQPDIIMCRSERAIDKDSISKISLFCNVKKDSVIPALNAKSIYEVPSLYSKYKLDETLLKHLNYNPRKYPLNLKPWNKLILKINSLKKVVNIGVVGKYTNLKDSYKSLNEALIHGGIENLSKVEIKWINAEKINKKNIKDKLYNCDGVLVPGGFGVRGIGGKIEAIRYARENNLPYFGICLGMQLAVIEIARNVLRIKNANSSEFNSKSKSVVGLMTEWVKNNTIIKRNMNSDKGGTMRLGSYQAKLKKNSKVFSIYKKNIISERHRHRYEVNEKFISKFSKKGYIFSGMSPDGILPEVLESNNHPWFIGVQFHPELKSRPLTPHPLFVSFIKSCLK

SEQ ID NO: 196343 - protein, 536 aa, Unknown
  Bacterial polypetide isolated from the Sargasso Sea
MQYVFITGGVASSLGKGIASAAVASLLQQRNFKVRIRKLDPYLNVDPGTMSPYQHGEVFVTDDGAETDLDLGHYERFTNRSAKKTDSTSSGKIYSNVLKKERKGDYLGATIQVIPHVTDEIKLFINSNFEDEDIIIYEIGGTVGDIESLPFLEAIRQIRNDKNINSALIHMTYVPYLSSAGELKTKPTQHSVKELLNSGIQPDIIMCRCEKEINTESLEKISQFCNVKKDSVIPALNAKSIYEVPSIYSKAGLDKVLLEHLGYDSSKYPLNLKAWENLTKKINNLKEEVTIGVVGKYTNLKDSYKSLIEALTHGGIENNTNVKIHWINAEKTKTNELIKELESVDGILIPGGFGYRGVEGKISAIKFARENNIPFFGICLGMQLSVVEIARNVFGLADSNSTEFQSSKNPVVSLMTEWNNKNKIEKRDHTSEKGGTMRLGAYKAILKKNSKVSEIYNTNEITERHRHRYEVDLSLTKDFEKKGFVFSGMSPDNVLPEILESMNHKWFIGVQYHPELKSRPLAPHPLFSSFIKHCIK

SEQ ID NO: 196344 - protein, 195 aa, Unknown
  Bacterial polypetide isolated from the Sargasso Sea
MIPGGFGDRGIEGMIQSIEYARKNDIPFLGICLGMQAAVIEYARNVLDHKDANSTEFNSSTSAPVIAMITEWMNDDGSKENRDENSDLGGTMRLGAQECLFTKGTKAKDIYGADSVVERHRHRYEFNNRYREELEKNGLVFSGFSKDGLAEMIEIKDHPWFIGCQFHPEFTSSPLAGHPLFYSFIKAAVEYSKKD

SEQ ID NO: 196345 - protein, 538 aa, Unknown
  Bacterial polypetide isolated from the Sargasso Sea
MARYIFVTGGVVSSLGKGLSSASLAYLLQSRGYKVRLRKLDPYLNVDPGTMSPFQHGEVFVTDDGAETDLDLGHYERFSGVTAKKTDNITTGKIYSDVLRKERKGEYLGKTVQVIPHITDRIKEFIKFDTSKEDFIICEIGGIVGDIESLPFVEAIRQFSNDIGKKNALFIHLTLVPYLKASDEIKTKPTQHSVKELRSIGIQPDIIICRSERPIPLEHRKKISLFCNVDIKNVIETVDVKTIYEAPISFAREKLDVQVLDYFKIKSKKSNNLNPWKKITKITLNTKKQVNIAIIGKYVELKDAYKSLDEALTHGGITNKLKVNLVRIDSEKLKVSEIRNKLKNVSGILIPGGFGKRGTEGKIEAIKHARVNKIPFLGICYGMQMAIIEFARHKLKIKKATSSEFDKVGVHIIGLMNEWEKSGKKVKGTDKNLGGTMRLGSYDAILKDKSKIRDIYKSRLIKERHRHRYEVDVSYKEKFEKNGLVFSGLSPDNKLPEIIELKNHPWFIGVQFHPEFKSRPLSPHPLFSSFIKAAKNHK

SEQ ID NO: 196346 - protein, 538 aa, Unknown
  Bacterial polypetide isolated from the Sargasso Sea
MKKTKDTKYIFVLGGVMSGLGKGIAASSIGYLLKQADVSVTIMKLDPYLNVDPGTMNPYQHGEVFVLDDGSETDLDLGHYERFIDVNMTKNNNATAGQIYSKVLEQERKGEYLGETVQVIPHVTDEIKNRIRALNIPKKYDVVICEVGGTVGDIESLPFMEAIRQLSLEVGYHNHMFVHVTLLPFVKASGELKSKPTQHSVMKLREIGLAPDMILCRSEHPIDQSVRDKIALFCNVPSDHVIEGRDVSSIYEVPLTMYKQNAGQLIKERLKIEKTPQLGALKRFINNYNNPKHEVTIAMCGKYTELIDSYKSVLEAFVHAGVENNARVNIKWVQTDNIKNKVSARKAFSDVNGILILPGFGSRGGEGKIRSSQYARENKIPFLGICLGLQCAVIDFARNVCGLKNANSTEFNKNTKYPVIDLMESQRAIKIKGGTMRLGAYDCEIKPGTKTYAAYRKKNISERHRHRYEVNNRFRNRLEKYGLIFSGVNSDLGVIEAIEIKDHPWFVAGQFHPELKSRVNKAHPLFREFIRASKENIL

SEQ ID NO: 196347 - protein, 259 aa, Unknown
  Bacterial polypetide isolated from the Sargasso Sea
KNSDSKVTIAMVGKYVDFKDSYISLSEALRHAGFKNSMGVEIVYVESEDIQENGTDCLSEMDAILIPGGFGDRGIEGMIQSIEYARKNDIPFLGICLGMQAAVIEYARNVLDHKDANSTEFNSSTSAPVIAMITEWMNDDGSKENRDENSDLGGTMRLGAQECLFIKGTKAKDIYGADSVVERHRHRYEFNNRYREELEKNGLVFSGFSKDGLAEMIEIKDHPWFIGCQFHPEFTSSPLAGHPLFYSFIEAAVEYSKKN

SEQ ID NO: 196348 - protein, 477 aa, Unknown
  Bacterial polypetide isolated from the Sargasso Sea
MAKTKYIFITGGVVSSLGKGIAAASIGALLEARGLKVSLLKLDPYINVDPGTMSPFQHGEVFVTNDGTETDLDLGHYERFVRFEASKKNNFTAGIVYESVIKNERKGKYLGGTVQVIPHITDEIKRRIKAGAAGSDVAIVEIGGTIGDIESQPFVEAIRQMSLDLPSKSTSFVHLTLVPYINVSGELKTKPTQHSVKELRSLGIGPNCLICRSETELPKDEKKKIALFCSVDMSNVISMHDVDTVYSIPLLLHKQKVDEIVLKDLGLKTKKPNLNDWKKVVRAKLNPKKSVEVAMVGKYTELKDSYKSLNEALDHAGIKNNAKVNITFVEAEKLTKRNVKTKLKFADAVLVPGGFGSRGIEGMIIACEYARLKNIPYFGICLGMQIALIEFARNMLGLKGANSTEFDSKTNYPVVALITEWKDKTGKTERRTADSDLGGTMRLGGQTCILKKGSNVFRMYKKNEIVERHRHRYEVNP

SEQ ID NO: 196349 - protein, 137 aa, Unknown
  Bacterial polypetide isolated from the Sargasso Sea
MTKFVFVTGGVVSSLGKGIASASLAAILESRGLKVTLIKLDPYINVDPGTMSPFQHGEVFVTDDGAETDLDLGHYERFIETRMKKTNNFTTGKIYQSVLEKERRGDYLGKTVQVIPHVTNEIQEFIKRGAGIGTPDA

SEQ ID NO: 196350 - protein, 229 aa, Unknown
  Bacterial polypetide isolated from the Sargasso Sea
MKKKKQVKYIFVVGGVISGLGKGIAASSIGYLLKSAGLKVTILKLDPYLNVDPGTMNPYQHGEVFVLDDGSETDLDLGHYERFIDVDMSKNNNATTGQVYSTVLDRERKGDYLGDTIQVIPHITDEIKRRVKLVNDKNKYDIVICEVGGTVGDIESLPFMESIRQLSVELGYHNHLIVHVTLVPYIQASEELKTKPTQHSVMKLREIGLSPDIIMCRSSYSLSDSVAEK

SEQ ID NO: 196351 - protein, 149 aa, Unknown
  Bacterial polypetide isolated from the Sargasso Sea
MARYIFVTGGVVSSLGKGLSSASLAYLLKSQGYKVRLRKMDPYLNVDPGTMSPFQHGEVFVTDDGAETDLDLGHYERFTNISSKKSDNITTGRIYSDIIKKERRGGYLGKTVQVIPHITDRIKEFIKKDISDEDFVICEIGGTVGDIES

SEQ ID NO: 196352 - protein, 186 aa, Unknown
  Bacterial polypetide isolated from the Sargasso Sea
WFCKRGTEGKIAAIKYARLNNIPFFGICFGMQMAVIEAARNLLNIKNASTSEFGNNCTPVVGLLEEWQKGKKKIKGTEKNLGGTMRLGLYDAVLKNNSLISKIYSERRIKERHRHRYEVNIKYKNDFEKKGLIFSALSPDGTLPEIIELRDHPWFVGVQFHPEFKSRPFTPHPLFSSFIKAAGVKD

SEQ ID NO: 196353 - protein, 181 aa, Unknown
  Bacterial polypetide isolated from the Sargasso Sea
IQYLREEKVPFLGICLGLQCAVIEYARNVCGISDANSSEFSKNTSNYVIDLLPNQNLEKDDVGASMRLGTYPCKIKEGTLTSKIYKEEVIYERHRHRYEVNNKFKDELENHGLVISGMSPDNNLIEMIEIKDHPYFVASQFHPEFKSRPWDPAPMFKYFIEAASKRNNSTKKTIETQKVKD

SEQ ID NO: 196354 - protein, 234 aa, Unknown
  Bacterial polypetide isolated from the Sargasso Sea
LNHAGLKNRLTVHIKYIDSQDVESKGTDILSTVDAILVPGGFGERGVEGKIMAARYARENKVPYLGICLGMQVALIEYARNVAGMKDAHSTEFNMNTPYPVVGLITEWLDSDGNVEQRTDRSDMGGTMRLGSQNCNLKANTKAREIYGSDIVSERHRHRYEVNNNYVAQLEEAGLKISGLSADNQLVEMIEIPTHPWFVAGQFHPEFNSTPRDGHPLFQGFVAAAYKYQKQQLV

SEQ ID NO: 196355 - protein, 334 aa, Unknown
  Bacterial polypetide isolated from the Sargasso Sea
GLAPDMILCRSEYSIEKSVREKIALFCNVRSDHVFEGRDVQSIYEVPLVLDEQNMGTLINERLQLDKRPDLSPLKKFVHSYKNPDSEVLIAMCGKYTELIDSYKSVLESFVHAGVENNTRVNIKWVKTEKIIDDKTASRQFKNVDGILILPGFGSRGGEGKIMSSKFARENNIPFLGICLGMQCAIIDFARNVCGLEGANSTEFNKRTKHPVIDLMESQRAIKIKGGTMRLGAYDCNIKPGTKAFAAYRSKNVSERHRHRFEVNNRYRKKLQKGGLIISGVNEDLGVVETIEIAGHPWFVAGQFHPELKSRVNKSHPLFREFIKASKKYNKRRS

SEQ ID NO: 196356 - protein, 375 aa, Unknown
  Bacterial polypetide isolated from the Sargasso Sea
MTRFIFVTGGVVSSLGKGIASASLGAVLEARGLNLAMVKMDPYINVDPGTMSPFQHGEVFVTEDGAETDLDLGHYERFVRCGISSDSNYTAGQIYENVIQKERRGDYLGATVQVIPHVTDEIIRCIKRGAADAEVALVEIGGTVGDIESLPFLEAIRQMRVELGSENTLFIHLTLVPYIASAGEVKTKPTQHSVKELRSIGIQPDILLCRAQEAISSSERRKIALFTNVGEKAVISALDASNIYQIPENLHAEGLDDIVVEKLNLTVPPANLTNWKKVVSALKNPSNHVSIAMVGKYVDLTEAYKSLSESLVHAGIHTDTRVEIRYVDAEAIEKNGTNILEKVDGILVPGGFGERGIDGKVMAVTFARERQIPFS

SEQ ID NO: 196357 - protein, 502 aa, Unknown
  Bacterial polypetide isolated from the Sargasso Sea
PYINVDPGTMSPFQHGEVFVTADGAETDLDLGHYERFSTVKMTKENNFTTGSIYAEVIRKERRGEYLGATVQVIPHITDEIKRRIFEVGEGFDILIVETGGTAGDIESQPFLEAIRQMRMEVGKERSLFIHLSYVPTIRSAGEVKTKPTQHSVKELRSIGLQPDILVCRSEVPIPASAKQKIALFTNVEETAVVSMVDYKTTYQAPLVLHEEGLDEIVTRKMSLDAPTADLSDWVEVIDKELNPENQINLAFVGKYLDLLDAYKSLIEAIKHAGIHTSTRVNLQFLDAEELEQGNFDLLKSADAILVPGGFGSRGFEGKIAAARYARENRIPYLGICYGLHAVVIDIARNCVGLAGAHSAEISEEPEHPVIALITEWTDEEGTQEKRGEDSDLGGTMRLGEQACVINQGSLAERVYGTTVVRERHRHRYEVNNNYIADLEKAGLKIGGRSEDGELVEMVEIEDHPWFLACQFHPEFTSTPRQGHPLFIGFVEAGLQKSRVEK

SEQ ID NO: 196358 - protein, 541 aa, Unknown
  Bacterial polypetide isolated from the Sargasso Sea
MANTKYIFITGGVVSSLGKGIAAASIGALLESRGLSVSLIKVDPYINVDPGTMSPFQHGEVFVTEDGTETDLDLGHYERFVRFKASKKNNFTAGKVYETVIRNERKGNYLGGTVQVIPHITNEIKKRIKKGGQNKDIAIVEVGGTVGDIESQPFVEALRQMALELPNSSWAFVHLTLVPFINASGELKTKPTQHSVKELRSLGISPDVLVCRSEQELPKDEKNKIALFCSVPAKSVISMHDVDTVYSIPILLNKQKVDDTILKKLNLKIKKPNLNDWKRVVKAKLLPEKEVNVSFVGKYTELKDSYKSINEALEHAGIQNKAKVNINFVEAEQITSQNVRKVLKKSDAILVPGGFGERGIEGMILACKYARENNVPYLGICLGMQIAIIEYARNVLKLKSANSTEFDSSTKFPVIGLITEWSDISGKKEKRTKNSDLGGTMRLGGQVCKLKKKSNSYKMYKKSEIIERHRHRYEVNPNYKDKMIEQGLDVVGTSIDGKLVEMIELPSHKWFLACQFHPEFTSNPRDGHPIFNSYIKSTITK

SEQ ID NO: 196359 - protein, 545 aa, Unknown
  Bacterial polypetide isolated from the Sargasso Sea
MTTKYIFVTGGVVSSLGKGIAAASLAAILEARGLDVTIMKLDPYINVDPGTMSPTQHGEVFVTEDGAETDLDLGHYERFIRTKMTRRNNFTTGRIYADVLRKERRGDYLGATIQVIPHITNAIKERVIAGAEGHQVAIVEVGGTVGDIESLPFLEAIRQLAAEVGRNNAMFMHLTLVPYLAAAGEVKTKPTQHSVKELLSIGIQPDVLICRSDRAIPAVERAKIALFCNVPERAVISMKDVDSIYKIPALLKSQNLDSYFTERFGLECKEADLAEWEQVIYEEANPTAEVTIGMVGKYVSLPDAYKSVNEALKHGGLKTRLSVNIKYIDSQDIETRGAELLEGLDAILVPGGFGERGVEGKIQAAQYARENKIPYLGICLGMQVAMIEFARNVAGMEGAHSSEFKKDCAYPVVGLITEWVDDEGNVETRTEKSDLGGTMRLGSQLCHLVEGSKVRQMYGSPTIYERHRHRYEVNNKLLPQIEAAGLKVTGLSADKKLVEIIEIPDHPWFVAAQFHPEFTSTPRDGHALFAGFVKAAGEYQKRNLK

SEQ ID NO: 196360 - protein, 244 aa, Unknown
  Bacterial polypetide isolated from the Sargasso Sea
IALVGKYAEHRDAYKSIYEALDHGGIAHKTQVRVQPIKSEDIEREGAERLLGGFDGLIVPGGFGERGIEGKVEAISFAREHGIPFLGICLGMQCAVIDIARNLAGLGEAHSTEFVKDTPYPVIALMEEQHGVVAKGGTMRLGSQPCILSKNTKSSTAYGTEQITERHRHRYEFNSHFRKQLEAAGLVVAGTSPDDALVEIIEVVNHPWFVAVQFHPEFKSKPTSAHPLFSGLVAAAVERHAGNA

SEQ ID NO: 196361 - protein, 169 aa, Unknown
  Bacterial polypetide isolated from the Sargasso Sea
KDIPFFGICLGMQVAVIEFARNVLKIPANSTEFEKNTKNPVIALITEWMDEKGLKQRRNEYSDKGGTMRLGSQICFLEKNSNMSKMYKSLKISERHRHRYEFNNNYLEKIKGKGMKIAGRSKDKSLVEAIELKGHKWFVGCQFHPEFTSDPRSGHPLFNGFVRAAKLKK

SEQ ID NO: 196362 - protein, 199 aa, Unknown
  Bacterial polypetide isolated from the Sargasso Sea
NKLKNVSGILIPGGFGKRGTKGKIEAIKYARVNKIPFLGICYGMQMAIIEFARNQLKIRKATSSEFDKGGVHIIGLMHEWEKSGRKVKGTDKDLGGTMRLGSYDAILKDKSKIRDIYKSRLIKERHRHRYEVDISYKEKFEEKGLIFSGLSPDHRLPEIIELKNHPWFVGVQFHPEFKSRPLNPHPLFSSFIKAAKNHR

SEQ ID NO: 196363 - protein, 265 aa, Unknown
  Bacterial polypetide isolated from the Sargasso Sea
KPSIKQLQNFIRTYKNPDSEIKIAMCGKYTELHDAYKSITESFIHAGVENNTKVKVIWVNTEKIKSDKDAEKSFQGIDGILLPGGFGSRGAEGKILTSKFARENNIPFLGICLGLQCAVIDYARNVCKIDDANSSEFKPKSKNKVIDLMESQQAIKLKGGTMRLGSYDCEISTGTKAYSIYRKKTISERHRHRFEVNNKYVSKMKKNGLIFSGINKKLGVVEIIELKNHPWFIGCQFHPELKSRVDKAHPLFREFVKASLKNSKN

SEQ ID NO: 196364 - protein, 359 aa, Unknown
  Bacterial polypetide isolated from the Sargasso Sea
LIEQKTKPTQHSVKELREIGIQPNILLCRCDRSIEANEVDKIALFCNVKSEDVIQALDVKNIYNVPIVYHSEKLDVQVLRHFNIRPNKINLIKWKKIVLSANKVKRNINVGIVGKYTDLPDAYKSLNEALVHGGLINNVGINIHWINSENLNDKSIKNKFKNIHGIIVPGGFGERGISGKIKAIKYARLNKVPFLGICLGLQLAVIEFSKNVLNIRNANSSEFTNTENNVIGLLTEWYKDGKKEVRSKASDVGGTMRLGSYPCKLKKGSLAFKIYKKSIIHERHRHRYEVNSIYENKLMNKGMIFSGKSPDSMLPEIIEVSSHPWFLGVQFHPELKSRPFMPHPIFKSFIYAVKKVSKK

SEQ ID NO: 196365 - protein, 350 aa, Unknown
  Bacterial polypetide isolated from the Sargasso Sea
VVGEQKTKPTQHSVQELRRIGIQPDLLCVRCSMPLQDKTRNKISMFTNVTNNDVFSCHDVDSIFQVPEILYDQGLVDVIFKKFNKMGYVNASQNWDTWNKIVNSLHNEGDPINIAMVGKYVTLADSYVSVNHALKHAAASIGKKITIDWIDSENINGNVDTLSKYNGILVPGGFGTRGSEGIIKTANFAREQNIPYLGICFGFQLAAVSFARNVCSHTDANSTEIEQNTNNPIIDLLPEQDGITDMGGSLRLGANEINVKPDTIANKIYGQDKISKRHRHRYEFNTKYLEEFAQKGMIFSGESDEGRRMEILEIPSHKFFVGVQFHPEFNSRPGYPEHVFKAFTTAANQN

SEQ ID NO: 196366 - protein, 351 aa, Unknown
  Bacterial polypetide isolated from the Sargasso Sea
RRGDYLGATVQVIPHVTDEIRKSIVKGSQGYDVTIVEIGGTVGDIESLPFIEAIRQMGIYKDGYEVAYVHLTLVPYIKASSEIKTKPTQHSVRELRAIGIQPDALVCRSELPLPKEHFDKIALFTNVEKKAVISAHDAEDIYQIPLILREQCLDDIIVEKLKLDVPKADLTPWENVFKESKNSDSNVTIAMVGKYVDFKDSYISLSEALRHAGFKNSKGVEIVYVESEDIQENGTDCLSEMDAILIPGGFGDRGIEGMIQSIEYARKKDIPFLGICLGMQAAVIEYARNVLDHKDANSTEFNSSTSAPVIAMITEWMNNDGSKENRDENSDLGGTMRLGAQECLFAKGTKA

SEQ ID NO: 196367 - protein, 290 aa, Unknown
  Bacterial polypetide isolated from the Sargasso Sea
KLILVTAISPTPAGEGKTTTSVGLLDGLCHIGKKAMVCLREPSLGPCFGMKGGAAGGGYAQVIPMTDINLHFTGDFHAIGAAHNLLSALIDNHIHWENQLDIDPRRITWKRVVDMNDRSLRDITCGLGGTGNGVPRQSGYDITVASEIMAVFCLASDFDDLQKRIGNIVIGYTRSNKPIRAKELNADGAITALLKDAFQPNLVQTLENNPAFIHGGPFANIAHGCNSVVSTKTALKLVDYVVTEAGFGADLGAEKFFDIKCRKSGLEPDAVVLVATTKALKMHGGIKKED

SEQ ID NO: 196368 - protein, 331 aa, Unknown
  Bacterial polypetide isolated from the Sargasso Sea
VDLNDRSLRKIKINLEQLKANTPRDDSFDITVASEVMAIFCLSNDINELERKIGNITVAYTKSKKPIYAKDLNAHGPMTVLLKEAIRPNAVQTLENNLAIIHGGPFANIAHGCNSILATKTALKLSEYVITEAGFGADLGAEKFLNIKCRKAGIQPKCVVLVATIRALKMHGGEEKDNLKLENLDALKKGLPNLKRHIENIKKFGLDLVVAINHFKTDTEKEVQIIEKYCNDLNVQVSLCTHWANGGKGTKDLANKVVKLCNEAKKTKFNFIYDDKISLLEKIETVANKIYRASSVEISDTIKQQLSKLEQAGYSKFPICIAKTQYSFSVD

SEQ ID NO: 196369 - protein, 322 aa, Unknown
  Bacterial polypetide isolated from the Sargasso Sea
DLEDLERRLGNITVAYTRERKPIFAKDLNAHGPMTVLLKEALMPNLVQTLENNPAIIHGGPFANIAHGCNSIIATKTSLDLSDYVVTEAGFGADLGAEKFLDIKCRKGNLAPSVVVLVATIRALKMHGGVDKKDLQTENIKAVVDGTSNLKRHIENIQKFGLPVVVAVNHFVADTDKEVEALKDECKKLNIDAITCKHWANGGEGTVDLAEKVVELAEEKNNFKYIYEDDLPLIEKVRKIAKEIYRADDVIADKKILDQLAQFEEAGYAKFPICIAKTQYSFSTDPNNKGAPINHSIPIREVRLSSGAEFIVVICGEIMTMP

SEQ ID NO: 196370 - protein, 314 aa, Unknown
  Bacterial polypetide isolated from the Sargasso Sea
GGYAQVVPMEDINLHFTGDFHAIGAANNLLAAMIDNHIYWGNSLQLDERRIAWRRAVDMNDRALRSIVGSLGGVANGFPRSDGFDIVVASEIMAIFCLATSLEDMQRRLGNIIVGYTRERKPVYARDLEADGAMTVLLKDALAPNLVQTLENNPAFIHGGPFANIAHGCNSVMATQVGLKLADYVVTEAGFGADLGAEKFFDIKCRKAGLQPATAVVVGTIRALKMHGGVAREDLGKENVEAVRKGVSNIERHVVNTQQFGLPVIVALNRFITDTDAEVEAVKDILAEHGVEAIPCSHWSDGGAGAEDLAHKVV

SEQ ID NO: 196371 - protein, 304 aa, Unknown
  Bacterial polypetide isolated from the Sargasso Sea
MKGGAAGGGYAQVVPMEQINLHFTGDFHAITSAHNLLSALIDNHIYWGNKLDIDVRRIVWKRVMDMNDRSLRSININLGGVANGFPREDGFDITVASEIMAIFCLSNDLEDLEKRIGNITIAYTRDKKPVYAKDLKAHGPMTVLLKDAIRPNVTQTLENNPAIIHGGPFANIAHGCNSVIATKTGLKLADYVVTEAGFGADLGAEKFLDIKCRKSNLKPSCVVIVATIRALKMHGGLAKDDLKNENVDALKKGLVNLERHIENVKKFGLPVAIAVNHFINDTDNEVKALIDFCETLGVKASLCT

SEQ ID NO: 196372 - protein, 272 aa, Unknown
  Bacterial polypetide isolated from the Sargasso Sea
VMAIFCLSNDLKDLERRLGNITVAYTKNKKPIFAKDLKAEGPMTVLLKQALMPNLVQTLENNPAIIHGGPFANIAHGCNSVIATKTSLKIADYVVTEAGFGADLGAEKFLNIKCRKSDLKPSAAVIVATVRALKMHGGVTKDNLTIENIDALKLGISNLKRHINNIKKFGLPAIVAINHFIADTEKELKLLQDECSKIGIEAVICKHWSEGGEGAKELAKKVVDIVDKKTVFNFLYEDKSPLIEKIKKIALEIYAADEVIADNKIRSQLKTI

SEQ ID NO: 196373 - protein, 214 aa, Unknown
  Bacterial polypetide isolated from the Sargasso Sea
FDITVASEIMAIFSFSNDLKDLEKRIGNITVAYTREKKPIYAKDLNAQGPMTVLLKDAIRPNVTQTLENNPAIIHGGPFANIAHGCNSVLATKTGLKLSDYVVTEAGFGADLGAEKFLDIKCRKSGLKPDCVVIVSTVRALKMHGGLNKDELKNENVDALNKGLVNLERHINNIKKFKLPVTVAINHFVLDTENEINSIINFCKKINVKASVCK

SEQ ID NO: 196374 - protein, 289 aa, Unknown
  Bacterial polypetide isolated from the Sargasso Sea
MQVPANKISIDEVAATIDITDKDLIKFGDDKAKISSSLIEKLKKNEDGKLILVTAISPTPAGEGKTTTSVGLVDGLCHIGKKAMICLREPSLGPCFGMKGGAAGGGYAQVIPMTDINLHFTGDFHAIGAAHNLLSALIDNHIHWDNQLNIDPRRITWKRVVDMNDRSLRDITCGLGGTGNGIPRQSGFDITVASEIMAVFCLASDIDDLQKRIGNIVIGYTKDNEPVRANQLKADGAITALLKDAFKPNLVQTLENNPAFMHGGPFANIAHGCNSVVSTKTALKLADYV

SEQ ID NO: 196375 - protein, 280 aa, Unknown
  Bacterial polypetide isolated from the Sargasso Sea
AHGCNSLVATQTALKLSDYVVTEAGFGADLGAEKFLDIKCRKGKLNPSAIVIVATVRALKMHGGMDKKELKNENVEAVKNGLSNLKQHIANMQIYGSPVTVAINHFITDTEKELSAIRECCELLNVKSFNCTHWSNGGAGTEDLANHIVNITNEDAPKIKHLYPDEMKLWDKMKKIAQEIYGASDIIADQKIMLQFEELQKKYGHYPICVAKTQYSFSTDPNLRGAPKEHVVPIREVRLAAGAEFLVVVCDKIMTMPGLPRVPAANAIHLNQNGDIEGLF

SEQ ID NO: 196376 - protein, 319 aa, Unknown
  Bacterial polypetide isolated from the Sargasso Sea
SIKDLKTRLGKIVIAYTREKKPILASDINAHGAMTVLLKDAMKPNLVQTLENNPAMIHGGPFANIAHGCNSVIATKASLKLADYVVTEAGFGADLGAEKFLDIKCRKANIKPSVVVLVATIRALKYHGGCSLDKLNYESTEYLSKGLSNLERHIHNLKNNFGLPVVVGINGFSFDTEKEKELLKAKSNELNVPIVSSTHWANGGKGAEELAKAVVNEIENAENNFEYLYPDDMPLWDKMETIAKKIYGASTISAPANIKKQIDELQKNGYGNFPVCVAKTQYSFSTDPTLRGAPSNHEIPIREVRLSAGAEFIVMVWEI

SEQ ID NO: 196377 - protein, 243 aa, Unknown
  Bacterial polypetide isolated from the Sargasso Sea
TVLLKEALRPNVTQTLEHNPAIIHGGPFANIAHGCNSVIATKTALKLSDYVVTEAGFGADLGAEKFLNIKCRKSKLVPSCVVIVATVRALKMHGGLEKDNLKKENIPALKNGLVNLERHISNIKKFGLEPVVAINHFVLDTNNEIKEIKKFCDNIGVQVSVSSHWANGGKGATDLAKKVIKICKDSNKNNFKYLYTEKLSPWKKIEKIAKEIYGAKTVTAPTEVMDDLRKFELNGYGNLPVCI

SEQ ID NO: 196378 - protein, 284 aa, Unknown
  Bacterial polypetide isolated from the Sargasso Sea
GPFANIAHGCNSIIATKTALKLSEYVITEAGFGADLGAEKFLDIKCRKAGLIPSCVVLVATIRALKMHGGVEKDDLKNEDLDALKKGMSNLERHIQNIKKFGLDVVVAINHFITDTDKEFKIIQEQCTKLGIKASLCTHWSDGGEGMKDLANNVVDLCKKNDTSKFKYLYSDKISILEKVEKIAKEIYSAKGIEVDEKIKEQVKKIEQAGFGKFPVCIAKTQYSFSTDPKLKGAPSGHTLLIREVRLSSGAEFVVVVCGSIMTMPGLPRNPSASNIKLNKKGEI

SEQ ID NO: 196379 - protein, 305 aa, Unknown
  Bacterial polypetide isolated from the Sargasso Sea
KQSLVCLREPSLGPCFGVKGGAAGGGYAQVVPMDKINLHFTGDFHAITSAHNLLASMIDNHIYWGNDLNIDTRRIVWGRVVDLNDRALRNTNINLGGIANGFPREDKFDITVASEVMAIFCLSTSLSDLQKRLGNIIIGYTRDKKEIKARDVNADGAMTTLLKDAFLPNLVQTLEENPAIIHGGPFANIAHGCNSLIATQTALKLSDYVVTEAGFGADLGAEKFLDIKCRKGNLNPSAIVIVATVRALKMHGGMDKKELKNENLDALRKGLSNLQQHISNMKKYGVPVSVAINHFITDTDNGTLN

SEQ ID NO: 196380 - protein, 303 aa, Unknown
  Bacterial polypetide isolated from the Sargasso Sea
KIKPEYLETLKNKKDGKLILVTAITPTPAGEGKTTTSVGLCDGLNKIGKKSVVCLREPSLGPSFGMKGGAAGGGYAQVVPMEQINLHFTGDFHAITSAHNLLAALIDNHIYWGNKLNIDVRRVVWKRVMDMNDRSLRSININLGGVANGYPREDGFDITVASEIMAIFCLSNDLKDLENRIGNITIGYTRDKKPIYAKDLNANGPMTVLLKDAIRPNVTQTLENNPAIIHGGPFANIAHGCNSVIATKTGLKLSDYVVTEAGFGADLGAEKFLDIKCRKSGLKPDCVVIVATIRALKMHGGVK

SEQ ID NO: 196381 - protein, 301 aa, Unknown
  Bacterial polypetide isolated from the Sargasso Sea
MGRHIAKINLEYLDQQKDKKDGKLILVTAITPTPAGEGKTTTSVGLNDGLNKIGKKSIVCLREPSLGPSFGMKGGAAGGGYAQVVPMEQINLHFTGDFHAITSAHNLLSALIDNHIYWGNKLNIDVRRVVWKRVMDMNDRSLRSIVVDLGGVANGYPRQDGFDITVASEIMAIFCLANDLKDLENRIGNITIAYTRDKKPIYAKDLNAQGPMTVLLKDAIRPNVTQTLENNPAIIHGGPFANIAHGCNSVIATKAGLKLADFVVTEAGFGADLGAEKFLDIKCRKSGIKPDCVVIVATIRA

SEQ ID NO: 196382 - protein, 260 aa, Unknown
  Bacterial polypetide isolated from the Sargasso Sea
MTVLLKEAIRPNVTQTLENNPAIIHGGPFANIAHGCNSVIATKAGLKLSEYVVTEAGFGADLGAEKFLDIKCRKSGIKPDCVVIVATIRALKMHGGVAKDDLKKENVDALKKGLVNLERHINNTRKFGLPVTIAVNHFITDSDKEMNALLDFCKTQGVKASKCTHWSNGGEGTKELAKNVVEICEENKNTFKYLYEDKLPLFKKIEKIAQEIYHASEVVADTKTRQQLKDFEEKGYGNLPVCIAKTQYSFSTDPNLKGAP

SEQ ID NO: 196383 - protein, 269 aa, Unknown
  Bacterial polypetide isolated from the Sargasso Sea
NKLNIDVRRVVWNRVMDMNDRSLRSIVVDLGGVANGYPRQDGFDITVASEIMAIFCLSKNLKDLENRIGNITIGYTRDKKPIYAKDLKAQGPMTVLLYRAFRPNVVQTLENNPAIIHGGPFANIAHGCNSLLATKTALKLSDYVVTEAGFGADLGAEKFINIKCRKSGLKPSCIVIVATIRALKMHGGLDKHQLKKENMSALIKGMINLERHINNMKKFGVPVTVAINKFVNDTRKEENAVIDFCKSMGIKANLCTHWSEGSKGTRELA

SEQ ID NO: 196384 - protein, 265 aa, Unknown
  Bacterial polypetide isolated from the Sargasso Sea
VANGFPREDGFDITVASEIMAIFCLSNDLHDLENRIGNITVAYTRDKKPIYAKDLNAHGPMTVLLKDAIRPNVTQTLENNPAIIHGGPFANIAHGCNSVLATKTALKLSNYVVTEAGFGADLGAEKFLDIKCRKSGLKPSCVVIVATIRALKMHGGVKKDELKNENVDAVKKGLVNLERHIENIQKFGLPVTVAINHFVLDTDKEIDEVTKFCEQKDIKASISKHWEKGGEGAIDLANDVVKQCEKDSNFKFLYDDKTSLFKKIE

SEQ ID NO: 196385 - protein, 284 aa, Unknown
  Bacterial polypetide isolated from the Sargasso Sea
SVGLSDGLNKIGKKSIVCLREPSLGPSFGMKGGAAGGGYAQVVPMEQINLHFTGDFHAITSAHNLLSALIDNHIYWGNKLNIDVRRVVWKRVLDMNDRALRSININLGGVANGFPREDGFDITVASEIMAIFCLSNDLHDLEKRIGNITVAYTRDKKPIYAKDLNAQGPMTVLLKDAIRPNVTQTLENNPAIIHGGPFANIAHGCNSVLATKTALKLSDYVVTEAGFGADLGAEKFLDIKCRKSDLKPNCVVIVATIRALKMHGGLNKDELKTENVDALKKGLV

SEQ ID NO: 196386 - protein, 296 aa, Unknown
  Bacterial polypetide isolated from the Sargasso Sea
TNSLSKNNDGKLILVTAISPTPAGEGKTTTSVGLVDGLCHIGKKAMICLREPSLGPCFGMKGGAAGGGYAQVIPMTDINLHFTGDFHAIGAAHNLLSALIDNHIHWSNELNIDPRRITWKRVVDMNDRSLRDITCGLGGTGNGIPRQSGFDITVASEIMAVFCLASDIDDLQKRIGNIVIGYTRSNEPVRAKELNADGAITALLKDAFQPNLVQTLENNPAFMHGGPFANIAHGCNSVVSTKTALKLADYVVTEAGFGADLGAEKFFDIKCRKSGLKPDAVVLVATHQALKMHGGI

SEQ ID NO: 196387 - protein, 298 aa, Unknown
  Bacterial polypetide isolated from the Sargasso Sea
FIGMKGGAAGGGYAQVVPMEQINLHFTGDFHAITSAHNLLSALIDNHIYWGNKLNIDVRRIVWKRVLDMNDRALRSININLGGVANGFPREDGFDITVASEIMAIFCLSNDLHDLENRIGNITVAYTRDRKPIYAKDLNAHGPMTVLLKDAIRPNVTQTLENNPAIIHGGPFANIAHGCNSVLATKTALKLSDYVVTEAGFGADLGAEKFLDIKCRKSGLKPSCVVIVATIRALKMHGGVNKDELKNENIDAVKKGLVNLERHIENIQKFGLPVTVAINHFVLDTDKEVDEVIKFVNK

SEQ ID NO: 196388 - protein, 290 aa, Unknown
  Bacterial polypetide isolated from the Sargasso Sea
FGVKGGAAGGGYAQVVPMDKINLHFTGDFHAITSAHNLLSSMIDNHIYWGNQLGIDVRRVVWGRVVDLNDRALRNINVNLGGVANGYPREDNFDITVASEVMAIFCLSTDLKDLQERLGNIIIGYTKDRNEIRARDINADGAMTTLLKDAFLPNLVQTLEKNPAIIHGGPFANIAHGCNSLVATQTALKLSDYVVTEAGFGADLGAEKFLDIKCRKGDLSPSAITIVATVRALKMHGGMDKKDLKNENIEALKNGLTNLEQHITNMQKYGVPVTVAINQFITDTNDELAV

SEQ ID NO: 196389 - protein, 269 aa, Unknown
  Bacterial polypetide isolated from the Sargasso Sea
NINLGGVANGYPREDGFDITVASEIMAIFCLSNDLKDLEKRIGNITIGYTRDKKAIYAKDLNAQGPMTVLLKDAMRPNVTQTLENNPAIIHGGPFANIAHGCNSVIATKTGLKLADYVVTEAGFGADLGAEKFLDIKCRKSGIKPSCVVIVATIRALKMHGGVAKDELKKENIEALKKGLVNLERHIINIRKFGLPVAVAVNHFITDTDKEVKALIDYCKTLNVKATLCTHWSNGGEGTKELAKDVVELCEKGENKFKFLYEDKAPLFK

SEQ ID NO: 196390 - protein, 301 aa, Unknown
  Bacterial polypetide isolated from the Sargasso Sea
MGLGISDEYLELYGKYKSKVNLSINKEKLKSKKDGKLILVTAISPTPAGEGKTTTSVGLVDGLCHIGKKAMICLREPSLGPCFGMKGGAAGGGYAQVIPMTDINLHFTGDFHAIGAAHNLLSALIDNHIHWDNELNIDPRRITWKRVVDMNDRSLRDITCGLGGTGNGVPRQSGYDITVASEIMAVFCLASDIEDLKKRIGNIVIGYTKSNEPVRAKQLNADGAITALLKDAFQPNLVQTLENNPAFIHGGPFANIAHGCNSVVSTKLALKLADYVVTEAGFGADLGAEKFFDIKCRKSDL

SEQ ID NO: 196391 - protein, 288 aa, Unknown
  Bacterial polypetide isolated from the Sargasso Sea
TPALIHGGPFANIAHGCNSLTATRVGLSLGDVVVTEAGFGADLGAEKFFDIKCRFGNLNPEAAVVVATVRAIKMNGGKSKDDLGHEDVEAVRRGFVNLEAHANNVRKFGVPPVVAINRFVTDTDAEIAVLLDGCAEMGVRAVVADPWGEGGAGCLDLADAVWEILTSGEAAYAPLYPNDMGLIEKMETVAQEIYGAEGLDIHPTAAKEIAVLEEAGMRDSPVCIAKTQYSFSDDPALLGRPSGFRIHVREVTPSAGAGFVVAKTGAIMTMPGLGAVPSAMGVDLIDGV

SEQ ID NO: 196392 - protein, 295 aa, Unknown
  Bacterial polypetide isolated from the Sargasso Sea
YAQVVPMEDINLHFTGDFHAISVAHNLLSALIDNHIYWGNKLGFDARRVAWRRVVDMNDRALRQINCNLGGIANGFPREDGFDITVASEIMAIFCLAKDLNDLTKRVGNIVVGYTKGRKPIRASQLKGHGPISVLLRDALMPNLVQTLENNPAFIHGGPFANIAHGCNSVVATKAALKLSDYVVTEAGFGADLGAEKFLNIKCRKAGLTPSAIVLVATVRALKMHGGVSKQDLSKENVQAVKKGCENLGRHIKNLRLFGVPVVVAINQFVADTKKELKVVRETAKVFGVEAIVAS

SEQ ID NO: 196393 - protein, 315 aa, Unknown
  Bacterial polypetide isolated from the Sargasso Sea
SNEPIYAKDLNAQGPMTVLLKEAIRPNVTQTLENNPAIIHGGPFANIAHGCNSVIATKTALKLSDYVVTEAGFGADLGAEKFMDIKCRKSNLKPSCVVIVATIRALKMHGGVEKENLKNENIEALKKGLVNLERHIKNVKKFGVEVIVAINHFIMDTENEIKILKEYCENIGIKVNKCTHWSDGGEGTKDLAKNVVEICDNSDPKDFKFLYDEKETLWNKVEKIAKEIYKAGNITADEKVKEQLKIFEKNGYGKLPVCIAKTQYSFSVDPKLKGAPSGHEIPIREVRLSSGAEFIVVVCGSIMTMPGLPRVPAAD

SEQ ID NO: 196394 - protein, 322 aa, Unknown
  Bacterial polypetide isolated from the Sargasso Sea
LHFTGDFHAITSAHNLLSALIDNHIYWGNKLNIDVRRIVWKRVMDMNDRSLRSIVVDLGGVANGYPRQDGFDITVASEIMAIFCLSNDLKDLENRIGNITVAYTRDKKPIYAKDLNAQGPMTVLLKDAIRPNVTQTLENNPAIIHGGPFANIAHGCNSVIATKTGLKLADYVVTEAGFGADLGAEKFLDIKCRKSNLKPDCVVIVATIRALKMHGGVAKDDLKNENVKALNKGLVNLERHINNIRKFGLPVVVAVNHFITDTDKEVNALMDFCKTLGVKSSICKHWSDGGEGTKDLANIVVDICNNKNTFKFLYEDKLPLLK

SEQ ID NO: 196395 - protein, 333 aa, Unknown
  Bacterial polypetide isolated from the Sargasso Sea
ALLAGDLLKLSQWEDINLHFTGDFHAIGAANNLLAAMIDNHIYWGNALELDERRIAWRRALDMNDRALRSIVGSLGGVANGFPRSDGFDIVVASEIMAIFCLATSLEDMQRRLGNIIVGYTRARKPVYARELEADGAMTVLLKDALAPNLVQTLENNPAFIHGGPFANIAHGCNSVMATQIGLKLADYVVTEAGFGADLGAEKFFDIKCRKAGLKPAAAVVVGTVRALKMHGGVAREDLGEENIEAVRRGISNIERHVLNTQQFGVPVIVALNRFITDTDAEVEAVKQALASHGVEAVTCTHWSDGGAGAEDLAHKVVELADSGVANFKPLYP

SEQ ID NO: 196396 - protein, 269 aa, Unknown
  Bacterial polypetide isolated from the Sargasso Sea
KYKSKVNLSIHKEKLKSKKDGKLILVTAISPTPAGEGKTTTSVGLVDGLCRIGKKAMICLREPSLGPCFGMKGGAAGGGYAQVIPMTDINLHFTGDFHAIGAAHNLLSALIDNHIHWDNELNIDPRRITWKRVVDMNDRSLRDITCGLGGTGNGIPRQSGYDITVASEIMAVFCLASDIEDLKKRIGNIVIGYTKSNEPVRARQLKADGAITALLKDAFQPNLVQTLENNPAFIHGGPFANIAHGCNSVVSTKLALKLADYVVTEAGFG

SEQ ID NO: 196397 - protein, 283 aa, Unknown
  Bacterial polypetide isolated from the Sargasso Sea
MGGPFANIAHGCNSVIATKTGLKLADYVVTEAGFGADLGAEKFLDIKCRKSNLKPDCVVIVATIRALKMHGGVAKDDLKNENVEALNKGLVNLERHINNTKKFGLSVVVAVNHFITDTNKEVDALMSFCKTLSVKSSICKHWSDGGEGTKDLANIVVEICNNKNTFKFLYEDKMPLFKKIETIAQEIYHASEVVADTKIRDQLKDFESKGYGNLPICIAKTQYSFSTDPSLKGAPSGHVVPIREVRLSSGAEFIVVVCGAIMTMPGLPRVPAADSIKLMKKVK

SEQ ID NO: 196398 - protein, 319 aa, Unknown
  Bacterial polypetide isolated from the Sargasso Sea
IDEIAKVLGIDHNGLIKFGDDKAKLNSNFIDSVSNNENGKLILVTAISPTPAGEGKTTTSVGLVDGLCHIGKKAMICLREPSLGPCFGMKGGAAGGGYAQVIPMTDINLHFTGDFHAIGAAHNLLSALIDNHIHWDNELNIDSRRITWKRVVDMNDRSLRDITCGLGGTGNGIPRQSGFDITVASEIMAVFCLASDIEDLQNRIGNIVIGYSKSNEPIRAKQLNADGAITALLKDAFQPNLVQTLENNPAFMHGGPFANIAHGCNSVVSTKTALKLADYVVTEAGFGADLGAEKFFDIKCRKSGLKPDAVVLVATTKAL

SEQ ID NO: 196399 - protein, 280 aa, Unknown
  Bacterial polypetide isolated from the Sargasso Sea
GPSFGMKGGAAGGGYAQVVPMEQINLHFTGDFHAITSAHNLLSALIDNHIYWGNKLNIDVRRIVWKRVMDMNDRSLRSIVVDLGGIANGYPRQDGFDITVASEIMAIFCLAKDLKDLENRIGNITIGYTRDKNPICAKDLNAQGPMTVLLKDAIRPNITQTLENNPAIIHGGPFANIAHGCNSVIATKTALKLSDYVITEAGFGADLGAEKFINIKCRKSELKPDCVVIVATIRALKMHGGVLKDELKNENLDALKKGIVNLERHINNVRKFGLPVGLLL

SEQ ID NO: 196400 - protein, 292 aa, Unknown
  Bacterial polypetide isolated from the Sargasso Sea
MEQINLHFTGYFHAITSAHNLLSALIDNHIYWGNKLNIDVRRVVWKRVMDMNDRSLRSIVVDLGGVANGYPRQDGFDITVASEIMAIFCLATDLKDLETRIGNITIGYTRDKKAVYAKDLKAQGPMTVLLKEAIRPNVTQTLENNPAIIHGGPFANIAHGCNSVIATKAGLKLADYVVTEAGFGADLGAEKFLDIKCRKSGIKPDCVVIVATIRALKMHGGVPKDELKNENVDALKKGLVNLERHVNNTRKFGLPVTIAVNHFITDTEKEMNTLLDFCKTQGVKASKCTHWS

SEQ ID NO: 196401 - protein, 291 aa, Unknown
  Bacterial polypetide isolated from the Sargasso Sea
YSRRSICNIAHGCNSVIATKTALKLSDYVVTEAGFGADLGAEKFLNIKCRKSKLVPSCVVIVATVRALKMHGGLEKDNLKKENIPALKKGLVNLERHISNIKKFGLEPVVAINHFVLDTNNEIKEIKKFCGNIGVEVSVSSHWANGGKGATDLAKKVIKICKNSNKNNFKYLYTEKLSPWKKIEKIAKEIYGAKNITAPTEVKNDLRKFELNGYGNLPVCIAKTQYSFSVDPKLKGAPQNHEIPIREVRLSSGANFIVVVCGSIMTMPGLPRIPAADKIKLNKKGETEGLF

SEQ ID NO: 196402 - protein, 281 aa, Unknown
  Bacterial polypetide isolated from the Sargasso Sea
MDMNDRSLRSIVVDLGGVANGYPRQDGFDITVASEIMAIFCLSNDLEDLENRIGNITVAYTRDKKPIYAKDLNAQGPMTVLLKDAIRPNVTQTLENNPAIIHGGPFANIAHGCNSVIATKTGLKLADYVVTEAGFGADLGAEKFLDIKCRKSNLKPDCVVIVATIRALKMHGGIVKENLKNENIEALKKGLVNLERHINNVRKFGLPVAVAINHFITDTNNEVDALMDFCKTLGVKSSICKHWSNGGEGAKDLANIVVDISNSKNTFKFLYEDKMPLFKKS

SEQ ID NO: 196403 - protein, 295 aa, Unknown
  Bacterial polypetide isolated from the Sargasso Sea
QGDFHAISSAHNLLSALIDNHIYWGNKLNIDVRRIVWKRVIDMNDRSLRSIVVDLGGVANGYPREDGFDITVASEIMAIFCLSNDLKDLENRIGNITVAYTRDKKPIYAKDLNAQGPMTVLLKDAIRPNITQTLENNPAIIHGGPFANIAHGCNSVIATKTGLKLADYVVTEAGFGADLGAEKFLDIKCRKSNLKPDCVVIVATIRALKMHGGVAKDDLKNENIKALNKGLVNLERHINNIKKFGLPVAVAINHFITDTNKEVNALMDFCRTLGVKSSICKHWSDGGDGTKIWQI

SEQ ID NO: 196404 - protein, 277 aa, Unknown
  Bacterial polypetide isolated from the Sargasso Sea
WLQNQSKKKNAKLILVTAINPTPAGEGKTTTSVGLNDGLNAIGKKSIVCLREPSLGPCFGMKGGAAGGGYAQVVPMEDINLHFTGDFHAITSAHNLLSAMIDNHIYWGNKQEIDPRRVTWKRVLDMNDRALRNIVVSLGGVSNGFPRESGFDITVASEIMAIFCLSENLEDLEKRLGDIIIGYRKDKSPVFCRDIGADGAMTVLLKEALQPNLVQTLENNPAFIHGGPFANIAHGCNSVVATRAGLELGDYVITEAGFGADLGAEKFLNIKCRKANL

SEQ ID NO: 196405 - protein, 302 aa, Unknown
  Bacterial polypetide isolated from the Sargasso Sea
VTQTLENNPAIIHGGPFANIAHGCNSIIATKTALKLSEYVVTEAGFGADLGAEKFLDIKCRKAEIQPDCVVIVATIRALKMHGGIEKEDLKKENLDALKKGLPNLEKHINNVKKFGLELVVAINHFITDSDKEVKLIQEYCTKLGVKVSLCTHWSDGSKGTEDLAKNVVEICKKNNKDNFKYLYKDEMPILKKVETIAKEIYGASGIEFDDKVKEQVSIIEKSGFSKFPVCIAKTQYSFSTDPKLKGAPSGHTLPIREIRLSSGAGFVVAICGAIMTMPGLPRVPAADSIKLNKKGEIEGLF

SEQ ID NO: 196406 - protein, 318 aa, Unknown
  Bacterial polypetide isolated from the Sargasso Sea
MLEEWFGKRVMDMNDRSLRSININLGGVANGYPREDGFDITVASEIMAIFCLSNDLKDLENRIGNITIAYTRDKKPIYAKDLNAQGPMTVLLKDAIRPNITQTLENNPAIIHGGPFANIAHGCNSVIATKTGLKLSDYVVTEAGFGADLGAEKFLDIKCRKSGLKPDCVVIVATIRALKMHGGVKKEDLKKENVDALKKGLVNLERHINNIKKFNLPVAVAVNHFITDTDNEVNKLIDFCNNLKVKASLCTHWSNGGEGTKELAKNVSEICDKNENKFKFLYEDKTSLFKKIETIAKEIYHASEVVADTKIRDQLKDF

SEQ ID NO: 196407 - protein, 289 aa, Unknown
  Bacterial polypetide isolated from the Sargasso Sea
MTDINLHFTGDFHAIGAAHNLLSAVIDNHIHWENQLGIDPRRITWKRVVDMNDRALRDITTGLGGPGNGIPRQGGFDITVASEIMAVFCLATDLDDLQKRIGNIVIGYTRKKEPVKVSQLDVQGAMTVLLRDAFQPNLVQTLENNPALMHGGPFANIAHGCNSVIATKTALKMADYVVTEAGFGADLGAEKFFDIKCRKAGLHPDAVVLVATTKALKMHGGIDKSNLSAENVDAIKKGCENLGRHIRNIGQYGVPVTVGINGYVTDTENEHLAIIDYCKQFDVECKIST

SEQ ID NO: 196408 - protein, 285 aa, Unknown
  Bacterial polypetide isolated from the Sargasso Sea
NLHFTGDFHAITSAHNLLSALIDNHIYWGNKLNIDVRRIVWKRVMDMNDRSLRSIVVDLGGVANGYPRQDGFDITVASEIMAIFCLAKNLKDLEEKIGNITVAYTRDKKPIYAKDLNAQGPMTVLLKDAIRPNVTQTLENNPAIIHGGPFANIAHGCNSVIATKTALKLSDYVITEAGFGADLGAEKFINIKCRKSGLKPDCVVIVATIRALKMHGGMQKEDLKKENVDALKKGLVNLERHINNVRKFGLPVVVALNHFITDTNKEVNFLVDFCKNLGVKIALCT

SEQ ID NO: 196409 - protein, 331 aa, Unknown
  Bacterial polypetide isolated from the Sargasso Sea
KKQPPSVGLVDGLCNIGKKAMICLREPSLGPCFGMKGGAAGGGNAQVIPMTDINLHFTGDFHAIGAAHNLLSALIDNHIHWDNELNIDPRRITWKRVVDMNDRSLRDITCGLGGTGNGIPRQSGYDITVASEIMAVFCLASDLDDLQTRVGNIVIGYTKNNEPVRAKQLNADGAITALLKDAFQPNLVQTLENNPAFMHGGPFANIAHGCNSVVSTKTALKLADYVVTEAGFGADLGAEKFFDIKCRKSGLKPDVVVLVATTKALKMHGGVKKDELSLENIDAVLKGCENLGKHIENISKFGVPVVVGINDYVTDTKNEHEQIINFCKNLG

SEQ ID NO: 196410 - protein, 311 aa, Unknown
  Bacterial polypetide isolated from the Sargasso Sea
GEGKTTTSVGLNDGLNKIGKKSIVCLREPSLGPSFGMKGGAAGGGYAQVVPMEQINLHFTGDFHAITSAHNLLSALIDNHIYWGNKLNIDVRRVVWKRVMDMNDRSLRSIVVDLGGVANGYPRQDGFDITVASEIMAIFCLANDLKDLENRIGNITIAYTRDKKPIYAKDLNAQGPMTVLLKDAIRPNVTQTLENNPAIIHGGPFANIAHGCNSVIATKAGLKLADFVVTEAGFGADLGAEKFLDIKCRKSGIKPNCVVIVATIRALKMHGGVSKDELKNENVDALNKGLVNLERHINNTRKFGIPVTIAV

SEQ ID NO: 196411 - protein, 314 aa, Unknown
  Bacterial polypetide isolated from the Sargasso Sea
SMAVLLKDALMPNLVQTLEHTPAFVHGGPFANIAHGCNSIIATDAALHLSDYVVTEAGFGADLGAEKFFNIKCRKSGLEPAAAVVVATVRALKMHGGVDLSELKNVDVTAVSRGLSNLRRHISNIKKFGVPVIVAINRFSADSDSEIMEIKNNISSLNVDVVECNHWKNGSEGIIDLATKVSELVDEGVSQFQPLYEENQSLFEKINIICREIYGAKEAIANKSIREKLREWESQGFGKFPICIAKTQYSFSTDPNLLGAPKDHVVPIREVRLSAGAEFVVAICGQIMTLPGLPSEPAANNIRLDDNDLITGLF

SEQ ID NO: 196412 - protein, 296 aa, Unknown
  Bacterial polypetide isolated from the Sargasso Sea
SDGAINLHFTGDFHAITSAHNLLSALIDNHIYWGNKLNIDDKKIVWKRVMDMNDRALRAININTKGVAKDFPREDGFDITVASEIMAIFCLSNNLQDLEKRIGNITIAYDKNNKPIYSKDLNAQGPMTVLLKEAIRPNVTQTLENNPALIHGGPFANIAHGCNSVIATKTALKLSDYVVTEAGFGADLGAEKFMDIKCRKSNLKPSCIVIVATVRALKMHGGVEKEDLKKENIVALKKGLVNLERHINNIKKFGVDAVVAINHFVMDTENETNALEEYCNKIGVKVSKCTHWSDGG

SEQ ID NO: 196413 - protein, 249 aa, Unknown
  Bacterial polypetide isolated from the Sargasso Sea
MAFVHIGKKAMICLREPSLGPCFGMKGGAAGGGYAQVIPMTDINLHFTGDFHAIGAAHNLLSALIDNHIHWENELNIDPRRITWKRVVDMNDRSLRDITCGLGGTGNGIPRQSGYDITVASEIMAVFCLASDLDDLQTRIGNIVIGYTKKNEPVKAKELNADGAITALLKDAFQPNLVQTLENNPALMHGGPFANIAHGCNSVVATKTALKLADYVVTEAGFGADLGAEKFFNIKCRKSGLKPDAVVLV

SEQ ID NO: 196414 - protein, 308 aa, Unknown
  Bacterial polypetide isolated from the Sargasso Sea
NLHFTGDFHAITSAHNLLSALIDNHIYWGNKLNIDDKNIVWKRVMDMNDRALRAININTKGASKNFPREDGFDITVASEVMAIFCLSNNLKDLEKKIGNITIAYNKYGKPIYAKDLNAQGPMTVLLKEAIRPNITQTLENNPALIHGGPFANIAHGCNSVIATKSALKLSDYVVTEAGFGADLGAEKFLDIKCRKANLRPSCVVIVATVRALKMHGGVEKDDLKNENIKAVKKGLVNLERHINNIKKFGIDPIIAINHFVLDTKAEIKIIFDFCKKLDVEVSECTHWANGGNGTKDLAKKVVKICKNS

SEQ ID NO: 196415 - protein, 274 aa, Unknown
  Bacterial polypetide isolated from the Sargasso Sea
PFANIAHGCNSVIATKTALKLSEFVVTEAGFGADLGAEKFLNIKCRKSNIVPSCVVIVATVRALKMHGGLERNELKKENLEALKKGMVNLKRHIENVKKFGLEPIVALNHFVLDTKREIKEVLEFCEDQNVEASVSTHWSNGGSGAKDLAKKVIKICKKNKINKFKYLYSEKLSLWNKIEVIAKEIYRAHNITASDEVKKNLKYFEKNGYGNLPVCIAKTQYSFSVDPKLKGAPIGHEIPIREVRLSSGAKFIVVVCGSIMTMPGLPRIPAANN

SEQ ID NO: 196416 - protein, 278 aa, Unknown
  Bacterial polypetide isolated from the Sargasso Sea
MICLREPSLGPCFGMKGGAAGGGYAQVIPMTDINLHFTGDFHAIGAAHNLLSALIDNHIHWDNQLNIDPRRITWKRVVDMNDRSLRDITCGLGGTGNGIPRQSGFDITVASEIMAVFCLASDIDDLQKRIGNIVIGYTKDNEPVKAKQLKADGAITALLKDAFKPNLVQTLENNPAFMHGGPFANIAHGCNSVVSTKTALKLADYVVTEAGFGADLGAEKFFNIKCRKSGLKPDAVVLVATTKALKMHGGVKKEELNNENIQAVVKGCDNLGRHIENI

SEQ ID NO: 196417 - protein, 240 aa, Unknown
  Bacterial polypetide isolated from the Sargasso Sea
IHGGPFANIAHGCNSVIATTAALKLSDYVVTEAGFGADLGAEKFLDIKCRKAGLKPSCVVIVATIRALKMHGGVEKENLKKEDTDSLKKGLVNLERHILNIKKFGLEPIVAINHFALDTKKEIDVVLDFCKDMSVQVSECKHWAMGGKGTTDLAKKVVKTCKDSKKSSFNLLYKDDLNLWDKIEKIVKEIYRGRGITANEDVKEQLKVFENSGYKSLPVCIAKTQYSFSTDPKLKGAPSN

SEQ ID NO: 196418 - protein, 285 aa, Unknown
  Bacterial polypetide isolated from the Sargasso Sea
MLASMIDNHIYWGNDLNIDTRRIVWGRVVDLNDRALRNTNINLGGIANGFPREDKFDITVASEVMAIFCLSTSLSDLQKRLGNIIIGYTRDKKEIKARDINADGAMTTLLKDAFLPNLVQTLEENPAIIHGGPFANIAHGCNSLIATQTALKLSDYVVTEAGFGADLGAEKFLDIKCRKGNLNPSAIVIVATVRALKMHGGMDKKELKNENLDALRKGLSNLQQHISNMKKYGVPVSVAINHFITDTDNELSIISECCDKLDIKSFNCTHWSNGGAGAETLAQHM

SEQ ID NO: 196419 - protein, 296 aa, Unknown
  Bacterial polypetide isolated from the Sargasso Sea
KKSIVCLREPSLGPSFGMKGGAAGGGYAQVVPMEQINLHFTGDFHAITSAHNLLSALIDNHIYWGNKLNIDVRRIVWKRVMDMNDRALRSININLGGVANGFPREDGFDITVASEIMAIFCLANNLEDLEKRIGNITVAYTREKKPIYAKDLNAHGPMTVLLKEAIRPNITQTLENNPAIIHGGPFANIAHGCNSVIATKAGLKLADYVVTEAGFGADLGAEKFLDIKCRKSNLKPSCVVIVATIRALKMHGGVAKDDLKNENVDALKKGLINLERHIENVKKFGLPVAVAINHFI

SEQ ID NO: 196420 - protein, 238 aa, Unknown
  Bacterial polypetide isolated from the Sargasso Sea
MEQINLHFTGDFLAITSAHNLLSALIDNHIYWGNKLKIDIRRVVWKRVMDMNDRSLRSIVVDLGGVANGYPRQDGFDITVASEIMAIFCLATDLKDLENRIGNITIAYTRDKKAIYAKDLNAQGPMTVLLKEAIRPNVTQTLENNPAIIHGGPFANIAHGCNSVIATKAGLKLADYVVTEAGFGADLGAEKFLNIKCRKSGLKPDCVVIVATIRALKMHGGVIKDELKNENVKALKKG

SEQ ID NO: 196421 - protein, 285 aa, Unknown
  Bacterial polypetide isolated from the Sargasso Sea
CYIAHGCNSVIATTAALKLSDYVVTEAGFGADLGAEKFLDIKCRKAGLKPSCVVIVATIRALKMHGGVEKENLKKEDTNSLIKGLVNLERHILNIKKFGLEPIVAVNHFALDTKKEINVVLNFCKDLNIQVSECKHWATGGKGTTDLAKKVVKTCKESKKSNFKLLYEDNLNLWDKIEKIVKEIYRGNGITANEDIKEQLKVFENNGYKSLPVCIAKTQYSFSTDPKLKGAPSNHEIPIREVRLSSGAEFIVVVCGSIMTMPGLPKVPAANNIKLNKKGEVEGLF

SEQ ID NO: 196422 - protein, 284 aa, Unknown
  Bacterial polypetide isolated from the Sargasso Sea
KSIVCLREPSLGPSFGMKGGAAGGGYAQVVPMEQINLHFTGDFHAITSAHNLLSALIDNHIYWGNKLNIDVRRIVWKRVMDMNDRSLRSININLGGIANGYPREDGFDITVASEIMAIFCLSNDLKDLENRIGNITIGYTRDKKPIFAKDLNAQGPMTVLLKDAIRPNITQTLENNPAIIHGGPFANIAHGCNSVIATKTGLKLSDYVVTEAGFGADLGAEKFLDIKCRKSNLKPDCVVIVATIRALKMHGGVAKEDLKNENIKSLKKGLVNLERHVNNVKKFN

SEQ ID NO: 196423 - protein, 290 aa, Unknown
  Bacterial polypetide isolated from the Sargasso Sea
PRQDGFDISVASEIMAIFCLSKDLKDLEKRIGNITIGYTRDKKPICAKDLKAEGPMTVLLKDAIRPNITQTLENNPAIIHGGPFANIAHGCNSVIATKAALKLSDYVITEAGFGADLGAEKFINIKCRKSGLKPDCVVIVATIRALKMHGGVKKDELKKENLDALKKGLTNLERHINNTRKFGVPVAVAVNHFATDSNKEVNFLIDFCKNFGVEISLCTHWSDGGNGTKDLASTVVKICNKSKNTFRYLYEDKLPLFKKIEKIGQEIYHASEVVADTKVRNQLKDFEKKG

SEQ ID NO: 196424 - protein, 326 aa, Unknown
  Bacterial polypetide isolated from the Sargasso Sea
VIPMTDINLHFTGDFHAIGAAHNLLSALIDNHIHWDNELNIDPRRITWKRVVDMNDRSLRDITCGLGGTGNGIPRQSGFDITVASEIMAVFCLASDIEDLQKRIGNIVIGYTKSNEPVRASQLKADGAITALLKDAFQPNLVQTLENNPAFMHGGPFANIAHGCNSVVSTKTALKLADYVVTEAGFGADLGAEKFFDIKCRKSGLKPDAVVLVATTKALKMHGGVKKEDLGTENVDAVTLGCKNLEKHVENINKFGVPVVVAINNYVSDTEKEHIAIINFCKNLGVQCKISSHWEKGGQGASELAVEVAKVADSNMSEFNTLYEDA

SEQ ID NO: 196425 - protein, 281 aa, Unknown
  Bacterial polypetide isolated from the Sargasso Sea
LGPSFGMKGGAAGGGYAQVVPMEQINLHFTGDFHAITSAHNLLSALIDNHIYWGNKLDIDVRRIVWKRVMDMNDRSLRSININLGGVANGFPREDGFDITVASEIMAIFCLSNDLEDLEKRIGNITIGYNRDKKPVYAKDLNAQGPMTVLLKEAIRPNVTQTLENNPAIIHGGPFANIAHGCNSVIATKTGLKLADYVVTEAGFGADLGAEKFLDIKCRKSNLKPSCVVIVATIRALKMHGGVAKEDLKNENVDALKKGLVNLERHIENVKKFGLPSCCCC

SEQ ID NO: 196426 - protein, 291 aa, Unknown
  Bacterial polypetide isolated from the Sargasso Sea
GKLILVTAITPTLAGEGKTTTSVGLNDGLNKIGKNSIVCLREPSLGPSFGMKGGAAGGGYAQVVPMEQINLHFTGDFHAITSAHNLLSALIDNHIYWGNKLNIDVRRVVWRRVMDMNDRSLRSININLGGVANGFPREDGFDITVASEIMAIFCLANDLEDLEKRIGNITVAYTRDRKPIFAKDLNAHGPMTVLLKEAIRPNVTQTLENNPAIIHGGPFANIAHGCNSVIATKAGLKLADYVVTEAGFGADLGAEKFLDIKCRKSNLKPECVVIVATIRALKMHGGVAKDD

SEQ ID NO: 196427 - protein, 266 aa, Unknown
  Bacterial polypetide isolated from the Sargasso Sea
FDYVVTEAGFGADLGAEKFLDIKCRKASLKPSCVVIVATVRALKMHGGVEKGNLKKENVLAIKKGLVNLERHINNIKKFGINPVVAINHFVLDTKAEIKIISNFCKKLNVEVSECTHWANGGKGTRDLAKKVVKVCKKSKKNNFKFLYSEKESLWNKIEIIAKEIYKSRKITADEKVKQELIKFEKNGYGRLPVCIAKTQYSFSVDPKLKGAPSGHEIPIREVRLSSGAEFIVVICGSIMTMPGLPRVPAANSIKLNNKSEIEGLF

SEQ ID NO: 196428 - protein, 275 aa, Unknown
  Bacterial polypetide isolated from the Sargasso Sea
RVMDMNDRSLRSIVVDLGGVANGYPRQDGFDITVASEIMAIFCLSNDLKDLENRIGNITVAYTRDKKPIYAKDLNAQGPMTVLLKDAIRPNVTQTLENNPAIIHGGPFANIAHGCNSVIATKTGLKLADYVVTEAGFGADLGAEKFLDIKCRKSNLKPDCVVIVATIRALKMHGGVTKDDLKNENVKALNKGLVNLERHINNIRKFGLPVAVAVNHFITDTDKEVNALMDFCKTLGVKSSICKHWSDGGEGTKDLANIVVDICNNKNSFKFLYED

SEQ ID NO: 196429 - protein, 293 aa, Unknown
  Bacterial polypetide isolated from the Sargasso Sea
AITSAHNLLSALIDNHIYWGNKLDIDVRRIVWKRVMDMNDRSLRSININLGGVANGFPREDGFDITVASEIMAIFCLSNDLEDLEKRIGNITIGYNRDKKPVYAKDLNAQGPMTVLLKEAIRPNVTQTLENNPAIIHGGPFANIAHGCNSVIATKTGLKLADYVVTEAGFGADLGAEKFLDIKCRKSNLKPSCVVIVATIRALKMHGGVAKEDLKNENVDALKKGLVNLERHIENVKKFGLPVAVAVNHFIKDTDSEVKALIDFCNDLGVKASLCTHWTNGGEGTKDLAAHGY

SEQ ID NO: 196430 - protein, 445 aa, Unknown
  Bacterial polypetide isolated from the Sargasso Sea
MLGSITVSDIEIARAAKKKPIFEIGESLNIPAADLVPFGHDKAKISQGFINSVQGQPHGKLILVTAINPTPAGEGKTTTTVGLGDGLNRIGKKAMICIREASLGPNFGMKGGAAGGGYAQIVPMEDMNLHFTGDFHAITSAHSLLSAMIDNHVYWGNELEIDTRRVVWRRVVDMNDRALRQITVSLGGVANGFPREAGFDITVASEVMAILCLAKDLADLQKRLGDMIVAYRRDRSPVFCRDIKADGAMTVLLKDAIQPNLLQTLENSPAFVHGGPFANIAHGCNSVIATTTALKLADYVVTEAGFGADLGAEKFLNIKCRKAGLAPSVVVLVATVRAMKMNGGVAKNDLNEENVAAVKGGCPNLGRHIENLKSFGVPVVVAINHFVKDTDAEVQAVQDYCAKMGTEAIVSKHWADGSAGSENLAKRVAEVADADTGNFAPIYPD

SEQ ID NO: 196431 - protein, 438 aa, Unknown
  Bacterial polypetide isolated from the Sargasso Sea
GYSQVVPMEQINLHFTGDFHAITSAHNLLSALIDNHIYWGNKLNIDVRRVVWNRVMDMNDRSLRSIVVDLGGVANGYPRQDGFDITVASEIMAIFCLSKNLKELENKIGNITIGYTRDKKPIYAKDLRAQGPMTVLLHRALRPNVVQTLENNPAIIHGGPFANIAHGCNSIIATKTALKLSDYVVTEAGFGADLGAEKFVDIKCRKSGIKPSCIVIVATIRALKMHGGIEKKQLKKENMSALIKGLVNLERHINNMKKFGLPVTVAINKFIYDTKKEENAVIDFCKDLGVKANLCTHWADGGKGTRDLAKTVVELSSKGKNKFKYLYEDKLPLFKKIEKIAKEFYKASEVIADSKIRSQLKEYEALGFKNLPICIAKTQYSFSTDPNLKGAPKDHVVQIRGLRLSSGAEFLVVFCGAINTMPGLPKVPAAESIKLNSK

SEQ ID NO: 196432 - protein, 377 aa, Unknown
  Bacterial polypetide isolated from the Sargasso Sea
SILGGISNGFPRTDGFNITVASEVMAIFCLAKDLKDLQRRLGNITVAYTRDKKAIHAKDLKAEGPMTVLLKQALMPNLVQTLENNPAIIHGGPFANIAHGCNSVIATKTSLKIADYVVTEAGFGADLGAEKFLNIKCRKSELNPDGVVVVATIRALKMHGGVKKENLGIENVESIKKGMSNLKRHIENIKKFGLPIVVAINHFKADTDNETAALKQECKKIGVEAIICKHWAEGSNGTVELAKKVVELVNEKNSFKFLYEDKIPLIEKIEKIAKEIYGAEEVIADNKIREQLKQYENNGYGDFPICIAKTQYSFSTDPSLKGAPTGHSIPIRELRLSSGAEFIVVICGEIMTMPGLPSVPAANSIHLNEKGQIEGLF

SEQ ID NO: 196433 - protein, 311 aa, Unknown
  Bacterial polypetide isolated from the Sargasso Sea
DCTIKTALMPNLVQTLENNPAIIHGGPFANIAHGCNSVIATKTALKISDYVVTEAGFGADLGAEKFLNIKCRKAELNPDAVVLVATIRALKMHGGIEKNNLKNENVEAVKAGISNLKQHVNNIKKFGLPIIVAINHFEADTEKEIKILKEECNKIGVEAVQCKHWSDGGNGTIELAEKVVDLTNQKNSFNFLYQDNIPLLEKIKTIATKIYQANDVIVDNKIRSQLKLFEKNGYGKFPICIAKTQYSFSTDPSLKGAPTNHSIPIREVRLSSGAEFIVVICGEIMTMPGLPSVPAANAIHLNENGQIEGLF

SEQ ID NO: 196434 - protein, 562 aa, Unknown
  Bacterial polypetide isolated from the Sargasso Sea
MDAVKSDIEIARKAKMRPIKDILAKIKVPDSNKAFSPMGRHIAKINLKYLETLKNKKDGNLILVTAITPTPAGEGKTTVSVGLSDGLNKIGKKSIVCLREPSLGPSFGMKGGAAGGGYSQVVPMEQINLHFTGDFHAITSAHNLLSALIDNHIYWGNKLDIDDKKIVWKRVMDMNDRALRAININTKGASKNFPREDGFDITVASEVMAIFCLSNNLKDLEKKIGNITIAYKKDGKPVYAKDLNAQGPMTVLLKEAIRPNVTQTLENNPAFIHGGPFANIAHGCNSVIATKSALKLSDYVVTEAGFGADLGAEKFLDIKCRKANLKPSCVVIVATVRALKMHGGVEKEDLKKENIHAVKKGLVNLERHINNIKKFGINPVVAINHFVLDTKAEIKIISDFCKKLNVKVSECTHWANGGKGTKDLAKKVVEICKKSKKNNFKFLYNEKETLWNKIETIAKEIYKASKITADEKVKEELIKFEKNGYGKLPVCIAKTQYSFSVDPKLKGAPSNHEIPIREVRLSSGAEFIVVVCGSIMTMPGLPRIPAADSIKINNKGEIDGLF

SEQ ID NO: 196435 - protein, 560 aa, Unknown
  Bacterial polypetide isolated from the Sargasso Sea
MAEVKSDIQIAREAKMQPIKDILSKVGVPDENFAFSPMGRHIAKINLEYLNTLKKENGKLILVTAITPTPAGEGKTTTSVGLNDGLNKIGKKSIVCLREPSLGPSFGMKGGAAGGGYAQVVPMEQINLHFTGDFHAITSAHNLLSALIDNHIYWGNKLNIDVRRVVWRRVMDMNDRSLRSIIVDLGGVANGYPRQDSFDITVASELMAIFCLATDLKDLENRIGNITIGYTRDKQAIYAKDLNAQGPMTVLLKEAIRPNVTQTLENNPAIIHGGPFANIAHGCNSVIATKAGLKLADYVVTEAGFGADLGAEKFLDIKCRKSGLKPDCVVIVATIRALKMHGGVAKEDLKKENVSALKEGMVNLRRHINNIRKFGLPVTVAVNHFITDTEDEMKTLLDFCETQGVKASKCTHWSNGSEGTIELAKNVTEICEDKKDTFKFLYEDDLPLFKKIEKIAQEIYSASEVVADTKVRQQLKDFEEKGYGKLPVCIAKTQYSFSTDPNLKGAPTGHVLPVREVRLSSGAEFIVVVCGEIMTMPGLPRVPAADSIKLNDKGEIEGLF

SEQ ID NO: 196436 - protein, 546 aa, Unknown
  Bacterial polypetide isolated from the Sargasso Sea
MTEYLSDLEIANAANKKPISDIAHSINIAEKDLIKYGNDKAKLSYDFINSLSKKENGKLILVTAISPTPAGEGKTTTSVGLVDGLCHIGKKAMICLREPSLGPCFGMKGGAAGGGYAQVIPMTDINLHFTGDFHAIGAAHNLLSALIDNHIHWDNELNIDPRRITWKRVVDMNDRSLREITCGLGGLGNGIPRQSGYDITVASEIMAVFCLASDLEDLQNRIGNIVIGYTKDNKPVRAKELNADGAVTALLKDAFQPNLVQTLENNPAFMHGGPFANIAHGCNSVTSTKTALKLADYVVTEAGFGADLGAEKFFDIKCRKSGLKPDAVVLVATTKALKMHGGVQKSELNKENVEAVIKGCQNLGKHIENISKFGVPVVVGINDYVTDTENEHKEIINFCKKKGVECKISSHWEKGGEGAAALAEEVVKVADSNLSKFKTLYKSEMGLWDKTQYIAQNIYGAADIIADKKVRNQFKKLEDDGFGDYPICMAKTQYSFSTDPLLMGAPSGHDVPIREVRLSAGAEFVVVVCGEIMTMPGLPRVPAAEA

SEQ ID NO: 196437 - protein, 559 aa, Unknown
  Bacterial polypetide isolated from the Sargasso Sea
MSKSDIQIAREAKMKPINEILGKINVPDEPSAFSPMGRHIAKINLEYLDSLKDKQNGKLILVTAITPTPAGEGKTTTSVGLNDGLNKIGKNSIVCLREPSLGPSFGMKGGAAGGGYAQVVPMEQINLHFTGDFHAITSAHNLLSALIDNHIYWGNKLNIDVRRVVWRRVMDMNDRSLRSININLGGVANGFPREDGFDITVASEIMAIFCLANDLEDLEKRIGNITVAYTRDRKPIFAKDLNAHGPMTVLLKEAIRPNVTQTLENNPAIIHGGPFANIAHGCNSVIATKAGLKLADYVVTEAGFGADLGAEKFLDIKCRKSNLKPECVVIVATIRALKMHGGVAKDDLKNENVEALKKGLVNLERHIENVKKFGLPVAVAVNHFVADTDNEVKELINACDNMGVKATLCTHWSNGGEGTKELATHVVDLIDQKQANFKFLYDEKTPLLKKVETVAKEIYRANEVVADSKIKDQLKSFEEAGYGNLPICVAKTQYSFSTDPNAKGAPTGHSLPIREVRLSSGAEFIVVICGAIMTMPGLPRVPAADSIKLNEKGEIEGLF

SEQ ID NO: 196438 - protein, 558 aa, Unknown
  Bacterial polypetide isolated from the Sargasso Sea
MAKTDIEIAREAKMKPIQEILDSINVPDKAEVYSPMGRYIAKIKLEYLEKLKDKKDGKLILVTAITPTPAGEGKTTTSVGLCDGLNKIGKKSIVCLREPSLGPSFGMKGGAAGGGYAQVVPMEQINLHFTGDFHAITSAHNLLSALIDNHIYWGNKLNIDVRRVVWKRVLDMNDRALRSININLGGIANGFPREDGFDITVASEIMAIFCLSNDLYDLEKKIGNITIAYTRDKKPIFAKDLNAQGPMTVLLKDAIRPNFTQTLENNPAIIHGGPFANIAHGCNSVLATKTALKLSDYVVTEAGFGADLGAEKFLDIKCRKSGLKPNCVVIVATIRALKMHGGLNKDELKTENLNALKKGLVNLEKHISNIKKFGLPVTVAINHFVLDTEKEIDVVINFCKKLKIKVSTCKHWEKGSDGTKELANDVIKLCEEKSEFKFLYNDDVGLFKKIETIAKELYGANEVIADTKIREQLKNFQDNGYQKLPICIAKTQYSFSTDPSLKGAPTGHVLPIREVRLSSGAEFIVVVCGAIMTMPGLPRVPAADSIKINEKGETEGLF

SEQ ID NO: 196439 - protein, 534 aa, Unknown
  Bacterial polypetide isolated from the Sargasso Sea
MDSDINIARKANSLPISEIAKNLNIPEESIIPYGNNKAKIDYSFIKSLSNKKNGKLILVTAISPTPAGEGKTTTTVGLGDGLNKIGENTLICLREPSLGPCFGMKGGAAGGGYSQVIPMEDINLHFTGDFHAISSAHNLLSALVDNHIHWDNTLGFDVRRVSWKRVVDMNDRALRKVILSLGGVNNGFPREGGFDITVASEIMAIFCLAEDLNDLRRRIGNIVVGFTRKNDPITAKQINADGPVTALLKDAFMPNLVQTLENNPALIHGGPFANIAHGCNSVVATKTALKLADYVVTEAGFGADLGAEKFFNIKCRKSGLRPDAVVLVATTRALKMHGGLSKDNLNTENLNALDKGLCNLERHIRNIKLFGVNVVVAINKFHSDTQKEFEIIKNSCSKNNVNVFECNHWAEGGEGTLELANHVVHLTKNSESEFVTLYEDKITLVDKVRKICREIYSAEDIAYDQKVEKQFLRFQELYGDFPICIAKTQYSFSTDNNLLGAPENHKIPIKELRLSAGAEFIVVVCGEIMTMPGL

SEQ ID NO: 196440 - protein, 561 aa, Unknown
  Bacterial polypetide isolated from the Sargasso Sea
MSKIKSDIEIARSAKMKPIKEVLDGINVPDKAEAYSPIGRYMAKIKSEYLENLKNKKDGKLILVTAITPTPAGEGKTTTSVGLCDGLNKIGKKSIVCLREPSLGPSFGLKGGAAGGGYAQVVPMEQINLHFTGDFHAITSAHNLLSSLIDNHIYWGNKLNIDVRRITWKRVMDMNDRSLRSIVVDLGGIANGYPRQDGFDITVASEIMAIFCLSKDLKDLEKRIGNITIGYTRDKKPILAKDLKAQGPMTVLLKDAIRPNVTQTLENNPAIIHGGPFANIAHGCNSVIATKTALKLSDYVITEAGFGADLGAEKFINIKCRKSGLKPDCVVIVATIRALKMHGGMQKEDLKKENVDALKKGLVNLERHINNVRKFGLPVVVALNHFITDTNKEVNFLVDFCKNLGVKIALCTHWSNGSEGTKDLASTVVKICEKTKSTFKFLYDDKLPLFKKIQKIAQEIYHASEVVADTKIRNQLKEFETKGYGKLPICVAKTQYSFSTDPSLKGAPTGHVLPVREVRLSSGAEFIVVVCGEIMTMPGLPKVPAAEGIKINSKGEVEGLF

SEQ ID NO: 196441 - protein, 354 aa, Unknown
  Bacterial polypetide isolated from the Sargasso Sea
MAEIKSDIQIAREAKMQPIKDILSKVGVPDENFAFSPMGRHIAKINLEYLNTLKKENGKLILVTAITPTPAGEGKTTTSVGLNDGLNKIGKKSIVCLREPSLGPSFGMKGGAAGGGYAQVVPMEQINLHFTGDFHAITSAHNLLSALIDNHIYWGNKLNIDVRRVVWRRVMDMNDRSLRSIIVDLGGVANGYPRQDSFDITVASELMAIFCLATDLKDLENRIGNITIGYTRDKQSIYAKDLNAHGPMTVLLKEAIRPNVTQTLENNPAIIHGGPFANIAHGCNSVIATKAGLKLADYVVTEAGFGADLGAEKFLNIKCRKSGLKPDCVVIVATIRALKMHGGVNKEDLKKENV

SEQ ID NO: 196442 - protein, 557 aa, Unknown
  Bacterial polypetide isolated from the Sargasso Sea
MSDIEIARKAKMKPISEILKGLDVPDTPEAFSPMGRHIAKINLEYIESLNKNKDGKLVLVSAITPTPAGEGKTTTSVGLSDGLNKLGKKSIVCLREPSLGPSFGMKGGAAGGGYAQVVPMEQINLHFTGDFHAITSAHNLLSALIDNHIYWGNKLNIDVRRVVWKRVMDMNDRSLRSIVVDLGGVANGYPRQDGFDITVASEIMAIFCLAKDLKDLEERIGNITIAYTRDKKAIYAKDLKAEGPMTVLLKDAIRPNITQTLENNPAIIHGGPFANIAHGCNSVIATKASLKLSDYVVTEAGFGADLGAEKFLDIKCRKSNLKPDCVVLVATIRALKMHGDVSKEDLKNENVNALKKGLVNLERHINNIRKFGLPVTVAINHFVTDSKAEVDAVLSFCTTQGVKASMCTHWSDGGDGATELAQNVIDICEDNKNTFKFLYEDDLTLFKKIEKIAQEIYHASEVVADTKVRQQLKDFETKGFGKLPVCIAKTQYSFSTDPNLKGAPTGHVLPIREVRLSSGAEFIVVVCGDIMTMPGLPSVPAANSIKLNDHGEIEGLF

SEQ ID NO: 196443 - protein, 562 aa, Unknown
  Bacterial polypetide isolated from the Sargasso Sea
MGAVKSDIEIARAAKMKPIKDILGKIKVPDNNTSFSPMGRHIAKINLEYLNKLKNKKDGHLILVTAITPTPAGEGKTTTSVGLHDGLNKIGKKSIVCLREPSLGPSFGMKGGAAGGGYAQVVPMEQINLHFTGDFHAITSAHNLLSALIDNHIYWGNKLKIDDKRIVWKRVIDMNDRALRFININTKGVAKEFPREDGFDITVASEVMAIFCLSNDLKDLEKRIGNITIAYNTDGKPIYAKDLNAQGPMTVLLKDAIRPNVTQTLENNPALIHGGPFANIAHGCNSVIATKSALKLADYVVTEAGFGADLGAEKFLDIKCRKSNLKPSCVVIVATIRALKMHGGVEKENLKHENVEALKKGLVNLERHISNIKKFGLTPIVAVNSFILDTKKEISAVKDFCKSQKVEVSESTHWADGGKGAKDLAKKVVKICKVSKKKNFKFLYEDNQSLWSKVETIAKEIYKASSITSDENVKKQLKIFEDNGYGKLPVCIAKTQYSFSVDPKLKGAPTGHEISIREVRLSSGAEFIVVVCGSIMTMPGLPRVPAADKIKLNKKGDIEGLF

SEQ ID NO: 196444 - protein, 559 aa, Unknown
  Bacterial polypetide isolated from the Sargasso Sea
MAKTDIEIAREAKMKPIQKILDGINVPDKAEVYSPMGRYIAKIKTEYLDSLKSKKSGKLILVTAITPTPAGEGKTTTSVGLCDGLNKIGKKSIVCLREPSLGPSFGMKGGAAGGGYAQVVPMEQINLHFTGDFHAITSAHNLLSALIDNHIYWGNKLNIDVRRIVWKRVMDMNDRSLRSIVVDLGGIANGYPRQDGFDITVASEIMAIFCLAKDLKDLENRIGNITIGYTRDKNPIYAKDLNAQGPMTVLLKDAIRPNVTQTLENNPAIIHGGPFANIAHGCNSVIATKTALKLSDYVITEAGFGADLGAEKFINIKCRKSDLKPDCVVIVATIRALKMHGGVLKDELKNENLEALKKGIVNLERHINNVRKFGLPVAVAINHFVTDTDKEVNFIMDFCKNLGVNISLCTHWSNGGEGTKDLANTVVNICEKSSSTFKFLYEDKIPLFKKIETIAREIYHASEVVADTKIRSQLKDFESKGYGNLPICVAKTQYSFSTDPSLKGAPTGHVLPVREIRLSSGAEFIVVVCGEIMTMPGLPRVPAADSIKINDEGNIEGLF

SEQ ID NO: 196445 - protein, 548 aa, Unknown
  Bacterial polypetide isolated from the Sargasso Sea
MSNYPTDLEIANAAYKKPIEEIANILDINPDDLIRYGNDKAKLSSKLINSLSKKENGKLILVTAISPTPAGEGKTTTSVGLVDGLCHIGKKAMICLREPSLGPCFGMKGGAAGGGHAQVIPMTDINLHFTGDFHAIGAAHNLLSALIDNHIHWENKLNIDPRRITWKRVVDMNDRSLRDITSGLGGIGNGIPRQSGYDITVASEIMAVFCLASDIDDLQERIGNIVIGYTRDKEPVRAKQLNADGAVTALLKDAFQPNLVQTLENNPAFMHGGPFANIAHGCNSVISTKTALKLADYVVTEAGFGADLGAEKFFDIKCRKSGLEPDAVVLVATTKALKMHGAVKKEDLSQENVGAVSKGCQNLERHIKNIEKFGVPVVVAINDYVTDTQKEHSAIINYCKNLGIQCTISSHWEKGGKGAAELATEVAKIADSNSAEFKTLYDNELSLWEKTKLIAQSIYGASDIIADKKVRNQFKKLEDDGFGEYPICMAKTQYSFSTDPLLMGAPSRHDVPIREVRLSAGAEFVVVVCGEIMTMPGLPRVPAAEAIG

SEQ ID NO: 196446 - protein, 559 aa, Unknown
  Bacterial polypetide isolated from the Sargasso Sea
MAKTDIEIAREAKMKPIQEILDGINVPDKAEVYSPMGRYIAKIKTEYLESLKNKKNGKLILVTAITPTPAGEGKTTTSVGLCDGLNKIGKKSIVCLREPSLGPSFGMKGGAAGGGYAQVVPMEQINLHFTGDFHAITSAHNLLSALIDNHIYWGNKLNIDVRRIVWKRVMDMNDRSLRSIVVDLGGIANGYPRQDGFDITVASEIMAIFCLAKDLKDLENRIGNITIGYTRDKNPIFAKDLNAQGPMTVLLKDAIRPNVTQTLENNPAIIHGGPFANIAHGCNSVIATKTALKLSEYVITEAGFGADLGAEKFINIKCRKSNLKPDCVVIVATIRALKMHGGVGKDELTNENVEALKKGVVNLERHINNVRKFGLPVAVAVNHFVTDTEKEVNFLMNFCKNLGVDISLCTHWSNGGEGTKDLANTIVNICEKSESTFKFLYEDKIPLFKKIETIAQEIYHASEVVADTKIRTQLKDFESKGYADLPICVAKTQYSFSTDPSLKGAPSGHVLPVREIRLSSGAEFIVVVCGEIMTMPGLPRVPAADSIKINDKGNIEGLF

SEQ ID NO: 196447 - protein, 538 aa, Unknown
  Bacterial polypetide isolated from the Sargasso Sea
MKKVASKLKLGEDSLQKFGHHIAKIDTNTLKNHNKNGKLILVTAISPTPAGEGKTTTSVGLNDALNKIGKQSLVCLREPSLGPCFGVKGGAAGGGYAQVVPMDKINLHFTGDFHAITSAHNLLASMIDNHIYWGNDLNIDTRRIVWGRVVDLNDRALRNTNINLGGIANGFPREDKFDITVASEVMAIFCLSTSLSDLQKRLGNIIIGYTRDKKEIKARDVNADGAMTTLLKDAFLPNLVQTLEENPAIIHGGPFANIAHGCNSLIATQTALKLSDYVVTEAGFGADLGAEKFLDIKCRKGNLNPSAIVIVATVRALKMHGGMDKKELKNENLDALKKGLSNLQQHISNMKIYGVPVSVAINHFITDTDNELSIISECCDDLGIKSFNCTHWSNGGAGAETLAQHIVDVTTEENPKITHLYPDEMKLWDKVKKIAQDIYGAKDIIADQKIRSQFDELQDNYGHYPICIAKTQYSFSTDPNLRGAPKDHIVPIREIRLAAGAEFLVVVCDKIMTMPGLPRIPAANAIHLNDDGEIEGLF

SEQ ID NO: 196448 - protein, 561 aa, Unknown
  Bacterial polypetide isolated from the Sargasso Sea
MSDIKSDIQIAREAKMLPIKEILAKVNVPDESSAFSPMGRHIAKINLEYLDTLKDKPDGKLILVTAITPTPAGEGKTTTSVGLNDGLNKIGKKSIVCLREPSLGPSFGMKGGAAGGGYAQVVPMEQINLHFTGDFHAITSAHNLLSALIDNHIYWGNKLNIDVRRIVWKRVMDMNDRALRSININLGGVANGFPREDGFDITVASEIMAIFCLANNLEDLEKRIGNITVAYTREKKPIYAKDLNAHGPMTVLLKEAIRPNITQTLENNPAIIHGGPFANIAHGCNSVIATKAGLKLADYVVTEAGFGADLGAEKFLDIKCRKSNLKPSCVVIVATVRALKMHGGVTKDDLKNENVDALKKGLINLERHIENVKKFGLPVAVAINHFIKDTDKEVNALVEFCKKLGVKASICKHWADGGEGTKDLAKHVTDLCEKNEAKFKFLYESKTPLFKKIETIAKEIYRANEVIADTKIRDQLKNFEEAGYSELPICVAKTQYSFSTDPNLKGAPTGHSLPIREIRLSSGAEFIVVVCGAIMTMPGLPRVPAADSIKLNKDGDIEGLF

SEQ ID NO: 196449 - protein, 326 aa, Unknown
  Bacterial polypetide isolated from the Sargasso Sea
MANYPSDLEIANAANKKPIREIAKLLDIDEKDLIKFGDDKAKLNSNFLNSVSKKENGKLILVTAISPTPAGEGKTTTSVGLVDGLCHIGKKAVICLREPSLGPCFGMKGGAAGGGKAQVIPMTDINLHFTGDFHAIGAAHNLLSALIDNHIHWENQLNIDPRRITWKRVVDMNDRSLRDITCGLGGTGNGIPRQSGFDITVASEIMAVFCLASDLEDLQKRIGNIVIGYTKSNEPVRAKQLNADGAVTALLKDAFQPNLVQTLENNPAFMHGGPFANIAHGCNTVISTKTALKLADYVVTEAGFGADLGAEKFFNIKCRKSNLQPD

SEQ ID NO: 196450 - protein, 260 aa, Unknown
  Bacterial polypetide isolated from the Sargasso Sea
EAGFGADLGAEKFLNIKCRKSQIWPSCIVIVATVRALKMHGGIEKDNLKDENIDALKKGIVNLERHIINIKKFGIEPIVAINHFILDTNHEIKTIQKFCKKIGVDVSVSKHWSDGGSGAKDLAKKVIKICKKTSKKKFNYLYSDSISPWEKIEKIAKEIYGANRITAPDDVKEKLKNFEKNGYGKLPVCIAKTQYSFSVDPKLKGAPTNHEIPIREVRLSSGANFIVVVCGSIMTMPGLPKVPAANKIKLNNKGDTEGLF

SEQ ID NO: 196451 - protein, 411 aa, Unknown
  Bacterial polypetide isolated from the Sargasso Sea
MSDIKSDIQIAREAKMQPINDILAKINVPDENHAFSPMGRHIAKINLGYLNGLKNKDGKLILVTAITPTPAGEGKTTTSVGLNDGLNKIGKKSIVCLREPSLGPSFGMKGGAAGGGYAQVVPMEQINLHFTGDFHAITSAHNLLSALIDNHIYWGNKLNIDVRRIVWRRVMDMNDRSLRSVIVDLGGVANGYPRQDSFDITVASELMAIFCLATSLKDLEDKIGNITIGYTREKKSIQAKDLNAQGPMTVLLKEAIRPNVTQTLENNPAIIHGGPFANIAHGCNSVIATKAGLKLADYVVTEAGFGADLGAEKFLDIKCRKSGLKPDCVVIVATIRALKMHGGINKEDLKKENVSALKDGLVNLERHINNIRKFGLPCTVAVNHFITDTDNENETLLDFCETQGVKASKCT

SEQ ID NO: 196452 - protein, 558 aa, Unknown
  Bacterial polypetide isolated from the Sargasso Sea
MSKTDIQIAREANMKPIQEILDEVGVPDNAEAYSPISRYIAKIKLEYLEKFKNKKDGKLILVTAITPTPAGEGKTTTSVGLSDGLNKIGKKSIVCLREPSLGPSFGMKGGAAGGGYAQVVPMEQINLHFTGDFHAITSAHNLLSALIDNHIYWGNKLNIDVRRIVWKRVLDMNDRALRSININLGGVANGFPREDGFDITVASEIMAIFCLSNDLHDLENRIGNITVAYTRDKKPIYAKDLNAHGPMTVLLKDAIRPNVTQTLENNPAIIHGGPFANIAHGCNSVLATKTALKLSDYVVTEAGFGADLGAEKFLDIKCRKSGLKPSCVVIVATIRALKMHGGVNKDELKNENIDAVKKGLVNLERHIENIQKFGLPVTVAINHFVLDTDKEVDEVIKFCQQKGVTASISKHWEKGGEGAVDLANNVAELCEKGSDFKFLYDDKISLFKKIETIAKELYRASEVVADTKIREQLKNFEETGYQSLPICIAKTQYSFSTDPNLKGAPSGHVLPIREVRLSSGAEFIVVVCGAIMTMPGLPKVPAADKIKINDKGETEGLF

SEQ ID NO: 196453 - protein, 427 aa, Unknown
  Bacterial polypetide isolated from the Sargasso Sea
FHAITSAHNLLSALIDNHIYWGNKLDIDVRRIVWKRVMDMNDRSLRSININLGGVANGFPREDGFDITVASEIMAIFCLSNDLEDLEKRIGNITIAYTRDKKPVYAKDLKAHGPMTVLLKDAIRPNVTQTLENNPAIIHGGPFANIAHGCNSVIATKTGLKLADYVVTEAGFGADLGAEKFLDIKCRKSNLKPSCVVIVATIRALKMHGGVEKDDLKNENVDALKKGLVNLERHIENVKKFGLPVAIAVNHFIKDTDSEVKALIDFCENLGVKASLCTHWANGGEGTKELAAHVADLCEKKDARFNFLYESKTPLFKKIETIAKEIYRADEVIADTKIRDQLKGFEEAGYGELPICVAKTQYSFSTDPNLKGAPTGHVLPVREIRLSSGAEFIVVVCGAIMTMPGLPRVPAADSIKLNNNGEIEGLF

SEQ ID NO: 196454 - protein, 505 aa, Unknown
  Bacterial polypetide isolated from the Sargasso Sea
MGTYPSDLEIANAAHKKPIDEIAESIGIQKKDLIRFGDDKAKLTHNLVKSLSKNDDGKLILVTAISPTPAGEGKTTTSVGLVDGLCNIGKKAMICLREPSLGPCFGMKGGAAGGGNAQVIPMTDINLHFTGDFHAIGAAHNLLSALIDNHIHWDNELNIDPRRITWKRVVDMNDRSLRDITCGLGGTGNGIPRQSGYDITVASEIMAVFCLASDLDDLQTRVGNIVIGYTKNNEPVRAKQLNADGAITALLKDAFQPNLVQTLENNPAFMHGGPFANIAHGCNSVVSTKTALKLADYVVTEAGFGADLGAEKFFDIKCRKSGLKPDVVVLVATTKALKMHGGVKKDELSRENIDAVLKGCENLGKHIENIGKFGVPVVVGINDYVTDTSSEHEQIINFCKNLGVQCKISSHWEKGGEGAADLAEEVAKIADSNSAEFKTLYKDEMTLWDKTEHIAKSIYGASEIIADKRVRNQFKKLEDDGFGEYPICMAKTQYSFSTDPLLMGA

SEQ ID NO: 196455 - protein, 450 aa, Unknown
  Bacterial polypetide isolated from the Sargasso Sea
MKTDIEIAREAEPKTIDKIADQLGIGEEYLERYGKFKSKVDLSINDEKLKDSKNGKLILVTAISPTPAGEGKTTTSVGLVDGLCHIGKNAMICLREPSLGPCFGMKGGAAGGGHAQVIPMTDINLHFTGDFHAIGAAHNLLSALIDNHIHWDNQLDIDPRRITWKRVVDMNDRSLRDITCGLGGVGNGIPRQSGYDITVASEIMAVFCLASDIDDLKKRIGNMVIGYSRSNEPIRAKQLNADGAITALLKDAFQPNLVQTLENNPAFIHGGPFANIAHGCNSVVSTKLALKLADYVVTEAGFGADLGAEKFFDIKCRKSGLKPDAVVLVATTKALKMHGGIAKDNLGGENVDAVTKGCKNLERHIENITKFGVPVIVAINDYVTDTKDEHDAIINYCKEIGVECRISSHWEKGGKGASDLAEEVVKIADSNASKFKPLYDNKMSLWDKTE

SEQ ID NO: 196456 - protein, 400 aa, Unknown
  Bacterial polypetide isolated from the Sargasso Sea
MTKSDIQIAREAKMKPIQEILDSINVPDKAEVYSPISRYIAKIKLEHLEKLKEKKDGKLILVTAITPTPAGEGKTTTSVGLSDGLNKIGKKSIVCLREPSLGPSFGMKGGAAGGGYAQVVPMEQINLHFTGDFHAITSAHNLLSALIDNHIYWGNKLNIDVRRVVWKRVLDMNDRALRSININLGGVANGFPREDGFDITVASEIMAIFCLSNDLHDLEERIGNITIGYTRDKKPIYAKDLNAQGPMTVLLKDAIRPNVTQTLENNPAIIHGGPFANIAHGCNSVLATKTALKLSDYVVTEAGFGADLGAEKFLNIKCRKSGLKPNCVVIVATIRALKMHGGLKKDELKTENVDALKKGLVNLEKHINNIKKFGLPVTVAINHFVLDTNNEVDAVINFVK

SEQ ID NO: 196457 - protein, 411 aa, Unknown
  Bacterial polypetide isolated from the Sargasso Sea
MSDVKSDIQIAREAKMQPINEVLAKINVPDESTAFSPMGRHIAKINLEYLDTLKDKPEGKLILVTAITPTPAGEGKTTTSVGLNDGLNKIGKKSIVCLREPSLGPSFGMKGGAAGGGYAQVVPMEQINLHFTGDFHAITSAHNLLSALIDNHIYWGNKLDIDVRRIVWKRVMDMNDRSLRSININLGGVANGFPREDGFDITVASEIMAIFCLSNDLEDLEKRIGNITIAYTRDKKPVYAKDLKAHGPMTVLLKDAIRPNVTQTLENNPAIIHGGPFANIAHGCNSVIATKTGLKLADYVVTEAGFGADLGAEKFLDIKCRKSNLKPSCVVIVATIRALKMHGGVAKDDLKNENVEALKKGLVNLERHIENVKKFGLPVAIAVNHFIKDTDSEVKALIDFCDSLGVKASLC

SEQ ID NO: 196458 - protein, 419 aa, Unknown
  Bacterial polypetide isolated from the Sargasso Sea
MANYPSDLEIANAANKKPIIEIAKTLDIDEKHLVRFGDDKAKLNTDFTNSLSKNDDGKLILVTAISPTPAGEGKTTTSVGLVDGLCHVGKKAMICLREPSLGPCFGMKGGAAGGGYAQVIPMTDINLHFTGDFHAIGAAHNLLSALIDNHIHWSNELNIDPRRITWKRVVDMNDRSLRDITCGLGGTGNGIPRQSGFDITVASEIMAVFCLASDIDDLQKRIGNIVIGYTRSNEPVRAKELNADGAITALLKDAFQPNLVQTLENNPAFMHGGPFANIAHGCNSVVSTKTALKLADYVVTEAGFGADLGAEKFFDIKCRKSGLKPDAVVLVATTKALKMHGGIKKEDLGSENVDAVSMGCKNLEKHIENIGKFGVPVVVAINDYVTDTEKEHTAIINYCKNLGVHAKFLHIGKMEARSG

SEQ ID NO: 196459 - protein, 562 aa, Unknown
  Bacterial polypetide isolated from the Sargasso Sea
MGAVKSDIEIARKAKMRPIKDILAKIKVPDTNKAYSPMGRHIAKINLKYLETIKNKKDGHLILVTAITPTPAGEGKTTVSVGLSDGLNKIGKKSIVCLREPSLGPSFGMKGGAAGGGYSQVVPMEQINLHFTGDFHAITSAHNLLSALIDNHIYWGNKLDIDDKKIVWKRVMDMNDRALRAININTKGASKNFPREDGFDITVASEVMAIFCLSNNLKDLEKKIGNITIAYKKDGKPIYAKDLNAQGPMTVLLKEAIRPNVTQTLENNPAFIHGGPFANIAHGCNSVIATKSALKLSDYVVTEAGFGADLGAEKFLDIKCRKANLIPSCVVIVATVRALKMHGGVEKEDLKKENIQAVKKGLVNLERHINNIKKFGINPVVAINHFVLDTKAEIKIISNFCKKLNVEVSECTHWANGGKGTKDLAKKAVEICKKSKKNNFKFLYNEKETLWNKIETIAKEIYKASKITADEKVKEELIKFEKNGYGKLPVCIAKTQYSFSIDPKLKGAPSGHEIPIREVRLSSGCEFIVVICGSIMTMPGLPRVPAADSIKINNKGEIDGLF

SEQ ID NO: 196460 - protein, 558 aa, Unknown
  Bacterial polypetide isolated from the Sargasso Sea
MSKSDIEIAREAKMKPIQEILDGVGVPDKTEAYSPISRYIAKIKLEYLEKFKDKKDGKLILVTAITPTPAGEGKTTTSVGLSDGLNKIGKKSIVCLREPSLGPSFGMKGGAAGGGYAQVVPMEQINLHFTGDFHAITSAHNLLSALIDNHIYWGNKLNIDVRRIVWKRVLDMNDRALRSININLGGVANGFPREDGFDITVASEIMAIFCLSNDLHDLENRIGNITVAYTRDKKPIYAKDLNAQGPMTVLLKDAIRPNVTQTLENNPAIIHGGPFANIAHGCNSVLATKTALKLSDYVVTEAGFGADLGAEKFLDIKCRKSGLKPSCVVIVATIRALKMHGGVKKDELKNENVDAVKKGLVNLERHIENIQKFGLPVTVAINHFVLDTDKEIDEVTRFCEEKDIKASISKHWEKGGEGATNLANDVVELCEKDSDFKFLYDDKTSLFKKIETIAKELYRASEVVADTKIRDQLKAFEERGYQSLPICIAKTQYSFSTDPNLKGAPSGHVLPIREVRLSSGAEFIVVVCGAIMTMPGLPKVPAADSIRINKKGETEGLF

SEQ ID NO: 196461 - protein, 374 aa, Unknown
  Bacterial polypetide isolated from the Sargasso Sea
LKANVPRDDSFDITVASEVMAIFCLSNSIKDLEEKIGNITIAYTKDKKPIYAKDLKAHGPMTVLLKEAIRPNAVQTLENNLAIIHGGPFANIAHGCNSIIATKTALKLSEYVITEAGFGADLGAEKFLDIKCRKADLKPSCVVLVATIRALKMHGGLEKDDLKNENLDALKKGMPNLERHIENIKKFGLEVVVAINHFITDTAKEVKIIQEKCAKLGVKASLCTHWSNGGSGTKDLANNVVELCKKSDTSKFKYLYSDQTPILEKVEKVAKEIYNAKDIEVDEKIKEQVKKIEQAGFGRFPVCIAKTQYSFSTDPKLKGAPSGHTLSIREIRLSSGAEFVVVVCGSIMTMPGLPRVPAADNIKLNKKGEIEGLF

SEQ ID NO: 196462 - protein, 561 aa, Unknown
  Bacterial polypetide isolated from the Sargasso Sea
MSEIKSDIQIAREAKMQPINDVLNKINVPDESTAFSPMGRHIAKINLEYLDTLKDKPDGKLILVTAITPTPAGEGKTTTSVGLHDGLNKIGKKSIVCLREPSLGPSFGMKGGAAGGGYAQVVPMEQINLHFTGDFHAITSAHNLLSALIDNHIYWGNKLNIDVRRVVWKRVMDMNDRSLRSIVVDLGGVANGYPRQDGFDITVASEIMAIFCLAVDLGDLEKRIGNITIGYTRDKKAIYAKDLNAQGPMTVLLKDAIRPNVTQTLENNPAIIHGGPFANIAHGCNSVIATKAGLKLADYVVTEAGFGADLGAEKFLDIKCRKSGIKPDCVVIVATIRALKMHGGVAKDDLKKENVNALKDGMVNLRRHINNIRKFGLPVTVAVNHFITDTDEEMKTLLDFCETQGVKASKCTHWSHGSQGTLELAKNVAEICEDNKDTFKYLYEDDMPLFKKIEKIAQEIYSASEVVADTKVRQQLKDFEEKGFGKLPVCIAKTQYSFSTDPGLKGAPTGHVLPVREVRLSSGAEFVVVVCGEIMTMPGLPRVPAADSIKLNEKGEIEGLF

SEQ ID NO: 196463 - protein, 403 aa, Unknown
  Bacterial polypetide isolated from the Sargasso Sea
NIDDKRIVWKRVMDMNDRALRAININTKGASKDFPREDGFDITVASEVMAIFCLSNNLEDLEKKIGNITIAYNKDGKPIYAKDLNAQGPMTVLLKEAIRPNITQTLENNPALIHGGPFANIAHGCNSIIATKTALKLSDYVVTEAGFGADLGAEKFMNIKCRKANLKPSCVVIVATIRALKMHGGVEKEDLKKENIEALKKGLVNLERHINNVKKFGIEAIVAINHFVMDTENEINILKEYCNSIGIKVNKSTHWSDGGEGAKALAQNVVEICEKSNQDNFKFLYNDNETLWNKVEKIAIEIYKASKITADDKVKEQLKIFEKNGYGKLPVCIAKTQYSFSVDPKLKGAPSDHEIPIREVRLSSGAEFIVVICGSIMTMPGLPKVPAADSIKLNKKGEIEGLF

SEQ ID NO: 196464 - protein, 453 aa, Unknown
  Bacterial polypetide isolated from the Sargasso Sea
MKGGAAGGGYAQVIPMTDINLHFTGDFHAIGAAHNLLSALIDNHIHWDNELNIDPRRITWKRVVDMNDRSLRDITCGLGGTGNGIPRQSGFDITVASEIMAVFCLASDIEDLQKRIGNIVIGYTKSNEPVRASQLKADGAITALLKDAFQPNLVQTLENNPAFMHGGPFANIAHGCNSVVSTKTALKLADYVVTEAGFGADLGAEKFFDIKCRKSGLKPDAVVLVATTKALKMHGGVKKEDLGTENVDAVTLGCKNLEKHVENINKFGVPVVVAINDYVSDTEKEHTAIINFCKNLGVQCKISSHWEKGGQGASELAEEVAKVADSNMSEFNILYEDDMSLWDKTKYIAQNIYGAQDIIADKRVRNKFKKLEDDGFGSYPVCMAKTQYSFSTDPLLMGAPTGHEVPIREVRLSAGAEFVVVVCGEIMTMPGLPRVPAAEAIGLDKNNEIAGLF

SEQ ID NO: 196465 - protein, 469 aa, Unknown
  Bacterial polypetide isolated from the Sargasso Sea
AKVNVPDENHAFSPMGRHIAKINLEYLNNLKNKDGKLILVTAITPTPAGEGKTTTSVGLNDGLNKIGKKSIVCLREPSLGPSFGMKGGAAGGGYAQVVPMEQINLHFTGDFHAITSAHNLLSALIDNHIYWGNKLNIDVRRIVWRRVMDMNDRSLRSVIVDLGGVANGYPRQDSFDITVASELMAIFCLAKNLKDLEERIGNITIGYTREKKSIQAKDLNAHGPMTVLLKEAIRPNVTQTLENNPAIIHGGPFANIAHGCNSVIATKAGLKLADYVVTEAGFGADLGAEKFLDIKCRKSGIKPDCVVIVATIRALKMHGGVNKEDLKKENVSALTNGLVNLRRHINNIRKFGLPVTVAVNHFITDTDNEMKILLDFCETQGVKASKCTHWSNGSEGTKELAQTVSDICDNKKDTFKYLYEDDVSLFKKVEKIALEIYGASEVVADTKVRQQLKDFEEKGYKKLPVVLQK

SEQ ID NO: 196466 - protein, 399 aa, Unknown
  Bacterial polypetide isolated from the Sargasso Sea
DVRRIVWGRVVDLNDRSLRAVNVNLGGVANGFPREEKFDITVASEVMAIFCLSTSLEDLQNRLGNIIIGYTRDRKEIRARELNADGAMTTLLKDAFLPNLVQTLEKNPAMIHGGPFANIAHGCNSLIATQTALKLSDYVVTEAGFGADLGAEKFLDIKCRKGDLKPSAIVLVATVRALKMHGGVDKKELKGENVEAVKKGLANLEQHIANIKKFNVPVSVAINHFSLDTESELKVVEDCCENLGVKAFNCKHWADGGAGATDLAEHIASVAESGEADLKHLYTSETTLWEKMRTIATEIYGADDIIADQKIRSQFEELQKDYGSYPICVAKTQYSFSTDPNLRGAPKGHVVPIREIRLAAGAEFLVVVCDKIMTMPGLPRVPAADAIHLNKDGEIEGLF

SEQ ID NO: 196467 - protein, 437 aa, Unknown
  Bacterial polypetide isolated from the Sargasso Sea
MEHINLHFTGDFHAITSANNLLASLIDNHIYWGNKLEIDTRRVVWKRCVDLNDRALREITVNLGGVSNGFPRTDGFNITVASEVMAIFCLANDLKDLERRLGNITVAYTRSKKPIFAKDLKAEGPMTVLLKQALMPNLVQTLENNPAIIHGGPFANIAHGCNSVIATKTSLKIADYVVTEAGFGADLGAEKFLDIKCRKADLKPDGVVLVATIRALKMHGGVEKSDLGKENIEAVKSGISNLKRHVENIKKYGLPVIVAINHFVADTENEMRILQEECEKIGVEAVPCKHWSDGGKGTVDLAKKVVDLVDQKNSFKFLYEDKISLLDKIEKIAKEIYGADEIIADNKIRSQLKQFEENGYGDFPICIAKTQYSFSTDPTLKGAPSGHSVPIRELRLSSGAEFIVVICGEIMTMPGLPSIPAADSIKLNDKGEIEGLF

SEQ ID NO: 196468 - protein, 560 aa, Unknown
  Bacterial polypetide isolated from the Sargasso Sea
MSDVKSDIQIAREAKMQPIKDILSKVGVPDENFAFSPMGRHIAKINLDYLNTLKKENGKLILVTAITPTPAGEGKTTTSVGLNDGLNKIGKKSIVCLREPSLGPSFGMKGGAAGGGYAQVVPMEQINLHFTGDFHAITSAHNLLSALIDNHIYWGNKLNIDVRRIVWRRVMDMNDRSLRSIIVDLGGVANGYPRQDSFDITVASELMAIFCLATDLKDLENRIGNITIGYTRDKQAICAKDLNAQGPMTVLLKEAIRPNVTQTLENNPAIIHGGPFANIAHGCNSVIATKAGLKLADYVVTEAGFGADLGAEKFLDIKCRKSNLKPDCVVIVATIRALKMHGGIAKEDLKKENVSALKEGMVNLRRHINNIRKFGLPVTVAVNHFITDTEDEMKTLLDFCETQGVKASKCTHWSNGSEGTIELAKNVTEICEDKKDTFKFLYEDDLPLFKKIEKIAQEIYSASEVVADTKVRQQLKDFEEKGYGKLPVCIAKTQYSFSTDPNLKGAPTGHVLPVREVRLSSGAEFIVVVCGEIMTMPGLPRVPAADSIKLNDKGEIEGLF

SEQ ID NO: 196469 - protein, 307 aa, Unknown
  Bacterial polypetide isolated from the Sargasso Sea
LKPNLVQTLENNPAFVHGGPFANIAHGCNSIISTNLALKLSDFVITEAGFGADLGAEKFFDIKCRYLDEKPSVAVVVATVRALKMHGGVKIDHLKEENNDAVNAGSANLIRHLENISKFGVPTVVCINRFINDTDSEISTLIEAIDKSGIKSKVILSNHWAEGGSGITDLAKEVIDMCENADRDFKHLYELEEGIEYKITKIAKEIYRAKDVILSKKVKTQISDLEKNGFSKLPICMAKTQYSFSTDPTLKNAPVDHDIEIRELRLSAGAGFIVAISGDIMTMPGLPRKPSAENIYLDRGGNIEGLF

SEQ ID NO: 196470 - protein, 418 aa, Unknown
  Bacterial polypetide isolated from the Sargasso Sea
MSAVKSDIEIARAAKMKPIQEILDGINVPDKAEVYSPMGRYIAKIKPEYLNTLKDKNDGKLILVTAITPTPAGEGKTTTSVGLCDGLNKIGKKSIVCLREPSLGPSFGMKGGAAGGGYAQVVPMEQINLHFTGDFHAITSAHNLLSALIDNHIYWGNKLNIDVRRIVWKRVMDMNDRSLRSINVNLGGVANGYPREDGFDITVASEIMAIFCLSNDLKDLENRIGNITIGYTRERKPVYAKDLNAQGPMTVLLKDAIRPNITQTLENNPAIIHGGPFANIAHGCNSVIATKTGLKLSDYVVTEAGFGADLGAEKFLDIKCRKSGLKPDCVVIVATIRALKMHGGVAKEDLKKENVDALKKGLVNLERHINNTKKFNLPVVVAVNHFITDADEEVNILIDFCKKLGVKSSLCTHWSNGG

SEQ ID NO: 196471 - protein, 353 aa, Unknown
  Bacterial polypetide isolated from the Sargasso Sea
YGIFCLATDLKDLERRLGNITIAYTRDKKPILAKDLKAEGPMTVLLKQAFLPNLVQTLENNPAIIHGGPFANIAHGCNSVVATKTSLKIADYVVTEAGFGADLGAEKFFNIKCRKSNLKPDGVVLVATIRALKMHGGVEKNNLGSENIDAVRKGFSNLARHVKNIKKFGLPVIVAINHFDADTDNEIKALDEECKKISVDAVSCKHWSKGSDGTVELAQKVVDLVNEENTFNFLYKEKISLLEKIKIIAKEIYSADDVLADKKIRDQLKQFEESGYGNFPICIAKTQYSFSTDPSLKAAPSGHSIPIREVRLSSGAEFIVVICGEIMTMPGLPSVPAANSIHLNDDGQIEGLF

SEQ ID NO: 196472 - protein, 481 aa, Unknown
  Bacterial polypetide isolated from the Sargasso Sea
MSKSDIQIAREAKMDPINKVLAKINVPDDPSAFSPMGRHIAKINFDYLQTLEKKKNGKLILVTAITPTPAGEGKTTVSVGLSDGINKIGKKSIVCLREPSLGPSFGMKGGAAGGGYAQVVPMEQINLHFTGDFHAITSAHNLLSALIDNHIYWGNKLNIDDKKIVWKRVMDMNDRALRAININTKGAAKDFPREDGFDITVASEVMAIFCLSNNLEDLEKKIGNITIAYNKDGKPIYAKDLNAQGPMTVLLKDAIRPNVTQTLENNPALIHGGPFANIAHGCNSIIATKAALKLSDYVVTEAGFGADLGAEKFMDIKCRKANLKPSCIVIVATIRALKMHGGVEKEDLKKENIEALKKGLVNLERHINNVKKFGVEAVVAINHFVMDTENEINVLKEYCNSIGIKVSKSTHWSEGGEGAKDLAKNVVEICNSSNQNNFKFLYSENETLWNKVEKIAKEIYKAKKITADEKIKEQLKTFEKN

SEQ ID NO: 196473 - protein, 540 aa, Unknown
  Bacterial polypetide isolated from the Sargasso Sea
MSKSDIQIAREAKMKPIHEVLAKINVPNEPDAFSPMGRHIAKINFEYLEKLESKKNGKLILVTAITPTPAGEGKTTVSVGLADGINKIGKRSIVCLREPSLGPSFGMKGGAAGGGYAQVVPMEQINLHFTGDFHAITSAHNLLSALIDNHIYWGNNLNIDDKKIVWKRVMDMNDRALRAININTKGVAKDFPREDGFDITVASEVMAIFCLSNNLQDLEKRIGNITIAYNKNGEPIYAKDINAQGPMTVLLKEAIRPNVTQTLENNPAIIHGGPFANIAHGCNSVIATKTALKLSDYVVTEAGFGADLGAEKFMDIKCRKSNIKPSCVVIVATIRALKMHGGVEKEDLKNENIEALKKGLVNLERHINNVKKFGVETIVAINHFVMDTDKEVNVLQEYCKSIGVKVNKCTHWAEGGKGTQELANNVVEICEKSNLNNFKFLYDERDNLWNKIEKIAKEIYRASKITADEKVKEQLNIFEKNGYGKLPVCIAKTQYSFSVDPKLKGAPTDHEIPIREVRLSSGAEFIVVICGSIMTMPGLP

SEQ ID NO: 196474 - protein, 418 aa, Unknown
  Bacterial polypetide isolated from the Sargasso Sea
MAPTDIEIAREANLAPITEIASKLQIPEDALELYGNNKAKISNDYITSLQSEPDGKLVLVTAITPTPAGEGKTTMTVGLGDALNRIGRRAGICLREPSLGPCFGMKGGAAGGGYAQVVPMEDINLHFTGDMHAIGVAHNLLSAMVDNHIYWGNKEEIDVRRVQWRRVVDMNDRALRDVVSSLGGVANGFPRQTGFDITVASEIMAIFCLAENLTDLTSRLENIVIGFTSDKRPVRAGQLEAHGAMAVLLKNAIAPNLVQTLENNPAFVHGGPFANIAHGCNSVIATKAMLKMSDIVVTEAGFGADLGAEKFFDIKCRKAGLKPDVAVLVATTRALKMHGGVARADLDAENLDAVKQGLANLDQHDENIAKFGVPRVVGINRFTGDTDAEIKIIVDYCEAKGLPVRICTHWANGGEGAE

SEQ ID NO: 196475 - protein, 380 aa, Unknown
  Bacterial polypetide isolated from the Sargasso Sea
MKTDIEIAREAKPKRIEEIASSIGISDEYLEHYGKFKGKVNLSINDEKLKDQDNGKLILVTAISPTPAGEGKTTTSVGLVDGLCNIGKKAMICLREPSLGPCFGMKGGAAGGGHAQVIPMTDINLHFTGDFHAIGAAHNLLSALVDNHIHWSNDLDIDPRKITWKRVVDMNDRSLREVTCGLGGTGNGIPRQSGFDITVASEIMAVFCLASDADDLKKRIGNIVIGYSRSNEPVRAKQLKADGAISALLQDAFQPNLVQTLENNPAFIHGGPFANIAHGCNSVVATKTALKLADYVVTEAGFGADLGAEKFFDIKCRKSGLKPDAVVLVATTKALKMHGGVKKEDLGSENVDAVIGGCKNLERHVKNIRKIWGSRYSWHK

SEQ ID NO: 196476 - protein, 458 aa, Unknown
  Bacterial polypetide isolated from the Sargasso Sea
MDVLSDIEIARKNQMVPIEKVASKLKLEENSLQKFGHHIAKIDTNTLKNQNKNGKLILVTAISPTPAGEGKTTTSVGLNDALNKIGKQSLVCLREPSLGPCFGVKGGAAGGGYAQVVPMDKINLHFTGDFHAITSAHNLLASMIDNHIYWGNDLNIDTRRIVWGRVVDLNDRALRNTNINLGGIANGFPREDKFDITVASEVMAIFCLSTSLSDLQKRLGNIIIGYTRDKKEIKARDVNADGAMTTLLKDAFLPNLVQTLEENPAIIHGGPFANIAHGCNSLIATQTALKLSDYVVTEAGFGADLGAEKFLDIKCRKGNLNPSAIVIVATVRALKMHGGMDKKELKNENLDALRKGLSNLQQHISNMKKYGVPVSVAINHFITDTDNELSIISECCDELGIKSFNCTHWSNGGAGAETLAQHIVDVTTEENPKIKHLYPNEMKLWDKVQKIAQDIMSK

SEQ ID NO: 196477 - protein, 505 aa, Unknown
  Bacterial polypetide isolated from the Sargasso Sea
MKTDIEIAREAEPKTIDKIADQLGIGEEYLERYGKFKSKIDLSINQEQLKDSKNGKLILVTAISPTPAGEGKTTTSVGLVDGLCHIGKKAMICLREPSLGPCFGMKGGAAGGGHAQVIPMTDINLHFTGDFHAIGAAHNLLSALIDNHIHWDNELDIDPRRITWKRVVDMNDRSLRDITCGLGGVGNGIPRQSGFDITVASEIMAIFCLASDIDDLKKRIGNIVIGYSRSNEPIRAKQLNADGAITALLKDAFQPNLVQTLENNPAFIHGGPFANIAHGCNTVVATKLALKLADYVVTEAGFGADLGAEKFFDIKCRKSGLKPDAVVLVATTKALKMHGGVTKDNLGAENVDAVTKGCKNLKRHIENIKKFGVPVMVAINDYVTDTKDEHAAIIQYCKEIGVECRISSHWEKGGKGASELAEEVVKIADSNSSDFKPLYDNKMSLWDKTQFIAQNIYGASEIIADKKVRNQFKKLEDDGFGEYPICMAKTQYSFSTDPLLMGAPS

SEQ ID NO: 196478 - protein, 332 aa, Unknown
  Bacterial polypetide isolated from the Sargasso Sea
MAKSDIQIAREAKMKPIQEILDGINVPDKPEVYSPISRYIAKIKLEHLEKLKEKKDGKLILVTAITPTPAGEGKTTTSVGLSDGLNKIGKNSIVCLREPSLGPSFGMKGGAAGGGYAQVVPMEQINLHFTGDFHAITSAHNLLSALIDNHIYWGNKLNIDVRRIVWKRVLDMNDRALRSININLGGVANGFPREDGFDITVASEIMAIFCLSNDLKDLEKRIGNITVAYTRDRKPIYAKDLNAHGPMTVLLKDAIRPNVTQTLENNPAIIHGGPFANIAHGCNSVLATKTALKLSDYVVTEAGFGADLGAEKFLDIKCRKSGLKPNCVVIVA

SEQ ID NO: 196479 - protein, 508 aa, Unknown
  Bacterial polypetide isolated from the Sargasso Sea
SKLNFNYIDKLKEKKSNLILITAITPTPAGEGKTTTSVGLNDGLNKIGKKSIVCLREPSLGPSFGMKGGAAGGGYAQVVPMEQINLHFTGDFHAITSAHNLLSALIDNHIYWGNKLNIDPENILWKRVVDLNDRGLRKIKINLERLKANIPRDDSFDITVASEVMAIFCLSNSIKDLEEKIGNITIAYTKDKKPIYAKDLKANGPMTVLLKEAIRPNAVQTLENNLAIIHGGPFANIAHGCNSIIATKTALKLSEYVITEAGFGADLGAEKFLDIKCRKAGLKPSCVVLVATIRALKMHGGVEKDDLNKENLEALKKGMPNLEKHIQNIKKFGLEVIVAINHFITDTDKEVKIIQEQCAKLRVKVSLCTHWSEGGNGTKDLANNVVEICNKSDRSKFKYLYSDQLPILEKVEKIAKEIYNAKGIEVDEKIKEKIKKIEQAGFGRFPVCIAKTQYSFSTDPKLKGAPSGHTLSIREIRLSSGAEFVVVVCGAIMTMPGLPRVPAAYNIK

SEQ ID NO: 196480 - protein, 560 aa, Unknown
  Bacterial polypetide isolated from the Sargasso Sea
MSKSDIQIAREANMKPISEILAKINVPDDAKAFSPMGRHIAKINFEYLETLENKKEGKLILVTAITPTPAGEGKTTVSVGLSDGINKIGKKSIVCLREPSLGPSFGMKGGAAGGGFAQVVPMEQINLHFTGDFHAITSAHNLLSALIDNHIYWGNKLNIDDKKIVWKRVMDMNDRALRAININTKGVAKDFPREDGFDITVASEIMAIFCLSNNLQDLENRIGNITIAYDKNNKPIYAKDLNAQGPMTVLLKEAIRPNVTQTLENNPALIHGGPFANIAHGCNSVIATKTALKLSDYVVTEAGFGADLGAEKFMDIKCRKSNLKPSCIVIVATVRALKMHGGVEKEDLKKENIEALKKGLVNLERHINNVKKFGVEAVVAINHFVMDTENETNALEEYCNKIGVKVSKCTHWSNGGEGTKDLAKKVTEIADNSNSKNFKFLYEEKDTLWNKIEKIAKEIYKANSITANETVKEQLKTFENNGYGNLPVCIAKTQYSFSVDPKLKGAPTGHEIPIREVRLSSGAEFIVVVCGSIMTMPGLPRVPAADSIKLNDKGEIEGLF

SEQ ID NO: 196481 - protein, 330 aa, Unknown
  Bacterial polypetide isolated from the Sargasso Sea
MSDIEIARAAKKIHIRDVAAKVNIPEENLIPYGHDAAKINFDFIEKSKSNPDGKLILVTAINPTPAGEGKTTTSVGLNDGLNKIGKKSIVCLREPSLGPCFGMKGGAAGGGYAQVVPMEEINLHFTGDFHAITSAHNLLSSLIDNHIYWGNELQIDQRRITWGRVVDLGDRSLRKVNVNLGGVSNGFPREDKFDITVASEIMAIFCLANDIDDLQKRIGDIIIAYKRDKTPIYARDVKADGPMTVLLKNALMPNLVQTLENNPAIIHGGPFANIAHGCNTVIATKAGLKLADYVVTEAGFGADLGAEKFLDIKCRKAGLTPKCCCYCCYS

SEQ ID NO: 196482 - protein, 418 aa, Unknown
  Bacterial polypetide isolated from the Sargasso Sea
LSALIDNHIYWGNKLNIDDKKIVWKRVMDMNDRALRAININTKGVAKDFPREDGFDITVASEVMAIFCLSNNLQDLEKRIGNITIAYDKNNKPIYAKDLNAQGPMTVLLKEAIRPNVTQTLENNPALIHGGPFANIAHGCNSVIATKTALKLSDYVVTEAGFGADLGAEKFMDIKCRKSNLKPSCIVIVATIRALKMHGGVEKDNLKKENIEALKKGLVNLERHIYNIKKFGVEAVVAINHFVMDTENEIKSLEEYCNKIGVKVSKCTHWSEGGEGTKDLAKKVTEIADNSNSEKFKFLYDEKDTLWNKIEKIAKEIYRAKSITADENVKKQLKTFENNGYGNLPVCIAKTQYSFSVDPKLKGAPSDHEIPIREVRLSSGAEFIVVVCGSIMTMPGLPRVPAADSIKLNDKGEIEGLF

SEQ ID NO: 196483 - protein, 337 aa, Unknown
  Bacterial polypetide isolated from the Sargasso Sea
IGNITVAYTRDKKPIYAKDLNAHGPMTVLLKDAIRPNMTQTLENNPAIIHGGPFANIAHGCNSVIATKTGLKLADYVVTEAGFGADLGAEKFIDIKCRKSNLKPDCVVIVATIRALKMHGGVAKDDLKNENVKALNKGLVNLERHINNVRKFGLPVVVAVNHFITDTDKEVNALMDFCKTLGVKSSICKHWSDGGEGAKDLANIVVDISNNKNTFKFLYEDKMPLFKKIEIIAQEIYHASEVVADTKIRDQLKDFESKSYGNLPICIAKTQYSFSTDPSLKGAPTGHVVPIREVRLSSGAEFIVVICGAIMTMPGLPRVPAADSIKLNDKGEIEGLF

SEQ ID NO: 196484 - protein, 452 aa, Unknown
  Bacterial polypetide isolated from the Sargasso Sea
GGAAGGGNAQVVPMEQINLHFTGDFHAITSAHNLLSALIDNHIYWGNKLNIDEKKIVWKRVVDMNDRALRFIDINTKGVAKDFAREDGFDITVASEVMAIFCLSNDLSDLEKRIGNITIAYDKNNKPVYAKDLNAQGPMTVLLKEAIRPNVTQSLEHNPAIIHGGPFANIAHGCNSVIATKSALKLSKYVVTEAGFGADLGAEKFLDIKCRKANIKPSCVVIVATVRALKMHGGVEKENLKTENIDALKEGLSNLDRHINNIKKFGIEPIVAINHFVLDTKKEIQTIINFCKNLNVEVSNCKHWAAGGSGTVDLAKKVVRVCNNSKKQKFKFLYNDSKSLWEKIEIIAKEIYRADKITATEEIKQKLKTFENNGFKNFPVCVAKTQYSFSTDPKLKGAPTNHEIPIRDVRLSSGAEFIVVICGSIMTMPGLPKIPAADKIKLNKKGQVEGLF

SEQ ID NO: 196485 - protein, 561 aa, Unknown
  Bacterial polypetide isolated from the Sargasso Sea
MSEVKSDIQIAREAKMRPINDILAKVNVPDESTAFSPMGRHIAKINLEYLDTLKNKPDGKLILVTAITPTPAGEGKTTTSVGLNDGLNKIGKKSIVCLREPSLGPSFGMKGGAAGGGFAQVVPMEQINLHFTGDFHAITSAHNLLSALIDNHIYWGNKLNIDVRRIVWKRVMDMNDRSLRSININLGGVANGFPREDGFDITVASEIMAIFCLANNLEDLEKRIGNITVAYTREKKPIFAKDLKAQGPMTVLLKDAIRPNVTQTLENNPAIIHGGPFANIAHGCNSVIATKAGLKLADYVVTEAGFGADLGAEKFLDIKCRKSDLKPSCVVIVATIRALKMHGGVAKDDLKNENVDALKKGLVNLQRHVENVKKFGLPVAIAVNHFIKDTDKEVKALISFCDGLGVKASLCTHWANGGEGTKDLAALVADLCEKNDTKFKFLYENKTPLFKKIETIAKEIYRADEVIADTKIREQLKGFEESGYGDLPICIAKTQYSFSTDPSLKGAPTGHALPLREIRLSSGAEFIVVVCGAIMTMPGLPRVPAADSIKLNKKGEIEGLF

SEQ ID NO: 196486 - protein, 399 aa, Unknown
  Bacterial polypetide isolated from the Sargasso Sea
RRITWGRVVDLGDRSLRKVNVNLGGVSNGFPREDKFDITVASEIMAIFCLANDINDLQKRIGDIIIAYKRDKSPIYARDVKADGPMTVLLKNALMPNLVQTLENNPAIIHGGPFANIAHGCNTVIATKTGLKLADYVVTEAGFGADLGAEKFLDIKCRKAGLTPSVVVIVATVRALKSHGGVEKADLNNENVDAVEKGFENLQRHIENIQSFGLQTIVAINSFTLDTEAEGKVISDGCEKMGVKAILCSHWANGGDGTLELAEEVVKISESSDPSKFKYMYEDNVSLEEKIRSVAQKIYRADDIVIDKSVSDQLKGFEENGYGNLPICIAKTQYSFSTNPSLRGAPNGFTVPVREVRLSAGAGFIVVVTGQIMTMPGLPKVPSANSIMLDEKGLIQGLF

SEQ ID NO: 196487 - protein, 555 aa, Unknown
  Bacterial polypetide isolated from the Sargasso Sea
MAVLSDIEIARENSMAPIEEIASKLDLKDQNLQKFGHHIAKIDTQHIESNNKNGKLILVTAISPTPAGEGKTTTSVGLSDGLNKIGKQSLVCLREPSLGPCFGVKGGAAGGGYAQVVPMDKINLHFTGDFHAITSAHNLLASMIDNHIYWGNDLGIDTRRVVWGRVVDLNDRALRNINVNLGGIANGYPREDKFDITVASEVMAIFCLSTSLDDLQNRLGNIIVGYTREKKEITARDLNADGAMTTLLKDAFLPNLVQTLEKNPAIIHGGPFANIAHGCNSLVATQTALKLSDYVVTEAGFGADLGAEKFLDIKCRKGKLNPSAIVIVATVRALKMHGGMDKKELKNENVEAVKKGLSNLKQHIANMQMYGAPVTVAINHFISDSEKELSAISDCCDSLNVKSFNCTHWSNGGAGTEDLAKHIVEITEQNAPKIKHLYPDEMKLWDKMKKIAQEIYGASDIIADQKIRMQFDDLEEKYGHYPICVAKTQYSFSTDPNLRGAPKDHVVPIREVRLAAGAEFLVVVCDKIMTMPGLPRVPAANAIHLNKNGDIEGLF

SEQ ID NO: 196488 - protein, 559 aa, Unknown
  Bacterial polypetide isolated from the Sargasso Sea
MAKTDIQIAREAKMKPIQEILDGINVPDKAEVYSPMGRHIAKIKTEYLDTLKDKKDGKLILVTAITPTPAGEGKTTTSVGLSDGLNKIGKKSIVCLREPSLGPSFGMKGGAAGGGYAQVVPMEQINLHFTGDFHAITSAHNLLSALIDNHIYWGNKLNIDVRRIVWKRVMDMNDRSLRSIVVDLGGIANGYPRQDGFDITVASEIMAIFCLAKDLKDLENRIGNITIGYTRDKNPIYAKDLNAQGPMTVLLKDAIRPNVTQTLENNPAIIHGGPFANIAHGCNSVIATKTALKLSDYVITEAGFGADLGAEKFINIKCRKSGLKPDCVVIVATIRALKMHGGIGKDELTNENVEALKKGVVNLERHIDNVRKFGLPVAVAVNHFVTDTEKEVKFLMDFCKNLGVDISLCTHWSNGGEGTKDLANTVVNICEKSKNTFKFLYEDKTPLFKKIETIAQEIYHASEVVADTKIRTQLKDFESKGYADLPICVAKTQYSFSTDPSLKGAPKGHVLPIREVKLSSGAEFIVVICGEIMTMPGLPRVPAADSIKINEKGETEGLF

SEQ ID NO: 196489 - protein, 431 aa, Unknown
  Bacterial polypetide isolated from the Sargasso Sea
MKGGAAGGGYAQVVPMEQINLHFTGDFHAITSAHNLLSALIDNHIYWGNKLNIDVRRVVWKRVMDMNDRSLRSIVVDLGGVANGYPRQDGFDITVASEIMAIFCLAEDLSDLEERIGNITIAYTRDKKPIYAKDLSAQGPMTVLLRDALRPNITQTLENNPAIIHGGPFANIAHGCNSLIATKASLKLGDYVVTEAGFGADLGAEKFLDIKCRKSGLKPHCVVLVATIRALKMHGEVAKVDLKNENVSALKKGLVNLERHIINVRKFGLPVTVAINHFITDSQSEVNAVLDFCKTQGVKASMCTHWSDGGKGATELAQNVVEICEENKNTFKFLYEDDLPLFKKIEKIGQEIYHASEVVADTKVRNQLKDFESKGFGKLPVCIAKTQYSFSTDPNLKGAPTGHVLPVREVRLSSGAEFIVVICGDIMTMPG

SEQ ID NO: 196490 - protein, 362 aa, Unknown
  Bacterial polypetide isolated from the Sargasso Sea
MSTFKTDIEIARAAKMKPIGEVLGKIAVPDDSSAFSPMGRHIAKINFEYLDTLKDKKDGKLILVTAITPTPAGEGKTTTSVGLSDGLNKIGKKSIVCLREPSLGPSFGMKGGAAGGGYAQVVPMEQINLHFTGDFHAITSAHNLLSALIDNHIYWGNKLNIDDKNIVWKRVMDMNDRALRAININTKGVAKDFPREDGFDITVASEVMAIFCLSNNLKDLEKKIGNITIAYTKDKKPIYAKDLNAQGPMTVLLKEAIRPNVTQTLENNPAFIHGGPFANIAHGCNSVIATKAALKLSDYVVTEAGFGADLGAEKFLDIKCRKANLKPSCVVIVATVRALKMHGGVEKDNLKKENIDALKKGL

SEQ ID NO: 196491 - protein, 552 aa, Unknown
  Bacterial polypetide isolated from the Sargasso Sea
MSDIEIARKATKKNISEIASKLNLDQNHLHPFGHHTSKIDFNKIKEKKENSKLILVTAITPTPAGEGKTTTSVGLSDGLCKIGKQSIVCLREPSLGPSFGMKGGAAGGGYAQVVPMENINLHFTGDFHAITSANNLLASLIDNHIYWGNKLKIDTRRVSWKRCVDLNDRALREITANLGGVANGYPRTDGFNITVASEVMAIFCLANNLEDLERRLGNITIAYTRDKKPVFAKDLNAHGPMTVLLKEALMPNLVQTLENNPAIIHGGPFANIAHGCNSIIATKTSLKLSDYVITEAGFGADLGAEKFLDIKCRKGDLVPSAVVLVATVRALKMHGGVDKKDLQTENIEAVIKGTSNLKRHIENIQKFGLPVVVAVNHFVADTDKEIEVLKKECEKINIEAITCEHWSKGGNGTLDLANKVVELADQENNFKFIYDENIHLIDKVKNIAKEIYRADDIIADSKIRDQLKLFEEQGYGNFPICIAKTQYSFSTDPSLKGAPTNHSLPIREVRLSSGAEFIVVICGEIMIMPGLPSVPAADSIRLNSQGEIEGLF

SEQ ID NO: 196492 - protein, 558 aa, Unknown
  Bacterial polypetide isolated from the Sargasso Sea
MSYKSDIEIARSAEKKPIQEVGAHLGIPAEHLLPYGHDKAKVSQEFINGVQDKENGKLILVTAINPTPAGEGKTTTTVGLGDGLNKIGKNAMICIREASLGPNFGMKGGAAGGGHAQVIPMEDMNLHFTGDFHAITSAHSLLSAMIDNHIYWGNDLGIDTRRVVWRRVVDMNDRALRQITASLGGISNGFPREAGFDITVASEVMAILCLAKDLNDLQTKLGNMIVAYRRDRSPVFCRDIKADGAMTVLLKDAIKPNLVQTLENNPAFVHGGPFANIAHGCNSLIATQTALKLSDYVVTEAGFGADLGAEKFLNIKCRKAGLSPAVIVLVATIRAMKMNGGVAKEDLGQENVSAVKFGCANLGCHIENLKSFGVPVIVAINHFVKDTQNEIDAVMQFVKSQGSEAIVSKHWEFGSEGSVDLAKRVSEIADSEVSDFAPIYPDEMPLAEKIQTICKRIYRADEALIDKKIYDQLKQWEEQGYGDLPICMAKTQYSFSTDPNLRGAPTGHTVPVREVRISAGAGFIVVVCGEIMTMPGLPRVPAAESIYLNKFGEIEGLF

SEQ ID NO: 196493 - protein, 366 aa, Unknown
  Bacterial polypetide isolated from the Sargasso Sea
MAILSDIEIARENSMVPIEEIASKLDLKDQNLQKFGHHIAKIDAQNIENNNKDGKLILVTAISPTPAGEGKTTTSVGLNDGLNKIGKQSLVCLREPSLGPCFGVKGGAAGGGYAQVVPMDKINLHFTGDFHAITSAHNLLASMIDNHIYWGNDLGIDTRRVVWGRVVDLNDRALRNINVNLGGIANGFPREDKFDITVASEVMAIFCLSTSLEDLQNRLGNIIVGYTREKKEITARDLNADGAMTTLLKDAFLPNLVQTLEKNPAIIHGGPFANIAHGCNSLVATQTALKLSDYVVTEAGFGADLGAEKFLDIKCRKGKLNPSAIVIVATVRALKMHGGMDKKELKNENVVAVKKGLSNLKQHIAN

SEQ ID NO: 196494 - protein, 401 aa, Unknown
  Bacterial polypetide isolated from the Sargasso Sea
MAVLTDIEIARQNKMVPIEEVAKKLDLDEQSLHKFGHHIAKLDTDKISIDSRHGKLILVTAISPTPAGEGKTTTSVGLNDALNKIGKKSLVCLREPSLGPCFGVKGGAAGGGYAQVVPMEKINLHFTGDFHAITSAHNLLASLIDNHIYWGNDLGIDTRRVVWGRVVDLNDRALRNINVNLGGIANGFPREDKFDITVASEVMAIFCLSTSLKDLQNRLGNIIIGYTRDRKEILARELNADGAMTTLLKDAFLPNLVQTLEKNPAIIHGGPFANIAHGCNSLVATQTALKLSDYVVTEAGFGADLGAEKFLDIKCRKGNLSPSAIAIVATVRALKMHGGMDKKELKNENVEALKKGLSNLEQHIINMKKYGVPVAVAVNHFIADTENELKCVREFCENLGV

SEQ ID NO: 196495 - protein, 418 aa, Unknown
  Bacterial polypetide isolated from the Sargasso Sea
MKSDIEIAQAAKLEKISSVADKLDIPQDSLEPYGHYKAKISMDFIKSLESKKDGKLILVTAISPTPAGEGKTTTSVGLGDALNHIGKKALVTIREPSLGPVFGMKGGAAGGGMAQVIPMEDINLHFTGDFNAIQLANNLLAAMLDNHIHHGNALGIDVRRVAWKRVLDMNDRALRKTVCSLGSVGNGYPREDGFDIVVASEIMAIFCLATSIKDLKEKLGNIVVAYSRTKEPILAKQLNAHGAMTVLLKNALSPNLVQTLENNPAMIHGGPFANIAHGCNSVIATKASLKLADYVVTEAGFGADLGAEKFLDIKCRKANLKPSVVVLVATIRALKYHGGCELENLNQEGCEFLEKGLVNLERHVNNLKNHYGLPVVVGINGFSFDTDKEREILQNKSNELNVPIVSSTHWADGGAGAK

SEQ ID NO: 196496 - protein, 517 aa, Unknown
  Bacterial polypetide isolated from the Sargasso Sea
DLSINDEKLKDSKNGKLILVTAISPTPAGEGKTTTSVGLVDGLCHIGKNAMICLREPSLGPCFGMKGGAAGGGHAQVIPMTDINLHFTGDFHAIGAAHNLLSALIDNHIHWDNQLDIDPRRITWKRVVDMNDRSLRDITCGLGGVGNGIPRQSGYDITVASEIMAVFCLASDIDDLKKRIGNMVIGYSRSNEPIRAKQLNADGAITALLKDAFQPNLVQTLENNPAFIHGGPFANIAHGCNSVVSTKLALKLADYVVTEAGFGADLGAEKFFDIKCRKSGLKPDAVVLVATTKALKMHGGIAKDNLGGENVDAVTKGCKNLERHIENIRKFGVPVIVAINDYVTDTKDEHDAIINYCKEIGVECRISSHWEKGGKGASDLAEEVVKIADSDSSEFKPLYDNKMSLWDKTEYIAKNIYGASEIIADKKVRNQFKKLEDDGFGEYPICMAKTQYSFSTDPLLMGAPSGHDVPIREVRLSAGAEFIVVVCGEIMTMPGLPRIPAAEGIDVDDEGLIQGLF

SEQ ID NO: 196497 - protein, 281 aa, Unknown
  Bacterial polypetide isolated from the Sargasso Sea
IAHGCNSVLATKTALKLSDYVVTEAGFGADLGAEKFLDIKCRKSGLKPSCVVIVATIRALKMHGGVKKDELKNENIDAVKKGLVNLERHIENIQKFGLPVTVAINHFVLDTDKEVDEVIKFCKQKGITASISKHWEKGGEGAVELANKVVEQCEKESEFKFLYNDKTSLFKKIETIAKELYRSSEVVADSKIRDQLKNFEESGYQSLPICIAKTQYSFSTDPNLKGAPSGHALPIREVRLSSGAEFIVVVCGAIMTMPGLPKVPAADKIRINDKGETEGLF

SEQ ID NO: 196498 - protein, 307 aa, Unknown
  Bacterial polypetide isolated from the Sargasso Sea
MTAYPSDLEIANAAHKKPIDEIASSIGIDQKNLIKFGDDKAKLNSDFIDSISKNKNGKLILVTAISPTPAGEGKTTTSVGLVDGLCHIGKKAIICLREPSLGPCFGMKGGAAGGGYAQVIPMTDINLHFTGDFHAIGAAHNLLSALIDNHIHWDNELNIDPRRITWKRVVDMNDRSLRDITCGLGGTGNGVPRQSGFDITVASEIMAVFCLASDIEDLQKRIGNIVIGYTKSNEPVRASQLNADGALTALLKDAFQPNLVQTLENNPAFMHGGPFANIAHGCNSVVSTKTALKLADYVITEAGFGAD

SEQ ID NO: 196499 - protein, 252 aa, Unknown
  Bacterial polypetide isolated from the Sargasso Sea
TVASEIMAIFCLANDLEDLEKRIGNITVAYTRDRKPIFAKDLNAHGPMTVLLKEAIRPNVTQTLENNPAIIHGGPFANIAHGCNSVIATKAGLKLADYVVTEAGFGADLGAEKFLDIKCRKSNLKPECVVIVATIRALKMHGGVAKDDLKNENVDALKKGLVNLERHIENVKKFGLPVAVAVNHFVADTDNEVKELINACDNMGVKATLCTHWSNGGEGTKELATHVVDLIDQKQANFKFLYDEKTPLLKES

SEQ ID NO: 196500 - protein, 495 aa, Unknown
  Bacterial polypetide isolated from the Sargasso Sea
ITPTPAGEGKTTTSVGLNDGLNKIGKKSIVCLREPSLGPSFGLKGGAAGGGYAQVVPMEQINLHFTGDFHAITSAHNLLSALIDNHIYWDNKLNIDVRRVSWRRVMDMNDRSLRSIIVDLGGVANGYPRQDSFDITVASELMAIFCLANDLKDLENRIANITIGYTRDKKPIYAKDLNAQGPMTVLLKDAIRPNVSQTLENNPAIIHGGPFANIAHGCNSVIATKAGLNLADYVVTEAGFGADLGAEKFLNIKCRKSGIKPDCVVIVATIRALKMHGGLSKDELKNENVNALKKGLVNLERHINNTRKFGIPVTIAVNHFITDTDKEMKTLLDFCKTQGVKASKCTHWSNGGEGATELAENVVEICKDNQTTFKYLYEDNLSLFKKIEKIAQEIYHASEVVADTKVRQQLKDFEEKGYGKLPVCIAKTQYSFSTDPNLKGAPTGHVLPVREVRLSSGAEFIVVVCGEIMTMPGLPRVPAADSIKLNDKGEIEGLF

SEQ ID NO: 196501 - protein, 320 aa, Unknown
  Bacterial polypetide isolated from the Sargasso Sea
KDLNAQGPMTVLLKDAIRPNVTQTLENNPAIIHGGPFANIAHGCNSVLATKTGLKLSDYVVTEAGFGADLGAEKFLDIKCRKSGLKPDCVVIVATVRALKMHGGLNKDQLKNENVDALNKGLVNLERHINNIKKFKLPVTVAINHFVLDTENEINSIINFCKKINVKASVCKHWEKGGDGTKELANDVVDLCEQKNEFKFLYNDDVPLFKKIETIAKELYAASEVVADTKVRDQLKNFQENGYQKLPICIAKTQYSFSTDPSLKGAPSGHVLPIREVRLSSGAEFIVVVCGSIMTMPGLPRVPAADSIKINDKGDTEGLF

SEQ ID NO: 196502 - protein, 436 aa, Unknown
  Bacterial polypetide isolated from the Sargasso Sea
INLHFTGDFHAITSAHNLLSAMIDNHIYWGNKLNIDEKKIVWKRVMDMNDRALRFIDINTSGVAKDFKRVDGFDITVASEVMAIFCLAKNLNDLEKKIGNITIAYNKDNQPIFAKDLNAHGPMTVLLKEAIRPNVTQSLEHNPAIIHGGPFANIAHGCNSVIATTAALKLSDYVVTEAGFGADLGAEKFLDIKCRKAGLKPSCVVIVATIRALKMHGGVEKENLKKEDTASLKKGLINLERHILNIKKFGLEPIVAINHFALDTKKEIDAVLNFCKDMKVQVSECKHWSMGGKGTTDLAKKVVKICKDSKKSNFKFLYEDSLNLWDKIEKIVKEIYRGDRVIANEDVKEKLKVFENNGYKNLPVCIAKTQYSFSTDPKLKGAPSNHEIPIREVRLSSGAEFIVVICGSIMTMPGLPKVPAANNIKLNKKGDVEGLF

SEQ ID NO: 196503 - protein, 487 aa, Unknown
  Bacterial polypetide isolated from the Sargasso Sea
EGKTTTSVGLSDGLNKIGKKSIVCLREPSLGPSFGMKGGAAGGGYAQVVPMEQINLHFTGDFHAITSAHNLLSALIDNHIYWGNKLNIDVRRIVWKRVLDMNDRALRSININLGGVANGFPREDGFDITVASEIMAIFCLSNDLHDLENRIGNITVAYTRDKKPIYAKDLNAHGPMTVLLKDAIRPNVTQTLENNPAIIHGGPFANIAHGCNSVLATKTALKLSDYVVTEAGFGADLGAEKFLDIKCRKSGLKPSCVVIVATIRALKMHGGVKKDELKNENVDAVKKGLVNLERHIENIQKFGLPVTVAINHFVLDTDKEVAEVTNFCEQKGVKASISKHWEKGGEGAIDLANDVVGLCEKDSDFKFLYDDKISLFKKIETIAKELYRASEVVADTKIREQLKAFEERGYQSLPICIAKTQYSFSTDPNLKGAPSGHVLPIREVRLSSGAEFIVVVCGAIMTMPGLPKVPAADSIRINEKGETEGLF

SEQ ID NO: 196504 - protein, 333 aa, Unknown
  Bacterial polypetide isolated from the Sargasso Sea
VAYTREKKPIYAKDLKAQGPMTVLLKEAIRPNITQTLENNPAIIHGGPFANIAHGCNSVIATKAGLKLADYVVTEAGFGADLGAEKFLDIKCRKSDLKPSCVVIVATIRALKMHGGVTKDDLKNENVEALKKGLINLERHVENVKKFGLPVAIAVNHFIKDTDDEVKALVDFCNKLGIKASLCTHWANGGEGTKELASHVADLCEKNENKFKFLYESKTPLFKKIETIAKEIYRADEVIADTKIRDQLKSFEEAGYGELPICVAKTQYSFSTDPNLKGAPTGHSLPIREIRLSSGAEFIVVVCGAIMTMPGLPRVPAADSIKLNKKGEIEGLF

SEQ ID NO: 196505 - protein, 480 aa, Unknown
  Bacterial polypetide isolated from the Sargasso Sea
GLGDGLNKIGKNAMICIREASLGPNFGMKGGAAGGGHAQVIPMDDMNLHFTGDFHAITSAHSLLSAMIDNHIYWGNDLGIDTRRVVWRRVVDMNDRALRQITASLGGVSNGFPREAGFDITVASEVMAILCLAKDLNDLQTKLGNMIVAYRRDRSPVFCRDIKADGAMTVLLKDAIKPNLVQTLENNPAFVHGGPFANIAHGCNSLIATQTALKLSDYVVTEAGFGADLGAEKFLNIKCRKAGLSPSLIVLVATIRAMKMNGGVAKEDLGQENVSAVKSGCANLGCHIENLKSFGVPVIVAINHFVKDTENEIDAVMEFVTSQGSEAIVSKHWEFGSEGSVDLARRTSEIADSEVSDFAPIYPDEMPLAEKIQTICKKIYRADEALIDKKIHDQLRQWEEEGYGDLPICMAKTQYSFSTDPNLRGAPTGHTVPVREVRISAGAGFIVVVCGEIMTMPGLPRVPAAESIYLNKFGEIEGLF

SEQ ID NO: 196506 - protein, 377 aa, Unknown
  Bacterial polypetide isolated from the Sargasso Sea
VDLGGVANGYPRQDGFDITVASEIMAIFCLSNDLKDLENRIGNITVAYTRDKKPIYAKDLNAHGPMTVLLKDAIRPNVTQTLENNPAIIHGGPFANIAHGCNSVIATKTGLKLADYVVTEAGFGADLGAEKFIDIKCRKSNLKPDCVVIVATIRALKMHGGVAKDDLKIENVKALNKGLVNLERHINNVRKFGLPVAVAVNHFITDTDKEVSALMDFCKTQGVKSSICKHWSDGGEGTKDLANIVVDICNNKNTFKFLYEDKIPLFKKIETIAQEIYHASEVVADTKIRDQLKDFESKGFGNLPICIAKTQYSFSTDPSLKGAPSGHVVPIREVRLSSGAEFIVVVCGAIMTMPGLPRVPAADSIKLNDKGEIEGLF

SEQ ID NO: 196507 - protein, 440 aa, Unknown
  Bacterial polypetide isolated from the Sargasso Sea
TTSVGLSDGLNKIGKKSIVCLREPSLGPSFGMKGGAAGGGYAQVVPMEQINLHFTGDFHAITSAHNLLSALIDNHIYWGNKLNIDIRRVVWKRVMDMNDRSLRSIVVDLGGVANGYPRQDGFDITVASEIMAIFCLATDLQDLEKRIGNITIAYTRDKKAIYAKDLNAQGPMTVLLKEAIRPNVTQTLENNPAIIHGGPFANIAHGCNSVIATKAGLKLSDYVVTEAGFGADLGAEKFLDIKCRKSGIKPDCVVIVATIRALKMHGGVAKDDLKKEDVEALKKGLINLERHINNTRKFGLPVTIAVNHFITDTDNEMNALLDFCKTQGVKASKCTHWSNGGEGTKELANNVAEICEENKNTFKYLYEDKLSLFKKIEKIAQEIYHASDVVADTKVRQQLKDFEEKGYGNLPVCIAKTQYSFSTDPNLKGAPTGHVLPVEK

SEQ ID NO: 196508 - protein, 284 aa, Unknown
  Bacterial polypetide isolated from the Sargasso Sea
VYKLRLLPSGIVRKNKISIIGNGVVVDPWALLDEIDEIKSKGVEVNPDNLILSEAATLILPFHKEMDEIREDTAGKSKIGTTRRGIGPAYEDKIGRRSIRVMDLASENNLDKRLDAVLSHHNAIRKGLGKTEFKKEQLKKNLLKIAPQILKFSQPVWKKIDEFKYQNKKILFEGAQGVLLDVDHGTYPFVTSSNTVASSAATGSGCGINSINYVLGITKAYTTRVGEGPFPTELTDEIGDLLGTRGKEFGTVTSRKRRCGWFDGVLVRQTLKISGIDGIALTKL

SEQ ID NO: 196509 - protein, 331 aa, Unknown
  Bacterial polypetide isolated from the Sargasso Sea
NGVVIDPWALLEEIKEINSKGISLNKNNFIIAESASLILPFHRDLDEIREDASKKNMIGTTRRGIGPAYEDKVGRRSIRVMDLKSKRSLEDRLKTALKHHNDIRRGLGKKIYNKDKLIKELTKIAPTILKFSQPVWLKIDQFKKQKKKILFEGAQGILLDIDHGTYPFVTSSNTVAANAAIGTGCGANSIDYVLGITKSYITRVGAGPFPTELKDKVGEHLGTKGKEFGTVTSRKRRCGWFDGVLVRQTIKVSGINGIALTKLDVLDELKIIKICVKYELDGKKIDHLPSGADDQLRVKPIYKIFKGWRSSTKGIKNFDELPENAKKYIYA

SEQ ID NO: 196510 - protein, 258 aa, Unknown
  Bacterial polypetide isolated from the Sargasso Sea
MKNVVVVGSQWGDEGKGKIVDWLSSEADIVVRFQGGHNAGHTLVINGVTYKLRLLPSGIVRKDKVSIIGNGVVVDPWALLDEIEEIKLKGIEINQKNLIVSEAANLILPFHREMDEIREDAAGKAKIGTTRRGIGPAYEDKVGRRSIRVMDLVSEKNLDHRLETVLSHHNAIRKGLGKEIFKKDKLKQDLLNIAPEILKYSQPVWKKIDEFKLQGKKILFEGAQGVLLDVDHGTYPFVTSSNTVASAAATGSGCGPIQ

SEQ ID NO: 196511 - protein, 147 aa, Unknown
  Bacterial polypetide isolated from the Sargasso Sea
MKNIVVVGSQWGDEGKGKIVDWLSEQADVVIRFQGGHNAGHTLVIDGVTYKLRLLPSGIVRKNKISVIGNGVVVDPWAFLDEVEEIKAKGVEINSENLIISESANLILPFHREMDEIREDAAGKEKIGTTRRGIGPAYEDKGGQKIY

SEQ ID NO: 196512 - protein, 169 aa, Unknown
  Bacterial polypetide isolated from the Sargasso Sea
MNTAVIGLQWGDEGKGKIVDYLSEDFDLVVRYQGGNNAGHTVIVDDTTYKLNLIPSGIIRGKVCYLGQGVVLDPNHFYSEFDQITKKIENPKIYLSSNISLILEYHKQLDKINELILKNEKKIGTTSKGIGPAYQDKVGRKSIKLYDLKSKNLIEEKLKTLKRFYDPIL

SEQ ID NO: 196513 - protein, 262 aa, Unknown
  Bacterial polypetide isolated from the Sargasso Sea
MKNVVVVGSQWGDEGKGKIVDWLSSQADIVVRFQGGHNAGHTLVIDKKVFKLRLLPSGIVRKGKISILGNGVVIDPWALLSEIDEIKKQGIEVTPENFMISESASLILPFHQEMDEIREDAAGASKIGTTRRGIGPCYEDKVGRRSIRAMDLRSESNLDKRLENVLLHHNAIRKGLNKKIYEKKELKIKLLKIAPEILKFTKPVWLKLNQFNNDRKKILFEGAQGILLDVDHGTYPYVTSSNTVPAMAATGSGLGPNSIKIY

SEQ ID NO: 196514 - protein, 179 aa, Unknown
  Bacterial polypetide isolated from the Sargasso Sea
SGCGPNSINYVLGITKAYTTRVGAGPFPTELKDKIGQELGTKGKEFGTVTSRQRRCGWFDGILVRQTIKISGINGIALTKLDVLDGLDEIKMCIAYELNGKKIDYLPAALEDQLKIKPIYKKFKGWKTSTKGIKNFKELPENAKNYINELEKFVESKISSISTSPEREDTILVEDPFNI

SEQ ID NO: 196515 - protein, 296 aa, Unknown
  Bacterial polypetide isolated from the Sargasso Sea
ALLEEIEEIKSKGVEVNVNNFIISESANLILPFHREMDEIREDAAGESKIGTTRRGIGPAYEDKVGRRSIRVMDLRSEKNLDQRLDSVLVHHNAIRKGLGKKIFEKDQLKSDLLKIAPKILEFSQPVWLKIDQFKKKKKKILFEGAQGILLDVDHGTYPFVTSSNTVASSAATGTGCGPNSINYVLGITKAYTTRVGEGPFPTELTDDIGELLGTRGKEFGTVTSRKRRCGWFDGVLVRQTIKVSGIDGIALTKLDVLDELDEIKMCVAYELDGKRLDYLPAAVEDQIKIKPIYET

SEQ ID NO: 196516 - protein, 230 aa, Unknown
  Bacterial polypetide isolated from the Sargasso Sea
MANVVVIGAQWGDEGKGKITDLLSRSADVVVRYQGGVNAGHTIVVDDKVLKLHLIPSGILYKNTSCLIGSGTVVDPKILLKEIDMLIDNGIDISGLKISSTSHVTMPYHRILDEAMEADRGSNKIGTTGRGIGPTYADKSQRNGIRIRDLLNKERLSDVIEIPLREKNGLLEKIYGIKPLKLEDIVEEYLDYGERLSKHVVDCTRTIHTAAKNKKNILFEGAQGTLLDLD

SEQ ID NO: 196517 - protein, 207 aa, Unknown
  Bacterial polypetide isolated from the Sargasso Sea
VEGANATMLDLDFGTYPFVTSSNPALGGVCNGLGLAPRKFETVIGVAKAYTTRVGAGPYPTELFGDVADKLRELGYEYGTTTGRPRRIGWLDMVALNYANKINGFTHLNITKLDVLSEMEELKIGTAYKLPNGKTTTAFPADIATLEQVEVIYETLPGWKSDISKVRTWDDMPENAKKYVLRCEELSGVECRYIGVGPGRDAMVVKP

SEQ ID NO: 196518 - protein, 165 aa, Unknown
  Bacterial polypetide isolated from the Sargasso Sea
SVYAVCRFQGGHNAGHTIKVDGVQTVLHLIPSGVLHKNVKCLIGNGVVLSLEAIKKEIEGLEEFGVEIRDRLFISENCPLILPSHIKIDQVRDKDEFIGTTGRGIGPTYEDKVGRRAIRFGDLKDETLLRKKVSRLIKIHNKLLEHFYDAEPFSEEGNPKQSSIF

SEQ ID NO: 196519 - protein, 153 aa, Unknown
  Bacterial polypetide isolated from the Sargasso Sea
MKKEILNNLLSFKNFAGAFSVNTTDLLMNWSEKGKEVLFEGAQGTFLDIDHGTYPYVTSSSTTIGGVSSGLGIGPKHINNVIGIVKAYATRVGEGPFITELFDEDGEEIAKRGNEFGATTGRPRRCGWLDLVALKKAIFINSVDSLCMTKADV

SEQ ID NO: 196520 - protein, 297 aa, Unknown
  Bacterial polypetide isolated from the Sargasso Sea
HLIMPYHKLLDELIEESLGENKIGTTKKGIGPCYADKIQRRGIRVQDLLDKEVFENKVKSNIEETNLTLIKIYKRPPLVAEEIIKEFNGYRDIVANHVKDTSLLIENAIKENQTILFEGAQGTLLDIDHGTYPFVTSSNTSAGNAAIGSGVGPKNIDRIVGVTKAYISRVGSGPFITEQKNEVGDYLIEKGAEFGVVTGRRRRCGWLDLISLKYSVRVNSLTELFITKLDVLSGLEEINLCIGYKYENELFTDYPYKESIHYKAEPVYQAFDGWTEDISSVKNFEDLPKNAQTYINA

SEQ ID NO: 196521 - protein, 284 aa, Unknown
  Bacterial polypetide isolated from the Sargasso Sea
VNEDNLYIADNICLILPIHKLLDEINETTRGKKELGTTKKGIGPAYEDKVGRRAIRICDLKDPIFLKQKIDNLYEFHKDKISKHIHKITHNYYEELLSMSNYLNSFSVPLWKIINELGQKNKNIVFEGAQGSMLDIDFGTYPYVTSSNTISGQIFSGTGFSYRNDHKILGITKAYTTRVGSGPFPTELMDEIGEHLGEKGQEFGTVTKRKRRCGWFDSVLLKQSIKLNGITDIVLTKLDVLDELKEINVCTGYLIDNKHYDYLPSEEFLFDKIKPIYKKVAGWE

SEQ ID NO: 196522 - protein, 245 aa, Unknown
  Bacterial polypetide isolated from the Sargasso Sea
MGERLSKHVVECTRTIHAASKNKKNILFEGAQGTLLDLDHGTYPFVTSSNPISGGACIGAGVGPTLIDRVIGVAKAYTTRVGEGPFPTELQGSINDQLCDRGSEFGTTTGRRRRCGWFDGVIGKYAVSVNGLDCLAVTKLDVLDELDEIQVCIAYDLDGEEIDYFPTNSDDLKKCKPIFKKLKGWQCSTADCRKLSDLPENAMNYLRFLAELMEVPIAIVSLGANRDQTIVIEDPIHGPKRALLR

SEQ ID NO: 196523 - protein, 227 aa, Unknown
  Bacterial polypetide isolated from the Sargasso Sea
MKNIVVVGSQWGDEGKGKIVDWLSEQADVVIRFQGGHNAGHTLVIDGVTYKLRLLPSGIVRKGKISIIGNGVVVDPWALLEEIEEIKSKGVEVNVNNFIISESANLILPFHREMDEIREDAAGKSKIGTTRRGIGPAYEDKVGRRSIRVMDLRSEKNLDQRLDSVLVHHNAIRKGLGKKIFEKDQLKSDLLKIAPKILEFSQPVWLKIDQFKKQKKKILFEGAQGIL

SEQ ID NO: 196524 - protein, 297 aa, Unknown
  Bacterial polypetide isolated from the Sargasso Sea
IDHNNLIISESANLILPFHKEMDEIREDAAGKAKIGTTRRGIGPAYEDKVGRRSIRVMDLLSEKNLDNRLKTVLMHHNAIRKGLGKSIYQKDKLKKDLMKIAPEILKYSQPVWKKIDEFKKNGKKILFEGAQGILLDVDHGTYPFVTSSNTVASAAATGTGCGPNSINYVLGITKAYTTRVGEGPFPTELKDSIGEHLGTKGKEFGTVTSRKRRCGWFDGVLVRQTIKISGIDGIALTKLDVLDELDEIKMCIAYELKGKKIDYLPAAVDDQIDVKPIFKTFKGWKSSTKGIKKFSD

SEQ ID NO: 196525 - protein, 219 aa, Unknown
  Bacterial polypetide isolated from the Sargasso Sea
SKTKFILFEGAQGSLLDIDFGTYPYVTSSNTSSGQIFSGTGFGIKENHNILGITKAYTTRVGSGPFATELNDEIGDHFVDKGQEFGTVTKRRRRCGWFDSVLVKQSIAINGITNIVLTKLDVLDDLEAIKVCIGYDDGKKKYNYLPFDENIQKNLYPIYETLPGWQSSTYGLTSWSDLPKNAQNYISFLEKMIEKKISIISTGPDRIHTIDRNNLLNNN

SEQ ID NO: 196526 - protein, 98 aa, Unknown
  Bacterial polypetide isolated from the Sargasso Sea
MKSVQSKITTIVGAQWGDEGKGKITDFFAGKADYVVRFHGGNNAGHTVIVDGKVFKLHLIPSGVIYADPLIVIGNGVVVDPKSLINEIEYLKEKGINP

SEQ ID NO: 196527 - protein, 279 aa, Unknown
  Bacterial polypetide isolated from the Sargasso Sea
MSNNTLILGLQWGDEGKGKIVDALAESSEAVCRFQGGHNAGHTLKVDGEQKVLHLVPSGILHPSVHCVLGNGLVLSLPALAKEIKELQESEINFKDRFYISEDCSLILPTHIAIDQVRDKEEGIGTTGRGIGPAYEDKIARRAVRFGDLKNLEELNIKLLTLVNYHNQILQNLYNAQPIAFEDVLEELTSNIDLYNKYHCKTQDLLKLWVKQGKSILFEGAQGSMLDIDHGTYPYVTSSSTTAGGLSSGLGVGPRHIDSILGITKAYTTRVGEGPFATE

SEQ ID NO: 196528 - protein, 212 aa, Unknown
  Bacterial polypetide isolated from the Sargasso Sea
IKEIEYLESKGIDVQSKLMISSQCPLIMPSHIAIDEAREKSLGKNAIGTTGRGIGPVYEDKVARRAVHVMDLFEEDLFRSKLTSLTTYHNFLLEKLYESEGTDLDGTYKDWMNHFNKIKNLIVDSSEVVNNLKSQGSNILFEGAQGSMLDIDQGTYPFVTSSNTLSGAASLGSGSGPLDIDGVLGITKAYATRVGSGPFPTEIEDDYGKHMA

SEQ ID NO: 196529 - protein, 299 aa, Unknown
  Bacterial polypetide isolated from the Sargasso Sea
KCAIGNGVVLDPWALVNEIDNLKKEGIDVNCDNLFIADNTCLILPIHKLLDEINETSRGQNEIGTTKKGIGPAYEDKVGRRAVRICDLKYPSYLKQKIEDLHRYHSDKLLAQNLDKKLSNYFDELLSMADYLNSFTVPMWKMINELGSNNKTIVFEGAQGSMLDIDFGTYPYVTSSNTISGQVFSGTGFSLKNNHKILGITKAYTTRVGSGPFPTELKDNIGNHLGEKGKEFGTVTKRKRRCGWFDSVLLKQSIRLNGVTDIVLTKLDVLDELKEIKICIGYNIEGKEYDYLPSGRIFI

SEQ ID NO: 196530 - protein, 317 aa, Unknown
  Bacterial polypetide isolated from the Sargasso Sea
LGNGIVLSLSALAKEIKELQESEINFKDRFYVSEDCALILPTHIAIDKVRDKSEGIGTTGRGIGPAYEDKIARRAVRFGDLKDPQELEVKLSKLVNYHNQILENLYAAQPIKYEDVLEELTGNIDLYNKYNCKTQDLLKLWIKQGKKILFEGAQGSMLDIDHGSYPYVTSSSTTAGGLSSGLGVGPRYLDSIIGITKAYTTRVGEGPFATELFDSNAEQLAKVGHEFGATTGRPRRCGWLDLKALETIVFINSVSNLCLTKLDVLDSFEEIKVCIDYDDTQQPIYKTFSGWKQDTSRARSFEDLPKAAQDYILFMKR

SEQ ID NO: 196531 - protein, 287 aa, Unknown
  Bacterial polypetide isolated from the Sargasso Sea
SIIGNGVVVDPWALLDEIKEIRSKGVSVDEKNLILSESANLILPFHKEMDEIREDSAGKAKIGTTRRGIGPAYEDKIGRRSIRVMDLISEKNLDHRLETVLIHHNAIRKGLGKKIYIKDQLKKDLLKIAPEILKYSQPVWKKIDEFKRTGKKILFEGAQGILLDVDHGTYPFVTSSNTVASAAATGTGCGLNTINYVLGITKAYTTRVGEGPFPTELKDEIGELLGKRGKEFGTVTSRKRRCGWFDGILVRQSIKISGINGIALTKLDVLDEVSEIKMCVGYELKGK

SEQ ID NO: 196532 - protein, 237 aa, Unknown
  Bacterial polypetide isolated from the Sargasso Sea
APEILKFSQPVWLKIDDYKKEKKRILFEGAQGIMLDVDHGTYPFVTSSNTVASSAATGTGCGPNSINYVLGITKAYTTRVGEGPFPTELKDNIGEMLGNRGKEFGTVTSRKRRCGWFDGVLVRQSIKISGIDGIALTKLDVLDELDEIKVCVKYELNENKIDYLPASVEDQLKIKPIYKIFPGWKASTKGIKKIDQLPENAKNYIYALEDFTGTKISSISTSPEREDTILLENPFEL

SEQ ID NO: 196533 - protein, 155 aa, Unknown
  Bacterial polypetide isolated from the Sargasso Sea
MANVVVIGAQWGDEGKGKITDLLSRSADVVVRYQGGVNAGHTIVVDDKVLKLHLIPSGILYRDTICLIGSGTVVDPKILLKEIDMLIDNGIDISGLKISSTSHVTMPYHRLLDEAMEADRGSNKIGTTGRGIGPTYADKSQRNGIRIRDLLNEDR

SEQ ID NO: 196534 - protein, 122 aa, Unknown
  Bacterial polypetide isolated from the Sargasso Sea
MSNNTLILGLQWGDEGKGKIVDALSESIYAVCRFQGGHNAGHTIKVDGVQTVLHLIPSGVLHKNVKCLIGNGVVLSLEAIKKEIEGLEEFGVEIRDRLYISEKCPLILPSHIKIDQVRDKDE

SEQ ID NO: 196535 - protein, 187 aa, Unknown
  Bacterial polypetide isolated from the Sargasso Sea
FVTSSNTTTAGACIGLGVSPKKVDKVFGIFKAYCTRVGKGPFPTELFDKEGEKIAKKGNEFGSTTGRARRCGWLDLLALKYAVMLNGVTELFMMKADVLSGFDKVFLCTKYLFEGKEIDYFPSTIGDSTIEPIYESFDGWKNDISECKEKSDFPIELINYIQFIENNLKIPIKLVSVGPDRNQTVLV

SEQ ID NO: 196536 - protein, 295 aa, Unknown
  Bacterial polypetide isolated from the Sargasso Sea
VIVRFQGGHNAGHTLVIDSIVYKLRLLPSGIVRKNKISIIGNGVVVDPWALLDEIDEIKSKGVEVNPNNLILSEAATLILPFHKEMDEIREDAAGKSKIGTTRRGIGPAYEDKIGRRSIRVMDLASENNLDKRLDVVLSHHNAIRKGLGKTEFKKELLKKNLLKIAPQILKFSQPVWKKIDEFKSQNKKILFEGAQGVLLDVDHGTYPFVTSSNTVASSAATGSGCGINSINYVLGITKAYTTRVGEGPFPTELTDEIGDLLGTRGKEFGTVTSRKRRCGWFDGVLVRQTLKISG

SEQ ID NO: 196537 - protein, 272 aa, Unknown
  Bacterial polypetide isolated from the Sargasso Sea
SQWGDEGKGKIVDWLSEQADVVIRFQGGHNAGHTLVIDGVTYKLRLLPSGIVRKGKISIIGNGVVVDPWALLEEIEEIKSKGVEVDVNNFIISESANLILPFHREMDEIREDRAGKSKIGTTRRGIGPAYEDKVGRRSIRVMDLRSEKNLDQRLDSVLIHHNAIRKGLGKKIFEKDQLKSDLLKIAPKILKFSQPVWLKIDQFKKQKKKILFEGAQGILLDVDHGTYPFVTSSNTVASSAATGTGCGPNSINYVLGITKAYTTRVGEGPFPN

SEQ ID NO: 196538 - protein, 193 aa, Unknown
  Bacterial polypetide isolated from the Sargasso Sea
MKNIVVVGSQWGDEGKGKIVDWLSEQADVVVRFQGGHNAGHTLVIDGVTYKLRLLPSGIVRKNKISVIGNGVVIDPWAFLDEIKEIKLKGVHINTENLIISESANLILPFHREMDEIREDSAGKGKIGTTRRGIGPAYEDKVGRRSIRIMDLRSEKNLDQRLELVLLHHNAIRKGLGKKIFEKKELKKNLLEI

SEQ ID NO: 196539 - protein, 238 aa, Unknown
  Bacterial polypetide isolated from the Sargasso Sea
MHLVPSGILHAGVRCLIGNGVVFEPFAFMQEVELLETRGFSIRERLTVSPAAQLIMPYHALLDSAREEALGGKKIGTTGRGIGPAYEDKVARRGIRVGDLYNLSSFKEKIAVALDFHNFVLTKYFSKDPVDSENVFDSYASVAEDLKPMVADVVPILEKLQDAGDNILLEGAQGSLLDVDLGTYPYVTSSNTTASSAGLGSGLGPKDIDYVLGIAKAYTTRVGEGPFPTELMDSTGET

SEQ ID NO: 196540 - protein, 290 aa, Unknown
  Bacterial polypetide isolated from the Sargasso Sea
QGGHNAGHTLVIDNVTYKLRLLPSGIVRKDKVSIIGNGVVVDPWALLDEIEEIKSKGVEINEKNLIVSEAANLILPFHREMDEIREDAAGKAKIGTTRRGIGPAYEDKVGRRSIRVMDLVSEKNLEHRLEIVLMHHNAIRKGLGKDMFEKDKLMQDLLKIAPEILKYSKPVWKKIDEFKSKGKKILFEGAQGILLDVDHGTYPFVTSSNTVASAAATGSGCGPNSINYVLGITKAYTTRVGEGPFPTELKNEIGEKLGTIGKEFGTVTSRKRRCGWFDGVLVRQTIKISG

SEQ ID NO: 196541 - protein, 227 aa, Unknown
  Bacterial polypetide isolated from the Sargasso Sea
VWKKIDEFKSQNKKILFEGAQGVLLDVDHGTYPFVTSSNTVASSAATGTGCGINSINYVLGITKAYTTRVGEGPFPTELTDEIGETLGTRGKEFGTVTSRKRRCGWFDGVLVRQTLKISGIDGIALTKLDVLDELDEIKMCIAYEIDGKKFDYLPASAEDQLRAKPIYKSFTGWKSSTVGIEKFEDLPDNAKKYIKELEKFVETTISSISTSPERNDTILIKDPFKI

SEQ ID NO: 196542 - protein, 215 aa, Unknown
  Bacterial polypetide isolated from the Sargasso Sea
MFYTIVGTQWGDEGKGKIVDWLSSKADLVVRFQGGNNAGHTIKVKENTYKLNLLPSGIIRNKKCFIGNGVVLDPWALINEISELRNQNILVSKNNLFIAENICLILPIHKLIDEINEEARGNNLIGTTKKGIGPAYEDKVGRRAIRLCDLNDKEKLKKKIKALYEFHKPRLDKYKKNIDFDKIFDDLLEISKQIIIYTAPVWKLINEAGRENKFI

SEQ ID NO: 196543 - protein, 302 aa, Unknown
  Bacterial polypetide isolated from the Sargasso Sea
VDALTKDSSVVCRFQGGHNAGHTIKVDGESHVLHLVPSGIINPKSKCLIGNGVVISPQALEEEIQMLKNAGISVENRLFISAKCPLILPTHIAIDQARDKQENIGTTGRGIGPAYEDKVGRRSIKFSDLLDLMSIKEKLFNILDFHNKVLTKLLNAEELDPQIIFTDLKKFQYLAKSYSCNTNELVEDFYKNGDDIIFEGAQGSMLDIDHGTYPFVTSSNTTAGGVSSGLGIGPKFIDNILGISKAYTTRVGEGPFPTELFDSTAEEISRIGNEFGATTGRPRRCGWLDLKALREVIFINSV

SEQ ID NO: 196544 - protein, 129 aa, Unknown
  Bacterial polypetide isolated from the Sargasso Sea
QETVWLFDAVMVRQAGNLAGIHGMALTKLDVLDGFETLKICIGYQIDGSDTIIDYFPSNADLQAACKPVYEEMPGWLEPTFGARSWTELPNNAVDYIRRIETLTHLPVTVLSTSPERDDTILVSDPFGG

SEQ ID NO: 196545 - protein, 196 aa, Unknown
  Bacterial polypetide isolated from the Sargasso Sea
YPYFTSSNTVASAASTGTGCGPNTINYVLGITKAYTTRVGQGPFPTELENEIGEHIGNKGKEFGTVTSRKRRCGWFDGVLVRQTVKISGINGIALTKLDVLDELEEIKMCIGYKLGKEEIDYFPTTADDQKRIVPIYKTYKGWKSSTEGIKNFNDLPENAKIYINDLEKFIETKISSISTSPERNDTILIQDPFKN

SEQ ID NO: 196546 - protein, 117 aa, Unknown
  Bacterial polypetide isolated from the Sargasso Sea
MTALVVVGTQWGDEGKGKIVDLLTEQADAVVRYQGGNNAGHTVMFGDETHILHLIPSGILRDTMSILGNGVVIDLPELLKEIEELRENGVEVQGKLHVSAGSHLVMPWHWLIDQLSR

SEQ ID NO: 196547 - protein, 231 aa, Unknown
  Bacterial polypetide isolated from the Sargasso Sea
LTETPVLVHSLVEQGRRLLFEGSQGTFLDIDHGTYPFVTSSNTVSGNACAGGGIGPRHISDVIGIVKAYTTRVGSGPFPTELLDQTGEFLRSEGQEFGATTGRPRRCGWFDAVLVRYAVRLNGITSLALTKLDVLDKLETLKLCVGYRMKDGSIQIDFPFEGHDEVEPVYKELPGWNTKTAGITEYDQLPKNLIDYLARIEELVEAPASIISTGPKREDTIVLQPDRFWKS

SEQ ID NO: 196548 - protein, 303 aa, Unknown
  Bacterial polypetide isolated from the Sargasso Sea
AESTRRGIAPVYADKMFRNGIRIIDLLEPEVFKEKLSKGYAFSKGIIERVLGGNLSISMDEVFITYTAYGKRLEKYISDTSIELFNAHKEGKSILFEGAQGISLDVDHGIYPYTTSSNTVSGHISTGSGLGSHSVERIIGVVKSYLSRVGQGPLPSEIHDSIADSLRKKGKEYGTTTGRPRRVGWLDLVQIRQAVRVNGLTEIALTKLDILDGYSTIPVCVNYNIDGETISEMPASLTKYRKAKPVYKNLPGWDKIDLDKIDNGYESLPSELKNYVGFIEDQVECPIKIISVGPQRHETIIRS

SEQ ID NO: 196549 - protein, 253 aa, Unknown
  Bacterial polypetide isolated from the Sargasso Sea
ISIIGNGVVVDPWALLEEIEEIKSKGVEVNINNFIISESANLILPFHREMDEIREDAAGKSKIGTTRRGIGPAYEDKVGRRSIRVMDLRSEKNLDQRLDSVLAHHNAIRKGLGKNIFEKDQLKSDLLKIAPKILEFSQPVWLKIDQFKKQKKKILFEGAQGILLDVDHGTYPFVTSSNTVASSAATGTGCGPNSINYVLGITKAYTTRVGEGPFPTELTDDVGELLGTRGKEFGTVTSRKRRCGWFDGVLVRQ

SEQ ID NO: 196550 - protein, 319 aa, Unknown
  Bacterial polypetide isolated from the Sargasso Sea
HKELDEIREDAAGKAKIGQTRRGIGPAYEDKAGRRAIRVMDLVSEKNLDYKLDVVLAHHNAIRKGLGKNLFEKDKLKKDLLEIAPQILKFSKPVWKKIEEYKLKQKKILFEGAQGILLDIDHGTYPFVTSSNTVASSAATGSGCGPSSINYVLGITKAYTTRVGAGPFPTELNDKTGEFIGIKGKEFGTVTSRKRRCGWFDAVLVKQSIKISGINGIALTKLDVLDELSEIKMCIKYEIEGKEIDYLPAATEDQLKIKPIYKTFPGWKTSIQGFKNIKDLPDNAKNYISAIENFIGAKVSSISTSPKREDTILIKNPLK

SEQ ID NO: 196551 - protein, 277 aa, Unknown
  Bacterial polypetide isolated from the Sargasso Sea
MKNVIVVGTQWGDEGKGKIVDWLSSEADVVVRFQGGHNAGHTLVIDGKTYKLRLLPSGTVREGKISIIGNGVVVDPWALIDEIKEMKSKGVEVDENNLILSEAANLILPYHKEMDEIREDVAGNAKIGTTRRGIGPAYEDKVGRRSIRVMDLASESNLDKRLEAALIHHNALRKGLKQKVFKKDKLKKDLLKIAPQILKFSQPVWKKLNEYKSKGKKILFEGAQGILLDVDHGTYPFVTSSNTVASTAATGSGFGSNSESYVLGITKAYTTRVGEGP

SEQ ID NO: 196552 - protein, 263 aa, Unknown
  Bacterial polypetide isolated from the Sargasso Sea
DVNFSNLILSESATLIMPFHKEMDEIREDAAGKSKIGTTRRGIGPAYEDKIGRRSIRVMDLASEHNLNKRLDVALNHHNAIRKGLGKPQFKKDQLKKDLLKIAPDILKFSQPVWKKIDQFKSQNKKILFEGAQGVLLDVDHGTYPFVTSSNTVASSAATGSGCGISSINYVLGITKAYTTRVGEGPFPTELKDEIGDLLGTRGKEFGTVTSRKRRCGWFDGVLVRQTLKISGIDGIALTKLDVLDELDEIKMCIAYEINGKKF

SEQ ID NO: 196553 - protein, 255 aa, Unknown
  Bacterial polypetide isolated from the Sargasso Sea
IRVMDLRSEKNLYQRLDSVLVHHNAIRKGLGKKIFEKDQLKSDLLKIAPKILEFSQPVWLKIDQFKKQKKKILFEGAQGILLDVDHGTYPFVTSSNTVASSAATGTGCGPNSINYVLGITKAYTTRVGEGPFPTELTDDIGELLGTRGKEFGTVTSRKRRCGWFDGVLVRQTIKVSGIDGIALTKLDVLDEVDEIKICVAYDLDGKRLDYLPAAVEDQIKIKPIYKTFPGWKVSTSGVKNMDSLPENAKKYVFAI

SEQ ID NO: 196554 - protein, 287 aa, Unknown
  Bacterial polypetide isolated from the Sargasso Sea
DEGKGKIIDILTDKAEAVVRFQGGHNAGHTLVIDGDKTVLHLIPSGIFNNAKCLIGNGVVLHLPTLIEEIEYLESKGIDIQSKLMISSQCPLILPSHILIDEAREKSLGKNAIGTTGRGIGPVYEDKVARRALHVMDLFEKDLFKSKLTSLTAYHNFLLEELYKSVGTDFEETYKEWMGYFSKIKDLVVDSSKELNNLKLNQSNILFEGAQGSMLDIDQGTYPFVTSSSTLSGASSLGSGIGPLDIDGVLGITKAYATRVGSGPFPTEIDDDYGKHMAKVGVEFGAT

SEQ ID NO: 196555 - protein, 247 aa, Unknown
  Bacterial polypetide isolated from the Sargasso Sea
MDPSEIAKTYLDEYAPRIVPHIEDTINLVHEQLNAKKRILLEGAQATFLDLDYGTYPFVTSSNPVAGGACTGSGVGPLDIDRIIGITKAYTTRVGAGPFTAELFDEVGEHLVDVGHEYGTNTGRRRRVGWLDLVMLNYASRVNSLTELAIAKLDVLDNLDVIKICVAYEFEGQRYDWLPHQQSVQNQAVPIYEEFPGWKCDLSEVKNRSELPEEAESYLNFIENSLNIPIDLVGVGPGRNQYFSRQK

SEQ ID NO: 196556 - protein, 293 aa, Unknown
  Bacterial polypetide isolated from the Sargasso Sea
MLSEKSEIIVRFQGGHNAGHTLVIGENQYKLSLLPSGIIRKNKISIIGNGVVVDLLHLSKEINELIARGINITPKNLYLSENCFLILPIHKYIDELREAIKSDKKIGTTGRGIGPAYEDKVGRRGLRVSDLKNKKNFKEKFIALYEYYNFWILGLGYEKLDYKLDLDLVLKSYEKIETYVSNTWLELNKYIKENKKILYEGAQGTFLDIDHGTYPFVTSSNTISGNATVGSGIGPTLINYVLGITKAYTTRVGNGPFPTEEKGNIGKKLAKIGKEIGTVTGRNRRCGWFDAVL

SEQ ID NO: 196557 - protein, 170 aa, Unknown
  Bacterial polypetide isolated from the Sargasso Sea
INYVLGITKAYTTRVGEGPFPTELKDAIGEQLGTRGKEFGTVTSRKRRCGWFDGVLVRQTIKISGINGIALTKLDVLDELDEIKMCIAYEINGKKIDYLPAAAEDQLKVKPVYKVFKGWKSSTQGIKEFDKLPKNAKIYVRELEKFVQAKISSISTGAERKDTILIENIF

SEQ ID NO: 196558 - protein, 192 aa, Unknown
  Bacterial polypetide isolated from the Sargasso Sea
GLKKKIFKKEVLKKKLLEIAPKLLCFAQPIWLKLDEFKKERKKILFEGAQGILLDVDHGTYPYVTSSNTVPATAATGSGSGPNEISYILGITKAYTTRVGSGPFPTELKNKIGEILGKRGKEFGTVTARKRRCGWFDGVLVRQTIKISGINGIALTKLDVLDELEEIKICVGYELNGKKLNYLPAATEDQFN

SEQ ID NO: 196559 - protein, 289 aa, Unknown
  Bacterial polypetide isolated from the Sargasso Sea
ISNSAPLILPVHSQIDEAREKQRGDNKIGTTGRGIGPAYEDKVARRAIRVSDLKDKIHLKEKVHKLLNHHNIWLKANNFETLDPDNIIENILEISQDILEFADETWVTLDNYNSKGKRILFEGAQGTMLDIDHGTYPFVTSSSTVSGNAASGTGFGFLNISKVLGITKAYTTRVGSGPFPTEQNNEIGNKLGELGHEFGTVTGRKRRCGWFDAVMVKQAIKISGISSIALTKLDVLDKFEELKVCTSYKIGDQEINFFPSCQLDQNKIKPSYETIEGWNIKTEGISVFD

SEQ ID NO: 196560 - protein, 226 aa, Unknown
  Bacterial polypetide isolated from the Sargasso Sea
SNRLFDIRNKGGNILFEGAQGSLLDIDHGTYPYVTSSNTTAGCTATGSGFGPLYLDYVLGITKAYTTRVGSGPFPTELFDEVGEHLSKQGGEVGATTGRPRRCGWFDAVAIKNAVSINSVTGICLTKMDVLDGLDYINICVGYKDVEGAAIQNPMDADDYENLIPIYETLPGWSESTSGIKHMDDLPFNALTYIEKIENVTGVPIDIISTGPDRVDTIVLSDPFGV

SEQ ID NO: 196561 - protein, 229 aa, Unknown
  Bacterial polypetide isolated from the Sargasso Sea
ENTPLILPFHKDLDLLREQKAGKEKIGTTGRGIGPAYEDKVGRRALRTGDLKDPNQVKRKLNIIKEHHDILRAGFGATDIDEEQLFDELMIVGKKINMFIKPVWKILNEQIKKNKNILFEGAQGSMLDVDFGTYPFVTSSSTIAAAAAIGSGVAHNKINSVLGITKAYTTRVGEGPMPTELTDSIGRYLSEEGNEKGTVTGRDRRCGWFDAPLVRRSCLLNGVTSLALT

SEQ ID NO: 196562 - protein, 260 aa, Unknown
  Bacterial polypetide isolated from the Sargasso Sea
MNNVVVVGSQWGDEGKGKIVDWLSSEADVVVRFQGGHNAGHTLVIDGVTYKLRLLPSGIVRKNKISIIGNGVVVDPWALLDEIEEAKSKAVEINENNLILSEAATLILPFHKEMDEIREDSAGKSKIGTTRRGIGPAYEDKVGRRSIRVMDLASKKNLENRLSLVLEHHNAIRKGLGKPIYEKDKLIGELLKIAPKILKYSAPVWRKIDQFKSENKKILFEGAQGILLDVDHGTYPYVTSSNTVAASAATGSGCGPNSIN

SEQ ID NO: 196563 - protein, 270 aa, Unknown
  Bacterial polypetide isolated from the Sargasso Sea
AQLVMPWHKSIDQLREQKKGKSKIGTTGRGIGPAYEDKAERAGIRVGDLLDQEKFSSRLRELANEKNIFLKKYFDINETLFSSADIFSEYADYIKKLEHCIVDTSFIINQLIKDGKNILFEGAQGTFLDLDHGTYPFVTSSNTLSGNACVGSGIGPTCITGVLGIVKAYTTRVGNGPFPTELLDDDGKILQTEGNEFGATTGRSRRCGWFDALLVKQAVRLNGITSIAVTKLDVLDNFSTLKIATGYQLPNGKECDSFPRSLENVTPVYH

SEQ ID NO: 196564 - protein, 231 aa, Unknown
  Bacterial polypetide isolated from the Sargasso Sea
MKNVVVVGSQWGDEGKGKIVDWLSSEADVVIRFQGGHNAGHTLVIDGVTYKLRLLPSGIVRKNKISVIGNGVVVDPWALLDEIDEIKSKGVEVDDKNLILSESATLILPFHRELDEIREDAAGSNKIGTTRRGIGPAYEDKIGRRSIRVMDLSSEKNLDMKLEDALLHHNAIRKGLGKEIFEKDKIKKELLKIAPKILKFSKPVWKKIDEFKDQKKKILFEGAQGILLDVD

SEQ ID NO: 196565 - protein, 306 aa, Unknown
  Bacterial polypetide isolated from the Sargasso Sea
ELASTAHVTMPYHRLLDMAMEQKRGLQKIGTTGRGIGPTYADKSQRNGIRIIDLLSREKLQERLKVPLAEKNGLLQKIYGIEPLILDEIIEEYLQYGKQLEKHIVDCNRTIHQAAKKKKNILFEGAQGTLLDLDHGTYPYVTSSNPVSGGACIGAGVGPTLIDRVIGVAKAYTTRVGEGPFPTELQGSINDQLCDRGGEFGTTTGRRRRCGWFDGVIGKYAVEVNGLDCLAITKLDVLDELDEIQICIAYELNGTKIDYFPSSVEDFEKCTPVFKKLPGWKCSTENCRRLEDLPPSAMSYLRVLAE

SEQ ID NO: 196566 - protein, 301 aa, Unknown
  Bacterial polypetide isolated from the Sargasso Sea
GIQSKGIEVNEKNLIISEAANLILPFHRELDEIREDFAGDEKIGTTRRGIGPAYEDKVGRRSIRLMDLTSKKSLEPRLETALLHHNAIRKGMNKDIFNIDELKKELLKIAPRILKYSQPVWKRIDEYRAQGKKILFEGAQGILLDVDHGTYPFVTSSNTVASSAAIGSGCGPHMINYVLGITKAYTTRVGKGPFPTELTNQIGEQLGIIGKEFGTVTSRKRRCGWFDGVLVRQTIKISGINGIALTKLDVMDELNEIKMCIAYEIDGKKIDYLPAATEDQLRVKPIYKSFDGWKSFDSGIK

SEQ ID NO: 196567 - protein, 188 aa, Unknown
  Bacterial polypetide isolated from the Sargasso Sea
TYPYVTSSNTLATSVGIGSGFPKSIYSDVLGVAKAYTTRVGAGPFPTELFCDVGQKIAELGHEFGATTGRPRRCGWLDLIALKYSAKLNNLTELCITKLDVLDAFDEIKACIGYKVDGEETPFKSRLLHKATPIYKDFKGWNCSLADCENYDSLPDKAKDFLNFIENFVGVKISLISNGPNREDLIHR

SEQ ID NO: 196568 - protein, 290 aa, Unknown
  Bacterial polypetide isolated from the Sargasso Sea
VVRKNKISIIGNGVVVDPWALLEEIKEIKSKGVEINENNLILSESANLILPFHKEMDEMREDAAGKSKIGTTRRGIGPAYEDKVGRRSVRVMDLVSEKNLNHRLDVALAHHNSIRKGLGKNIFEKDQLKKELLKIAPNILRFSKPVWKKLYEYKSKGKKILFEGAQGILLDVDHGTYPFVTSSNTVAASAAVGSGCGPNTINYVLGITKAYTTRVGEGPFPTELKNETGKILGEKGKEFGTVTSRKRRCGWFDGVLVRQSVKISGISGIALTKLDVLDELKEIKMCIQYE

SEQ ID NO: 196569 - protein, 249 aa, Unknown
  Bacterial polypetide isolated from the Sargasso Sea
GKITDLLSRSADVVVRYQGGVNAGHTIVVDDKVLKLHLIPSGILYKNTSCLIGSGTVVDPKILLKEIDMLIDNGIDISGLQISSTSHVTMPYHRILDEAMEADRGSNKIGTTGRGIGPTYADKSQRNGIRIRDLLNKERLSDVIDIPLREKNGLLEKIYGIKPLKLEDIVEEYLDYGERLSKHVVDCTRTIHAASKNKKNILFEGAQGTLLDLDHGTYPFVTSSNPISGGACIGAGVGPTLIDRVIGVA

SEQ ID NO: 196570 - protein, 100 aa, Unknown
  Bacterial polypetide isolated from the Sargasso Sea
MSNNTLILGLQWGDEGKGKIVDALSKSVYAVCRFQGGHNAGHTIKVDGVQTVLHLIPSGVLHKNVKCLIGNGVVLSLEAIKKEIEGLEEFGVEIRHRIIY

SEQ ID NO: 196571 - protein, 245 aa, Unknown
  Bacterial polypetide isolated from the Sargasso Sea
FHREMDETMEELAGKSKIGTTKRGIGPAYEDKIGRRSVRIMDLASEESLDKRLDSALSYHNVLRKGLGKEKLIKENLKIELLKIAQKILNFSQPVWKKIDEFKKRKKKILFEGAQGILLDVDHGTYPFVTSSNTVASSAATGSGCGPDSIGYVLGITKAYTTRVGAGPFPTELKDDIGDFLGNKGNEFGTVTSRKRRCGWFDAVLVRQTVKISGVNGIALTKLDVLDDLDEIKMCVAYEIDGKKI

SEQ ID NO: 196572 - protein, 200 aa, Unknown
  Bacterial polypetide isolated from the Sargasso Sea
DHGTYPYVTSSNTVASSAATGSGCGINSINYVLGITKAYTTRVGEGPFPTELKDEIGEILGTRGKEFGTVTSRKRRCGWFDGVLVRQTLKISGIDGIALTKLDVLDELEEIKMCIAYEINGKKYDYLPASVDDQFTAKPIYKSFKGWKSSTVGIKKFEELPENAKNYIKGLEKFVDTRISSISTSPERNDTILIQDPFNL

SEQ ID NO: 196573 - protein, 238 aa, Unknown
  Bacterial polypetide isolated from the Sargasso Sea
MLEHFYDAEPFSEEEILNNLLSFKNFAEAFSVNTTDLLMNWSEEGKEVLFEGAQGTFLDIDHGTYPYVTSSSTTIGGVSSGLGIGPKHINNVIGIVKAYATRVGEGPFITELFDEDGEEIAKRGNEFGATTGRPRRCGWLDLVALKKAIFINSVDSLCMTKADVLDTFENIRVCVAYDDNNLPIYKRFEGWQQDTSQCSSYDELPQKLKDYVKFIEETVNCKVSIISVGPSREQSIHL

SEQ ID NO: 196574 - protein, 152 aa, Unknown
  Bacterial polypetide isolated from the Sargasso Sea
MNRNVVVVGTQWGDEGKGKIVDLLTNHVSAVVRFQGGHNAGHTLVIGNEKIVLHLVPSGILHAGVRCLIGNGVVFEPFAFMKEVELLETRGFSIRERLTVSPAAQLIMPYHALIDSAREEALGGKKIGTTGRGIGPAYEDKVARRGIRVGDL

SEQ ID NO: 196575 - protein, 216 aa, Unknown
  Bacterial polypetide isolated from the Sargasso Sea
KKKILFEGAQGILLDVDHGTYPFVTSSNTVASSAATGSGCGISTINYILGITKAYTTRVGQGPFPTELKNQIGEKLGERGKEFGTVTSRKRRCGWFDGVLVRQTIKTSGINGIALTKLDVLDEFDQIKICVGYELDGKKIDYLPASSEQQFKVRPVYKTFEGWNTSTCGIKKFSDLPKNAQSYINFIEEFVETKVSTISTSPERNDTILIENPFKD

SEQ ID NO: 196576 - protein, 315 aa, Unknown
  Bacterial polypetide isolated from the Sargasso Sea
ISLLGLQWGDEGKGKVVDHLAKDLDAAIRYQGGHNAGHTLIVGGKRIVFHLLPSAICHDDIHCYIGRGVVVSLDALFEEIEEAQEVIGNIEDRLTVSSACSLIQPYHIKLDQLREGSKKLTKIGTTGRGIGTAYEDRVGRRSIRVADLYNEKKLKDKLEEVLDFYNSIFVHSFNSEEIDLIELFEKNLIQGDKLKPYVGNVIQEVRDLQESNKKILFEGAQGALLDVSLGTYPYVTSSNSSVGGIASGIGISPTNIDFSLGIAKAYTTRVGEGPFPTELFDAVGTFLAEKGGEVGATTGRPRRCGWLDAFLLSHT

SEQ ID NO: 196577 - protein, 306 aa, Unknown
  Bacterial polypetide isolated from the Sargasso Sea
YTFYHRELDTAREHELDGIKIGTTGRGIGPAYEDKVGRRAIRLCDIFDKKNLKKKIENALFHHNPIRKGLGIKEVKSDNILNQLYDITDFIKPYVTNIWNDLIKLQSENKNILFEGAQGMLLDNDHGTYPFVTSSNTISAQASIGSGLGNIKNCYTLGITKAYLTRVGEGPFPTEQNNSIGEKLGLIGNEFGTVTGRKRRCGWLDLVLLKQSVDICGIHGLALTKLDVLDEFEKINICTSYNFNGKKYNYLPPIISSTDALKTEYIELDGWNKSTRGCRSYNELPRNAKKYIQILKEITGVEVSLL

SEQ ID NO: 196578 - protein, 181 aa, Unknown
  Bacterial polypetide isolated from the Sargasso Sea
IGSGCGPSSIQYVLGITKAYTTRVGEGPFPTELKDKIGQSIGKRGKEFGTVTSRKRRCGWFDGVLVRQTIKISGINGIALTKLDVLDELEEIKICTKYELNGNVIDYLPAAHEDQLKVKPIYEKFEGWQSSTQGIKNIDSLPEKAKKYIYAIEDFIGAKICSISTSPEREDTILIENPFEL

SEQ ID NO: 196579 - protein, 270 aa, Unknown
  Bacterial polypetide isolated from the Sargasso Sea
RLSLVLEHHNAIRKGLGKSIYEKDKLVEDLLKIAPNILKYSAPVWRKIDQFKSENKKILFEGAQGILLDVDHGTYPYVTSSNTVAASAATGSGCGPNSINYVLGITKAYTTRVGEGPFPTELTDEIGNHLGEKGHEFGTVTSRKRRCGWFDGVLVRQTIKISGIDGIALTKLDVLDELDQIKICVAYELNGKKIDYFPTAVDDQINVKPVYKIFEGWKSKTQGIKKFQDLPNNAKIYVKAVEEFIEAKISSISTSPERKDTILLIDPFNN

SEQ ID NO: 196580 - protein, 181 aa, Unknown
  Bacterial polypetide isolated from the Sargasso Sea
RRGIGPAYEDKVGRRSIRVMDLVSEGNLDHRLETVLLHHNAIRKGLGKKVYKKDKLKKDLLKIAPEILKYSKPVWKKIDEFKSQNKKILFEGAQGVLLDVDHGTYPFVTSSNTVASSAATGSGCGPNSINYVLGITKAYTTRVGEGPFPTELKDKIGEELGTKGKEFGTVTSRKRRCGWFD

SEQ ID NO: 196581 - protein, 299 aa, Unknown
  Bacterial polypetide isolated from the Sargasso Sea
NLIISESANLILPFHREMDEIREDAAGKSKIGTTRRGIGPAYEDKVGRRSIRVMDLVSESNLDHRLEAVLMHHNAIRKGLGKEIYKKDKLKQDLLKIAPEILKYSQPVWKKIDEFKSEEKKILFEGAQGILLDVDHGTYPFVTSSNTVASAAATGSGCGPSTINYVLGITKAYTTRVGEGPFPTELIDETGEKLGAIGKEFGTVTSRKRRCGWFDGVLVRQAIKISGIDGIALTKLDVLDQLDEIKMCIAYEVNGEKIDYLPASVDDQLKAKPIYKNFKGWNCPTNGIKKFDVFLKMQK

SEQ ID NO: 196582 - protein, 182 aa, Unknown
  Bacterial polypetide isolated from the Sargasso Sea
MKIDLILGLQWGDEGKGKIVDVLTKDYDIIARFQGGPNAGHTLEFDGIKHVLHTIPSGIFHDNKLNIIGNGVVIDPVIFQNEIEKLDELKVDLNDKLLISRKAHLILPTHRLIDKASELSKGKKKIGSTLKGIGPTYMDKTGRNGLRVGDLELDGWDEKFEALTNKHVNIINNFNVDIEFNI

SEQ ID NO: 196583 - protein, 218 aa, Unknown
  Bacterial polypetide isolated from the Sargasso Sea
VDLLEPNIFHEKLNKSFIFATNLLSAISSSDFDLDFDSVYNDYLKMGKLLSPYISDISLELYNAYNNNKTILFEGAQGISLDVDHGVYPYTTSSNTIAGSISTGTGVSYRDIHRIIGVTKAYLSRVGEGPLPSEVHGEEAIQLREKGGEYGTTTGRPRRVGWLDLVQVRQAVRVNGLTEIALTKLDILSNTKELSVCTAYDINGVKESEIPASLHKFT

SEQ ID NO: 196584 - protein, 292 aa, Unknown
  Bacterial polypetide isolated from the Sargasso Sea
INYLKDKGVNPKLKISDRAHVIMPYHIEMDTALTKHQGKLAAGSTKRGIAPVYGDKMYRHGIRMIDLTEPDVFSEKLDKAYSFNQTMIEAFGHSIEQNKKSIYEQYIKYGEILSPYISDISVDLFNAHKKGASILFEGAQGISLDIDHGVYPHTTSSNTVAGHVAAGTGVSFRDIHRIIGVTKAYLSRVGQSPLPTELSGVEAETLREKGGEYGTTTGRPRRVGWLDLVQVRQAVRTNGLTEIALTKLDILSGFSSLPVCHSYKIDSKEVREMPASLSQFRSAKPIYETLEG

SEQ ID NO: 196585 - protein, 221 aa, Unknown
  Bacterial polypetide isolated from the Sargasso Sea
MKNNIFLIGTHWGDEGKGKVVDVLSENASACVRFQGGHNAGHTLVINDKKFVLHLIPSGILRDNVKSIIGNGVVVSIDALITEIDELTINKIPLNDKLFISQNCHLILPTHIALDKARETSLGKKSIGTTGRGIGPCYEDKVSRKGIRFLDLQNVDIFQKKLAQLMEFHNFILKEYYKEEPIDISFVRDDILNKYKKISSFIINTDEYINQLCKSGGVVFE

SEQ ID NO: 196586 - protein, 202 aa, Unknown
  Bacterial polypetide isolated from the Sargasso Sea
MKNNIFLIGTHWGDEGKGKVVDVLSENASACVRFQGGHNAGHTLVINDKKFVLHLIPSGILRDNVKSIIGNGVVVSIDALITEIDELTVNKISLHDKLFISQNCHLILPTHIALDKAREISLGKKSIGTTGRGIGPCYEDKVSRKGIRFSDLQNVDIFQKKLTQLMEFHNFILKEYYKEKPIDIIFVRDDILSKYKKISSFI

SEQ ID NO: 196587 - protein, 208 aa, Unknown
  Bacterial polypetide isolated from the Sargasso Sea
AQGVLLDVDHGTYPFVTSSNTVASSAATGSGCGINSINYVLGITKAYTTRVGEGPFPTELTDEIGELLGMRGKEFGTVTSRKRRCGWFDGVLVRQTLKISGIDGIALTKLDVLDELDEIKMCIAYEINGKKYDYLPASVDDQFKARPIYKFFKGWKSSTVGIKKFEELPENAKIYIKELEKFVETRISSISTSPERNDTILIQDPFNL

SEQ ID NO: 196588 - protein, 242 aa, Unknown
  Bacterial polypetide isolated from the Sargasso Sea
MKNVVVVGSQWGDEGKGKIVDWLSSEADVVVRFQGGHNAGHTLVIDKKVFKLRLLPSGIVREGKISILGNGVVIDPWALLDEIKEIKKKGINVSPDNFMISESASLILPFHQEMDEIREDAAGKRKIGTTRRGIGPCYEDKVGRRSIRVMDLRSESNLDSRLENVLLHHNAIRKGLKKKVYKKNDLKKKLLKIAPEILKFAKPIWLKLDEFIKDRKKILFEGAQGILLDVDHGTYPYLFIKY

SEQ ID NO: 196589 - protein, 301 aa, Unknown
  Bacterial polypetide isolated from the Sargasso Sea
VEVNVNIFAISESANLILPFHKEMDEIREDAAGKSKIGTTRRGIGPAYEDKVGRRSIRVMDLRSEKNLDQRLDSVLVHHNAIRKGLGKKIFQKDQLKSDLLKIAPKILEFSQPVWLKIDQFTKQKKKILFEGAQGILLDVDHGTYPFVTSSNTVASSAATGTGCGPNSINYVLGITKAYTTRVGEGPFPTELTDDIGELLGARGKEFGTVTSRKRRCGWFDGVLVRQTIKVSGIDGIALTKLDVLDELDEIKMCVAYDLDGKKLDYLPAAVEDQIKIKPIYETFPRMESFYKWSQKYGLVT

SEQ ID NO: 196590 - protein, 272 aa, Unknown
  Bacterial polypetide isolated from the Sargasso Sea
MKKSLILVGTQWGDEGKGKIVDYFSKKFDAVCRFQGGHNAGHTIYKEEEKFVLHLIPSGVFYDHVSCFIGQGVILSLDSLLEEIEQLESKGVELEGKLRISRYCSLLLPIHAKIDQLREDKKNAIGTTRRGIGPAYEDKTARRSIKAFDLEDNELLEEKLKNLVDYYNFQIETIHESECFVYEEVLDNLKKSYQKASKYFGDVTDSLEEIYEGGGNILYEGAQGTLLDVDYGTYPYVTSSNTLATSVGVGSGFPKSIYSDVLGVTKAYTTRV

SEQ ID NO: 196591 - protein, 287 aa, Unknown
  Bacterial polypetide isolated from the Sargasso Sea
DWLSSEADVVVRFQGGHNAGYTLVIDKKIFKLRLLPSGIVRKGKISILGNGVVIDPWALLKEIEEIKKQGVEVTPENFMISESASLILPFHQEMDEIREDAAGKEKIGTTRRGIGPCYEDKVGRRSIRVMDLRSESNLDSRLENVLLHHNAIRKGLNNKIYEKDKLKKELLKIAPSILKFAQPVWLKLDKFNNERKKILFEGAQGILLDVDHGTYPYVTSSNTVPAMAATGSGSGPNKIDYILGITKAYTTRVGSGPFPTELNDDIGESLGKRGKEFGTVTARKRRC

SEQ ID NO: 196592 - protein, 204 aa, Unknown
  Bacterial polypetide isolated from the Sargasso Sea
LLLDVDFGTYPYVTSSNTLPGQASIGTGVGPKFLDQIIGITKAYTTRVGSGPFPTELFDESGEKLGRIGNEFGTVTGRERRCGWFDAVLVRQTAQISGIDMIALTKLDVLDSFEKINICVGYELDGKEIDYLPLSEPLQNKIIPIYEEHDGWLTDTSGINEFNELPLKALEYIKRIEEIISTPISIISTSPNREDIIFLEGIFN

SEQ ID NO: 196593 - protein, 272 aa, Unknown
  Bacterial polypetide isolated from the Sargasso Sea
MKNVAIVGSQWGDEGKGKIVDWLSSEADVVVRFQGGHNAGHTLVIDGVTYKLRLLPSGIVRKDKVSIIGNGVVVDPWALLDEINEIKLKGVEVNQKNLIVSEAANLILPFHREMDEIREDAAGKAKIGTTRRGIGPAYEDKVGRRSIRVMDLISEKNLDHRLETVLMHHNAIRKGLGKEIYKKDKLKENLLSIAPEILKYSQPVWKKIDEFKSQGKKILFEGAQGILLDVDHGTYPFVTSSNTVASAAATGSGCGTNSINYVLGITKAYTTR

SEQ ID NO: 196594 - protein, 216 aa, Unknown
  Bacterial polypetide isolated from the Sargasso Sea
MANVAVVGSQWGDEGKGKIVDWLSDQADIVIRFQGGHNAGHTLVINGITYKLKLLPSGIVRPGKVSVIGNGVVVDPWALLDEIKSIEKQGVKVSEENLIIAETANLILPYHREMDEIREDAAGQGKIGTTRRGIGPAYEDKVGRRAIRVMDLRSETNLDQRLDIVLQHHNAIRKGLSKKVYKKEELKKELMKIAPEILKFSQPVGKKLMSLKSKIK

SEQ ID NO: 196595 - protein, 270 aa, Unknown
  Bacterial polypetide isolated from the Sargasso Sea
NALSNHQGQLAAGSTGKGIAPVYADKMFRNGIRMIDLLDPNVFEEKLKKGYLFSKQIIEGALLQKLDVSMPEILKNYLHYGEQLASYICDTSVELYTAYQNGKSILFEGAQGISLDVDHGIYPFTTSSNTATGHISTGTGVTFRTINRVIGVVKGYLSRVGESPLPSEIKGADAESLRKKGGEYGTTTGRPRRIGWLDLVQVRQAVRVNGLTEIALTKLDILNNYKALNVCVSYDIEGEIVDEMPASLEKYRKSKPVYKTLHGWCSLPEK

SEQ ID NO: 196596 - protein, 252 aa, Unknown
  Bacterial polypetide isolated from the Sargasso Sea
EIFKKDKLKKELLTIAPEILKYSQPVWKKIDEFKSQKKKILFEGAQGILLDVDHGTYPFVTSSNTVASAASTGSGCGPNSINYVLGITKAYTTRVGEGPFPTELKDHVGETLGKRGNEFGTVTSRKRRCGWFDGVLVRQTIKISGIDGIALTKLDVLDELEEIKMCVAYSVDGEKMDYLPAAVDDQLKAKPIYKTFKGWKSSTKGIKKFDDLPANAKNYVKELEKFIETKISSISTSPERNDTILIVDPFNF

SEQ ID NO: 196597 - protein, 292 aa, Unknown
  Bacterial polypetide isolated from the Sargasso Sea
MKNVVVVGSQWGDEGKGKIVDWLSSKADVIVRFQGGHNAGHTLVIDGVTYKLRLLPSGIVRKNKVSIIGNGVVVDPWALLEEIKEIKLKGVDVSEKNLILSESANLILPFHKEMDEIREDAAGKAKIGTTRRGIGPAYEDKIGRRSVRVMDLASEDNLDQRLEAALIHHNAIRRGLGKDIYKKDQLKKDLLKIAPEILKFSQPVWKKIDEYKSKGKKILFEGAQGILLDVDHGTYPFVTSSNTVASSAATGTGCGPNTINYVLGITKAYTTRVGQGPFPTELTDDVGEKNWN

SEQ ID NO: 196598 - protein, 170 aa, Unknown
  Bacterial polypetide isolated from the Sargasso Sea
YVLGITKAYTTRVGEGPFPTELTDKVGDLLGTRGKEFGTVTSRKRRCGWFDGVLVRQTIKISGIDGIALTKLDVLDELDEIKMCVEYELDGKKLDYLPAAVEDQLKIKPIYKTFPGWKTSTNGIKNMDLLPENAKKYIFAVEKFIGAKVSSVSTSPERDDTILVENPFNI

SEQ ID NO: 196599 - protein, 288 aa, Unknown
  Bacterial polypetide isolated from the Sargasso Sea
AGHTLIVDGKKVVFHLLPSAICHPNIQCFIGRGVVVSLDALFSEINDAAEVLGNLEGRLTISSACSLIQPYHIKLDQLREQSNNLTKIGTTGRGIGTSYEDRVGRRSIRIADLYDESKLKEKITQALDFYNSIFTHSFGEKEININQLYDQNLQQAEKLKPYVGNVIEEIRNLQDQDKKILFEGAQGALLDISLGTYPFVTSSNLIGGITSGAGVSPADVDYTIGITKAYTTRVGEGPFPTELFDEVGTYLAETGGEVGATTGRPRRCGWLDGMLLENMTRLSGVNGL

SEQ ID NO: 196600 - protein, 210 aa, Unknown
  Bacterial polypetide isolated from the Sargasso Sea
MAKNVVVLGTQWGDEGKGKVVDLLTDRAKYVVRYQGGHNAGHTLVIDGEKTVLHLIPSGILRDNVTCIIGNGVVLSPDALMKEVTMLEERGVPVRERLKISEACPLILPYHVALDVAREKARGAKAIGTTGRGIGPAYEDKVARRGLRVGDLFNAEDFAAKLKEVLDVHNFTLTQYYGEEAVDFDETLKGAMAVADILKAMVIDVTDELD

SEQ ID NO: 196601 - protein, 285 aa, Unknown
  Bacterial polypetide isolated from the Sargasso Sea
MKNVVVVGSQWGDEGKGKIVDWLSSEADVVIRFQGGHNAGHTLVIDDKIYKLRLLPSGIVRKNKISIIGNGVVVDPWALLDEIEEIKKEGVEINEKNLFLSEAATLILPIHSELDTFREDNAKNEKIGTTKRGIGPAYEDKVGRRSIRVIDLLSEKNLDTKLTTLLKHHNFLRKGMGKTEYSKEKLKENLLKIAPKILKYSKPVWKKIEEFKKLNKKILFEGAQGILLDVDHGTYPFVTSSNTVASSAATGSGCGLGTINYILGITKAYTRRVGEGPFPTELKEK

SEQ ID NO: 196602 - protein, 163 aa, Unknown
  Bacterial polypetide isolated from the Sargasso Sea
MGIFKAYTTRVGSGPFPTELHDKTGEKLRKIGKEFGATTGRPRRCGWFDAVAAKYSCMINGLTDIALTKLDILDHFDNLKICIGYEYNGVELNNYSESIDIEDNIKPIYKEFKGWNTNLNGISDYNMLPLECREYIEYIEDFLETRISIISIGPGRNEIINRL

SEQ ID NO: 196603 - protein, 163 aa, Unknown
  Bacterial polypetide isolated from the Sargasso Sea
MSLDLLLGLQWGDEGKGKIVDAITSNYDIIARFQGGPNAGHTIEFDGNKHVLHTIPSGIFNKDSINLIGNGVVIDPGIFLKEIEGLDKYKIDLRKNLFISKRAHIILPTHKIIDAASEASKGKKKIGSTLKGIGPTYMDKTGRNGIRVGDIIDSSWQLKYNSL

SEQ ID NO: 196604 - protein, 197 aa, Unknown
  Bacterial polypetide isolated from the Sargasso Sea
MFYTIVGTQWGDEGKGKIVDWISSKADLIVRYQGGNNAGHTIKVDNDVYKLNLLPSGIINNKKCAIGNGVVLDPWALINEIDNLKEQGIEVNEDNLYIADNICLILPIHKLLDEINETSRGKKELGTTKKGIGPAYEDKVGRRAIRICDLKDPTFLKQKIDNLYAFHKDKISKHINKITHNYYEELLSMSSYLNSFS

SEQ ID NO: 196605 - protein, 303 aa, Unknown
  Bacterial polypetide isolated from the Sargasso Sea
GTTRRGIGPAYEDKVGRRSIRVMDLRSEQNLDHRLESVLIHHNAIRKGLGKKIFEKEQLKEELLKIAPKILQFSQPVWLKIDQFKKQKKKILFEGAQGILLDVDHGTYPYVTSSNTVASSAATGTGCGPNSINYVLGITKAYTTRVGEGPFPTELKDDIGELLGTRGKEFGTVTSRKRRCGWFDGVLVRQTIKISGIDGIALTKLDVLDELDEIKMCIHYELDGKKIDYLPAAVEDQLKIKPIFKTFPGWKTSTSGIKNMAALPENAKKYIFAIENFIGAKISSISTSPEREDTILVENPLNI

SEQ ID NO: 196606 - protein, 236 aa, Unknown
  Bacterial polypetide isolated from the Sargasso Sea
IYLSSNIPLILPYHKQLDKINESILSGEDKIGTTAKGIGPAYQDKVGRKSIKLYDLKSSDKVIEKLENIKKFYDPVLIAYQEEPINVEKYLSILDSFYTKIGTLIVDNSFIKKNFNQNKILFEGAQGALLDLDHGSYPFVTSSNTISSNIMIGSGLQVDYQTVGIFKAYATRVGNGPFPSELFNEIGDYIAETGVEFGTVTKRKRRCGWLDLVSLKYSCQVNRVNELCITKIDVLN

SEQ ID NO: 196607 - protein, 280 aa, Unknown
  Bacterial polypetide isolated from the Sargasso Sea
TTRRGIGPAYEDMVGRRGIRLIDLASKKNLSKKIETALLHHNIIRKGLGKNKISKKKLVKDLMAISPKILKYSQPVWKKIEEFKKKKKTIVFEGAQGILLDVDHGTYPFVTSSNTVAGSIFAGTGCGPNTVNYILGIVKSYTTRVGKGPFPTELKNESGNKMGRKGKEFGTVTNRKRRCGWFDAVIVRQSCAISGINAIALTKIDVLDEFKDLYICVAYKLNGKKINYFPSSTEDQNKVKPIYKRFDGWMKNTSGIKQWKKLPKNAQKYVSFIKKFCNVR

SEQ ID NO: 196608 - protein, 288 aa, Unknown
  Bacterial polypetide isolated from the Sargasso Sea
AEKGVNIEDNFLISSQCPLILPTHILLDNARERALGNKAIGTTGRGIGPAYEDKVGRRTIHLIDLLDPNKFREKLQHLMEYHNFLLKNHFHSDTSDIKEVEELWLSFASKISPFVADTSLEINDLLSNDKKILFEGAQGSMLDIDHGTYPFVTSSNTVAGAASTGSGVGPGVLNKILGITKAYTTRVGSGPFPTELDDANGKHLADVGVEFGATTGRPRRCGWLDLVALRRAIVNNSISHLCLTKLDVLDGLEEINVAVEYKLSGKVFSIMPNLNDHDLEKCKPIYKS

SEQ ID NO: 196609 - protein, 270 aa, Unknown
  Bacterial polypetide isolated from the Sargasso Sea
DTKLNEMLLHHNAIRKGLGKQIIKKNHLKEELLKIAPKILQFAQPVWKKIDEFKIQGKKILFEGAQGILLDVDHGTYPFVTSSNTVAASAAIGSGCGPNSINYVLGITKAYTTRVGEGPFPTELKDEIGKKLGSRGKEFGTVTSRKRRCGWFDGVLVRQTVKISGIDGIALTKLDVLDELEEIKMCVAYDIDGKRIDYLPTAADEQLKIKPIYKTFKGWKSSTVGIREFEKLPENAKIYVNELQSFIQSNISSISTSPERNDTILIKDPF

SEQ ID NO: 196610 - protein, 235 aa, Unknown
  Bacterial polypetide isolated from the Sargasso Sea
PQNLKIAENICLILPLHKDLDGINEDSRGNESIGTTKKGIGPAYEDKIGRRSIRLCDLSDENLLNKKIENLIAFHSLKLNFFDKKFDSNKLLNELLDVYKDISKYAFPIWKTINDFGSQNKTILFEGAQGALLDIDFGTYPYVTSSNTSSGQIFAGTGFGIKNNHTVFGISKAYTTRVGSGPFPTELFDEIGEYLVNKGQEFGTVTKRKRRCGWFDANLVKQSVKISGIDNLILT

SEQ ID NO: 196611 - protein, 323 aa, Unknown
  Bacterial polypetide isolated from the Sargasso Sea
GKVVDHLAKDLDAAIRYQGGHNAGHTLIVEGKKIVFHLLPSAICHDDIHCYIGRGVVISLDALFEEIEEAQEVIGNIEDRLTVSSACSLIQPYHIKLDQLREGSKKLTKIGTTGRGIGTAYEDRVGRRSIRVADLYDEKKLKDKLKEVLDFYNSIFKHSFGSEEIDLNELFEKNLIQGEKLKPYVGNVIQEVRDLQQANRKILFEGAQGALLDVSLGTYPYVTSSNSSVGGIASGIGMSPTDIDYSLGIAKAYTTRVGEGPFPTELFDDVGAFLAEKGGEVGATTGRPRRCGWLDAFLLSHTVKLNGIDGLCITKIDVLDGLE

SEQ ID NO: 196612 - protein, 273 aa, Unknown
  Bacterial polypetide isolated from the Sargasso Sea
MKNVVVVGSQWGDEGKGKIVDWLSDRADAIIRFQGGNNAGHTLVIDGVTYKLRLLPSGIVRKNKVSIIGNGVVVDPFALLKEIDEIKLKGIDISENNLIISESASLILPFHKELDEIREDLAGKKNIGTTKRGIGPAYEDKIGRRSIRIIDLNSKKSLDEKLETALNHHNAIRKGFGKEPYNKEKIKKDLIKIAPKILKYSQPVWKKIAEFKSQGKKILFEGAQGILLDVDHGTYPFVTSSNTVASSAATGSGCGPGLINYVLGITKAYTTRV

SEQ ID NO: 196613 - protein, 152 aa, Unknown
  Bacterial polypetide isolated from the Sargasso Sea
VGEGPFPTELFDDDGKKLQDIGNEYGATTGRPRRCGWFDGVAAKYSCMVNGLTEIALTKLDILDHFDTIKICTGYEIDGQVTTCFSKVLHNLDKVTPVYTEFKGWKTPTTGIENFEDLPGNTKEYINYISDFIKTPINIISTGPGRNQIIKR

SEQ ID NO: 196614 - protein, 205 aa, Unknown
  Bacterial polypetide isolated from the Sargasso Sea
MKNVVVVGTQWGDEGKGKIVDWLSSEADVVVRFQGGHNAGHTLVIDGIIYKLRLLPSGIVRKNKISVIGNGVVVDPWALLDEIKEIKSKGISIDKNNLILSESANLILPFHKEMDEIREDAAGEEKIGTTRRGIGPAYEDKIGRRSIRVMDLANENNLNSRLQTALIHHNAIRKGLGKKIFEKEQLKNNLLKIAPEILKFSQPVG

SEQ ID NO: 196615 - protein, 277 aa, Unknown
  Bacterial polypetide isolated from the Sargasso Sea
SRDSPGEDQLLETIYGVDPLDPEAVIKEYLGYGKRLAPHVVECTQAIHQAARDRKNILFEGAQGTLLDLDHGTYPYVTSSNPVSGGACIGAGVGPTLIDRVIGVAKAYTTRVGEGPFPTELSGRLNDQLTERGGEFGTTTGRRRRCGWFDGVIGRYAVQVNGLDCLAVTKLDVLDELDAIQVCVAYELDGERIEHFPSSAEDFARCTPIFETLPGWQCSTEDCRKLEDLPEAAMAYLRFLADLMEVPIAIVSLGASRDQTIVVEDPIHGPKRALLSA

SEQ ID NO: 196616 - protein, 310 aa, Unknown
  Bacterial polypetide isolated from the Sargasso Sea
GIVRKNKISIIGNGLFVDPWALLDEIKEIGEKGVEVNSENFMISEAANLILPFHREMDEIREDAAGKSKIGTTRRGIGPAYEDKVGRRSIRVMDLRSEKNLDQRLETVLLHHNAIRKGLGKKIFEKKQLKEDLLKIAPEILKFSEPVWLKIDKFKKQKKKILFEGAQGILLDVDHGTYPFVTSSNTVASSAATGTGCGINSINYVLGITKAYTTRVGEGPFPTELSNEIGELLGTRGKEFGTVTSRKRRCGWFDGVLVRQTIKVSGIDAIALTKLDVLDELEEVKMCVEYDLDGKKIDYLPAAVERSLKI

SEQ ID NO: 196617 - protein, 268 aa, Unknown
  Bacterial polypetide isolated from the Sargasso Sea
TNLGKRLENVLLHHNAIRKGLKKKLYKKEELKKKLLKIAPEILKYAKPVWLILDEFKKDRKKILFEGAQGILLDVDHGTYPYVTSSNTVPAMAATGSGLGPDKINYILGITKAYTTRVGSGPFPTELKNKIGESLGKRGKEFGTVTARKRRCGWFDGVLVRQTIKISGIDGIALTKLDVLDDLEEVKICVQYDLNGKKMDYLPATSEDQFKIKPIYKTFPGWKTNTQGIRNMKDLPENAKRYIYALEDFIGAKVSSISTSPERDDTIL

SEQ ID NO: 196618 - protein, 232 aa, Unknown
  Bacterial polypetide isolated from the Sargasso Sea
MPNIAIIGSQWGDEGKGKIVDWLSEKADVIVRFQGGHNAGHTLVVNNITYKLKLLPSGIIRKNKISIIGNGVVIDPWALLEEIKQLEKLGIKITNKNLFIAENATLILPPHKELDAIREDSKNTDKIGTTRRGIGPAYEDKVGRRAIRLMDLANKKNLSKKINMMLFHHDSIRKGLKKNKINKKKLIKDLVKISSKILKYSKPVWKKLEEFKKKKKKILFEGAQRYTFGYRS

SEQ ID NO: 196619 - protein, 203 aa, Unknown
  Bacterial polypetide isolated from the Sargasso Sea
MNNVAVIGSQWGDEGKGKIVDWLSSEADIVVRFQGGHNAGHTLVINGITYKLRLLPSGIVRKNKISIIGNGVVIDPWALLEEIDEIKSKGVKVDTDNLIISESANLILPFHKEMDEIREDAAGKAKIGTTRRGIGPAYEDKVGRRSIRVMDLISESNLDHRLETVLMHHNAIRKGLGKNIFRKDKLKKELLKIAPENFEIFTT

SEQ ID NO: 196620 - protein, 136 aa, Unknown
  Bacterial polypetide isolated from the Sargasso Sea
MFYTVVGTQWGDEGKGKIVDWISSKADLIVRYQGGNNAGHTIKVDDKVYKLNLLPSGIINNKRCAIGNGVVLDPWSLISEINNLKKENINVDNSNLIIADNVCLILPIHKLLDEINETSRGQNEIGTTKKGIGPAY

SEQ ID NO: 196621 - protein, 252 aa, Unknown
  Bacterial polypetide isolated from the Sargasso Sea
KKVFKKDQLKKDLLKIAPEILKFSQPVWKKLDEYKSQGKKILFEGAQGILLDVDHGTYPFVTSSNTVASAAATGTGSGINAINYVLGITKAYTTRVGAGPFPTELKDKIGNILGTRGKEFGTVTSRKRRCGWFDGVLVRQTVKISGVNGIALTKLDVLDELDEVKMCIAYEMNGKKIDYLPAGLDNQLKVKPIYETFPGWKKSTKGIRNVENLPDKAKKYIYALEDFIGAKISSISTSPEREDTILVENPFA

SEQ ID NO: 196622 - protein, 285 aa, Unknown
  Bacterial polypetide isolated from the Sargasso Sea
VVIDPWALLNEISEIKKQGINVTPENFMISESASLILPFHQEMDEIREDAAGGEKIGTTRRGIGPCYEDKVGRRSIRVMDLRSMTNLENRLENVLLHHNAIRKGLKKKVFEKEELKKKLLQIAPDILKYAKPVWLKIDEFKRDRKKILFEGAQGILLDVDHGTYPYVTSSNTVPAMAATGVGIGPDKIGYILGITKAYTTRVGSGPFPTELNDDIGEILGRRGKEFGTVTARKRRCGWFDGVLVRQTIKVSGINGIALTKLDVLDELDEIKMCINYDLNGKIMDY

SEQ ID NO: 196623 - protein, 302 aa, Unknown
  Bacterial polypetide isolated from the Sargasso Sea
IVTIRELVRKNKISIIGNGVVVDPWALLDEIDEIKFKGVEVNPDNLILSEAATLILPYHKEMDEIREDAAGKSKIGTTRRGIGPAYEDKVGRRSIRVMDLASESNLDKRLDAVLSHHNAIRKGLKKNEFKKEQLKKDLLKIAPQILKFSQPVWKKIDNFKSQNKKILFEGAQGVLLDVDHGTYPYVTSSNTVASSAATGSGCGINTINYVLGITKAYTTRVGEGPFPTELRDEIGDLLGIRGKEFGTVTSRKRRCGWFDGVLVRQTLKISGIDGIALTKLDVLDELDVIKMCIAYEINGKKI

SEQ ID NO: 196624 - protein, 245 aa, Unknown
  Bacterial polypetide isolated from the Sargasso Sea
MFYTIIGTQWGDEGKGKIVDWISSKADLVVRFQGGNNAGHTIKINKKIYKLNLLPSGIIRNKKCVIGSGVVLDPWALIKEIKNLKKQGIKINNKNLFIAENICLILPIHKIIDEINENNRGRETIGTTKKGIGPAYEDKVGRRAIRLCDLNDRKLLNKKINKLYNFHQVRLKKYNKKVDFNKIFKELVIISRYITKFSFPVWKLINKVGSANKFILFEGAQGALLDIDFGTYPYVTSSNTSSGQI

SEQ ID NO: 196625 - protein, 220 aa, Unknown
  Bacterial polypetide isolated from the Sargasso Sea
QKNIKKKILFEGAQGILLDVDHGTYPFVTSSNTVASSAATGTGCGPNSINYVLGITKAYTTRVGEGPFPTELVDKIGELLGTRGKEFGTVTSRKRRCGWFDGVLVRQTIKISGINGIALTKLDVLDELDEIKMCVEYELDGKKIDYLPAAVEDQLKIKPVYRTFDGWKSSTSGVKIIDDLPENAKKYIFAIEDFIGAKISSISTSPERDDTILVENPFEI

SEQ ID NO: 196626 - protein, 304 aa, Unknown
  Bacterial polypetide isolated from the Sargasso Sea
MIDEIKEIREKGVDVEPDNFMISEAANLILPFHREMDEIREDAAGKGKIGTTRRGIGPAYEDKVGRRSIRVMDLRSEKNLDKRLEIVLLHHNAIRKGLGKKLFKKDQLRKDLIKIAPEILKFSQPVWLKIDQFKKQKKKILFEGAQGILLDVDHGTYPFVTSSNTVASNASTGTGCGPNSINYVLGITKAYTTRVGEGPFPTELLDEVGELLGTRGKEFGTVTSRKRRCGWFDGVLVRQTIKVSGINGIALTKLDVLDELDEIKICIEYDLDGKIINYLPAAVEDQLKIKPIYKSFLGWKTSTK

SEQ ID NO: 196627 - protein, 198 aa, Unknown
  Bacterial polypetide isolated from the Sargasso Sea
GALLDVDNGFYPYVTSSNSSAAGIASGSGIGPLSVSNILGIVKAYTTRVGEGPMPTELFDDIGIHIAKKGGEVGATTGRPRRCGWFDAVAMKKVIQSNSIKSLCITKLDVFDGMESIKICDSYDNSDEFFEESLNLDHVKPQYIELSGWKKPIYGLKTLDDFPKEAIEFISKIEEVCGVSVDIISTGPERESTIFKND

SEQ ID NO: 196628 - protein, 193 aa, Unknown
  Bacterial polypetide isolated from the Sargasso Sea
NLYISDRATIILPLHQHLDELRENNNLIKIGTTKRGIGPAYEDKVARRALRLCDLFDKSKLLHKVEILLNHHNALLRGFNKKEYDVNEVAEDIYKLGQKVKPFAKTINELSNEIDNENQHILFEGAQGFLLDIDHGTYPYVTSSNVHASYASIGSGLSPKLINHILGITKAYTTRVGNGPFPTEQDNEIGNKL

SEQ ID NO: 196629 - protein, 294 aa, Unknown
  Bacterial polypetide isolated from the Sargasso Sea
MKNIVVVGSQWGDEGKGKIVDWLSEQADVVIRFQGGHNAGHTLVIDGVTYKLRLLPSGIVRKNKISIIGNGVVVDPWALLDEIKEIKSKGVQVDVDNFIISESANLILPFHREMDEIREDAAGKGKIGTTRRGIGPAYEDKVGRRSIRVMDLRSEKNLDQRLESVLLHHNAIRKGLGKKIFKKNQLKKDLLKIAPEILKFSQPVWLKIDQFKRQKKKILFEGAQGILLDVDHGTYPFVTSSNTVASSAATGTGCGPNSINYVLGITKAYTTRVGEGPFPTELRDDIGEFIGTRG

SEQ ID NO: 196630 - protein, 249 aa, Unknown
  Bacterial polypetide isolated from the Sargasso Sea
SGVTYKLRLLPSGIVRKEKVSIIGNGVVVDPWALLEEINEIKSKGVEINQKNLIVSEAANLILPFHREMDEIREDSAGKSKIGTTRRGIGPAYEDKVGRRSIRVMDLISEKNLDHRLETVLIHHNAVRKGLGKETYKKDKLKKELLKIAPEILKYSQPVWKRIDEFKLQGKKILFEGAQGILLDVDHGTYPFVTSSNTVAAAAATGSGCGPNSINYVLGITKAYTTRVGEGPFPTELTDEIGEKLGTVG

SEQ ID NO: 196631 - protein, 175 aa, Unknown
  Bacterial polypetide isolated from the Sargasso Sea
GKAKIGTTRRGIGPAYEDKVGRRSIRVMDLASESNLETRLEAALIHHNALRKGLKKKVFKKDKLKKDLLKIAPEILKFSQPVWKKLNEYKSKGKKILFEGAQGILLDVDHGTYPFVTSSNTVASAAATGSGFGSGSTNYILGITKAYTTRVGEGPFPTEQKNKIGNLLGSRGKEF

SEQ ID NO: 196632 - protein, 279 aa, Unknown
  Bacterial polypetide isolated from the Sargasso Sea
GNSDWVARFQGGNNAGHTVVIGDRTIKLHLLPSGITRTSCQLILGDGMVIDPWVLDQELEKWKSETGEEPDKNRLYISDRAHIILKFHRLVDGLDKKIGTTGRGIGPTYSDKINRVGLRFADLKHIVNNSEWISEMCSLYNRILSSLEIDVEITEHDLKNDLEWIQNRFGHTIKNTGLMLDNALKMKENVLLEGAQGCLLDIDQGTYPFVTSSVTSRSNASHGVGIHPGHIDEVIGIVKAYTTRVGHGPFPCELKDEVGDYLTEKGHEFGTTTGRRRRC

SEQ ID NO: 196633 - protein, 271 aa, Unknown
  Bacterial polypetide isolated from the Sargasso Sea
MTKTISLLGLQWGDEGKGKVVDHLAKDLDAAIRYQGGHNAGHTLIVDGKKIVFHLLPSAICHDDIHCYIGRGVVVSLDALFEEIEEAQEVIGNIENRLTISSACSLIQPYHIKLDQLREGSKKLTKIGTTGRGIGTSYEDRVGRRSIRVADLYNENKLKDKLEEVLDFYNSIFTHSFNSEEIDLNELHDKNLKQGEKLKPYVGNVIQEVRDLQEANKKILFEGAQGALLDVSLGTYPFVTSSNSSVGGIASGIGIVLQYRFFSWIAKAYTT

SEQ ID NO: 196634 - protein, 274 aa, Unknown
  Bacterial polypetide isolated from the Sargasso Sea
MKNIAVVGSQWGDEGKGKIVDWLSDQADVIVRFQGGHNAGHTLVIDGNTYKLRLLPSGVVRKNKVSIIGNGVVVDPWALVDEIEEIKLKGVEINKDNFIISESACLILPFHKEIDEIREDLSENKKIGTTRRGIGPAYEDKVGRRSIRIMDLKSESSLDFKLENAFLHHNIVRKGLGKKAYKKDELKKKLLDIAPKILEFSQPVWLKIDEYKKRKKKILFEGAQGILLDVDHGTYPFVTSSNTVAANAAIGTGCGPNLIQYVLGITKSYTTRVG

SEQ ID NO: 196635 - protein, 273 aa, Unknown
  Bacterial polypetide isolated from the Sargasso Sea
NVYAVCRFQGGHNAGHTIKVDGVQTVLHLIPSGVLHKNVKCLIGNGVVLSLEAIKKEIEGLEEFGVEIRDRLHISENCPLILPSHIKIDQVRDKDEFIGTTGRGIGPAYEDKVGRRAIRFGDLKDETLLRKKVSRLIKIHNKLLEHFYDAESFSEEEILNNLLSFKNFAEAFSVNTTDLLMNWSEEGKEVLFEGAQGTFLDIDHGTYPYVTSSSTTIGGVSSGLGIGPKHINNVIGIVKAYATRVGEGPFITELFDEDGEEIAKRGNEFGATT

SEQ ID NO: 196636 - protein, 104 aa, Unknown
  Bacterial polypetide isolated from the Sargasso Sea
MACLIIVGTQWGDEGKGKVVDLLTERADAVVRYQGGNNAGHTVMFGSKTFILHMVPSGILRETTSILGNGVVIDLSEFIKEINDLEKIGINVEKHLRISDRAQL

SEQ ID NO: 196637 - protein, 219 aa, Unknown
  Bacterial polypetide isolated from the Sargasso Sea
DQGRRLLFEGAQGTFLDIDHGTYPFVTSSNTVSGNACAGGGIGPRHISDVVGIVKAYTTRVGSGPFPTELLDQTGEFLRSEGEEFGATTGRPRRCGWFDAVLVRYAVRLNGITSLALTKLDVLDKFETLKLCVGYRMKDGSIQTDFPFEGHDEVEPVYEELPGWNTKTAGITEYEQLPKNLIDYLARIEELVEAPASIISTGPKREDTILLQPERFWKS

SEQ ID NO: 196638 - protein, 210 aa, Unknown
  Bacterial polypetide isolated from the Sargasso Sea
MSENTLILGLQWGDEGKGKIVDNLSQSVDVVCRFQGGHNAGHTIKVNDEQTVLHLIPSGILHDNAKCLIGNGVVLALDALDEEITKLKDKGINFQDRFYISSACSLILPSHISIDKVRDKKESIGTTGRGIGPAYEDKIGRRAVRFGDIGNKSILKEKIELLVGYHNRLLKELYNHEPYDVDEIFESVLKYKDLYDQFCVDSQDPLCMNG

SEQ ID NO: 196639 - protein, 251 aa, Unknown
  Bacterial polypetide isolated from the Sargasso Sea
MKNLTIIGAQWGDEGKGKIVDYLCNDYDIVLRFQGGHNAGHTIVVDNKKFILSILPSGLIRNKMCVIGSNVVIDPVHFVNEINLLKKKNIKISNANLKIANNASILLPFHSVIDKLREKSLSKKKIGTTGRGIGPCYEDKIARRGLKIYDLEDLKALKFRLKNLINFHNMFLKNSSIKKKISFNENFTLLKSLRKKILSFSVDIGDFINDKKFLNKKFLFEGAQGLMLDIDHGTYPFVTSSNTLPAVAALS

SEQ ID NO: 196640 - protein, 208 aa, Unknown
  Bacterial polypetide isolated from the Sargasso Sea
ILAEGAQGSLLDIDFGTYPFVTSSNTTSSGACSGLGVPPNKIKNIRGIFKAYTTRVGSGPFPTELFDSTGEKIRETGHEYGATTGRDRRCGWLDLVALKYSIQINGVTELNIMKSDVLSSIDKLYVCTSYNLNGEEINFFPYDITSNKITPNYKEFDGWDDDITQLKTEDDLPDELISYINFIENFVNVPIKLISVGPDRNQTIMRNR

SEQ ID NO: 196641 - protein, 114 aa, Unknown
  Bacterial polypetide isolated from the Sargasso Sea
TQWGDEGKGKIVDLLTEHAAAVVRYQGGHNAGHTLVIDGEKTVLHLIPSGVLREGVQCLIGNGVVVAPDALLREITKLEEKGVPVRERLRISPSCPLILSFHVALDQAREKARG

SEQ ID NO: 196642 - protein, 324 aa, Unknown
  Bacterial polypetide isolated from the Sargasso Sea
LQIRIMPSGIVRKNKISIIGNGVVIDPWALIDEIDEIKSKGISVDEKNLIISESATLILPFHVEMDEIREDAAGNAKIGTTRRGIGPAYEDKVGRRSIRVIDLVSEENLDKRLDNVLIHHNAIRKGLGKKVFEKENLKKELLKIAPKILRFCQPVWKKIEEFKKENKKILFEGAQGILLDVDHGTYPFVTSSNTVASSAATGSGCGLNSINYVLGITKAYTTRVGEGPFPTELKDEIGNHLGDKGHEFGTVTSRKRRCGWFDGVLVRQTIKISGIDGIALTKLDVLDELDEINLCVAYELNGKKIDYFPAAVEDQLNVKPVLKN

SEQ ID NO: 196643 - protein, 210 aa, Unknown
  Bacterial polypetide isolated from the Sargasso Sea
EGAQGILLDVDHGTYPFVTSSNTVASAAATGTGCGPNSINYVLGITKAYTTRVGEGPFPTELKNDIGEKLGTLGKEFGTVTSRKRRCGWFDGVLVRQTIKISGIDGIALTKLDVLDELDEIKMCIAYEVDGKKIDYLPAAVNDQIKAKPIYKSFKGWNCSTKGIKKFDELPDNAKNYIKELEKFIETKIASISTSPERNDTILIINPFSS

SEQ ID NO: 196644 - protein, 267 aa, Unknown
  Bacterial polypetide isolated from the Sargasso Sea
DNVLIHHNAIRNGLGKKIFEKENLKKELLKIAPKILRFSQPVWKKIEEFKKVNKKILFEGAQGILLDVDHGTYPFVTSSNTVASSAATGSGCGLNSINYVLGITKAYTTRVGEGPFPTELKNEIGDHIGEKGHEFGTVTSRKRRCGWFDGVLVKQTIKISGIDGVALTKLDVLDELDEINLCIAYELNGKKIDYFPAAIEDQLNVKPVYKKFDGWKSKTQGIKKFEDLPNNAKTYVKAIEEFIETKISSISTSPEREDTILLIDPFN

SEQ ID NO: 196645 - protein, 268 aa, Unknown
  Bacterial polypetide isolated from the Sargasso Sea
SKKIIEEKMHSIKKFYDPILESFNESNINIEQTIQDLLSFYDVVNELIVDNSQIKKEFKNKKILFEGAQGALLDLDHGSYPFVTSSNTVSSNIVIGSALQVDYQTVGIFKAYSTRVGNGPFPSELFDDIGDYIAEKGVEIGTVTKRKRRCGWLDLVSLKYSCEINRVNELCITKADVLNNLSEIKVCKSYNSKKYEDVNFSESDILESLSLENSDFELFSTWGEIKDLSNFETLPDNLKKYISYIENYLNIPIKIISLGPERNQTIIR

SEQ ID NO: 196646 - protein, 323 aa, Unknown
  Bacterial polypetide isolated from the Sargasso Sea
AHVIMPYHKLLDELIEESLGENKIGTTKKGIGPCYADKIQRKGIRIQDLLDKTNLEIKIRQNVDDVNLTLTKIYNQPPLIADEIIDEFSAYKDIVTSHVADTSLLIANAMKNKKTILFEGAQGTLLDIDHGTYPFVTSSNTSSGNAAIGSGIGPKNLDKIVGVTKAYISRVGSGPFITEQKNEIGDYLIEKGAEFGVVTGRRRRCGWLDLISLKYSARVNSLTELFITKLDVLSGLEELKLCVGYKNNGEVITDYPYDQNILNSAEPVYEIFDGWMDDISTVKSYEDLPDNAKSYIKAIQTFIDVPITFISVGPERTENIIIL

SEQ ID NO: 196647 - protein, 307 aa, Unknown
  Bacterial polypetide isolated from the Sargasso Sea
RKNKISIIGNGVVVDPWALLDEIKEIGEKGVDVNSENFMISEAANLILPFHREMDEIREDAAGKSKIGTTRRGIGPAYEDKVGRRSIRVMDLRSEKNLNQRLETVLLHHNAIRKGLGKKIYEKNQLKEDLLKIAPDILKFSAPVWLKIDQFKKQKKKILFEGAQGILLDVDHGTYPFVTSSNTVASSAATGTGCGPNSINYVLGITKAYTTRVGEGPFPTELVDEIGELLGTRGKEFGTVTSRKRRCGWFDGVLVRQTIKVSGIDGIALTKLDVLDELDEIMMCVEYDLNGKKIDYLPAAVKINLKL

SEQ ID NO: 196648 - protein, 256 aa, Unknown
  Bacterial polypetide isolated from the Sargasso Sea
RKGLTKSIFKKDQLLKDLLKIAPEILKFSKPVWKKLEEYRLKQKKILFEGAQGILLDVDHGTYPFVTSSNTVASSAATGSGCGPSNINYVLGITKAYTTRVGEGPFPTELKDKIGEQLGTKGKEFGTVTSRKRRCGWFDGVLVKQSIKISGINGIALTKLDVLDELDEIKMCVAYKLNGKQIDYLPAAAEDQLKVEPVYKIFKGWKTSTNGIKEFDKLPNNAKIYVKELEKFVETKVSSISTSPERNDTILIENPF

SEQ ID NO: 196649 - protein, 276 aa, Unknown
  Bacterial polypetide isolated from the Sargasso Sea
MHNKVKCIIGNGVVLSLEALSEEINILEKNNIEIENRLLISDGCPLILPVHVEIDKAREKKKGKSKIGTTGRGIGPAYEDKISRRGIRLGDLSNQEILLEKLKELFDYHNFILKNYYKVDIFEVNEVHEKLLEYFDNYKNFTIDVPEYINQSIKENKKIVFEGAQGTLLDIDHGTYPYVTSSNTTVGGIFTGSGVAPKNLSYILAIVKAYTTRVGAGPFMTELFDDDGKILSERGHEFGATTGRERRCGWLDLVALKRSIIINGFTGICLTKLDVL

SEQ ID NO: 196650 - protein, 295 aa, Unknown
  Bacterial polypetide isolated from the Sargasso Sea
LMKQREKSLGKNAIGTTGRGIGPVYEDKVARRALHVMDLFEKDLFKSKLTSLTTYHNFLLEELYKSDGTDLEETHKEWMGHFSKIKDLVVDSSKELNNLKLKQSNILFEGAQGSMLDIDQGTYPFVTSSSTLSGASSLGSGIGPLDIDGVLGITKAYATRVGSGPFPTEIDDDYGKHMAKIGVEFGATTGRPRRCGWLDLVALRKAVNINSISQLCITKIDVLDGLDKILVAEEYKIDEKIYDTLPAMSQNRFERISPIYKEYKGWSGITSGLKSFDQLPTEAKILIKGIEDSIG

SEQ ID NO: 196651 - protein, 83 aa, Unknown
  Bacterial polypetide isolated from the Sargasso Sea
MTALVVVGTQWGDEGKGKIVDLLTEQADAVVRYQGGNNAGHTVMFGDETHILHLIPSGILRDTMSILGNGVVIDLPEFLKGIE

SEQ ID NO: 196652 - protein, 299 aa, Unknown
  Bacterial polypetide isolated from the Sargasso Sea
NGVVIDPWALLEEIEDVRKQGVEINNKNLIISESATLILPLHKEMDEIRENAAGQSKIGTTKRGIGPAYEDKVGRRSIRVMDLASENNLEKRLESVLAHHNTIRKGLGKAVYKKDSLKKELLKIAPEILKFSQPVWQKIDEYKKKKKKMLFEGAQGVLLDVDHGTYPFVTSSNTVASTASTGSGCGPDTINYVLGITKTYTTRVGSGPFPTELKDNIGEQLGTVGKEFGTVTSRKRRCGWFDGVLVRQAIKISGINGIALTKLDVLDQLDEVKMCIAYELNGKKIHHLPAAVEDQLKVN

SEQ ID NO: 196653 - protein, 274 aa, Unknown
  Bacterial polypetide isolated from the Sargasso Sea
MPYHKMLDLALTNHQQKLAAGSTKRGIAPVYGDKMFRNGIRMVDLLEPNIFHEKLNKSFIFATNLLSAISSSDFDLDFDSVYNDYLKMGKLLSPYISDISLELYNAYNNNKTILFEGAQGISLDVDHGVYPYTTSSNTIAGSISTGTGVSYRDIHRIIGVTKAYLSRVGEGPLPSEVHGEEAIQLREKGGEYGTTTGRPRRVGWLDLVQVRQAVRVNGLTEIALTKLDILSNTKELSVCTEYDINGVKESEIPASLHKFRSAKPIYKQLPGWGD

SEQ ID NO: 196654 - protein, 284 aa, Unknown
  Bacterial polypetide isolated from the Sargasso Sea
NAGHTIEFEGNKHVLHTIPSGIFNTNAINLIGNGVVIDPVIFENEISGLQKFNLDINSKLLISNRAHIILPTHKMIDASSEASKGKKKIGSTLKGIGPTYMDKTGRNGIRIGDLKSDNWTDKYNALKDKHLTILSNFRTKIDIDLDKLEADFMGSIEILKKFNFINSEDFLNSSLISGKKVLAEGAQGSLLDIDFGTYPFVTSSNTTVSGACSGLGIAPNRIKSVIGIFKAYTTRVGSGPFPTELDNEIGYNIRKIGNEYGATTGRDRRCGWLDLVALKYSITI

SEQ ID NO: 196655 - protein, 171 aa, Unknown
  Bacterial polypetide isolated from the Sargasso Sea
MNNVVVVGSQWGDEGKGKIVDWLSSKADVVVRFQGGHNAGHTLVINGSTYKLRLLPSGIVRKNKTTIIGNGVVIDPWALLEEIEEIKGKGVEINPKNLYISEAANLILPIHRELDEIREDLAGKAKIGTTRRGIGPTYEDKAGRRSIRVIDLASEKNLDHRLELALTHHNA

SEQ ID NO: 196656 - protein, 203 aa, Unknown
  Bacterial polypetide isolated from the Sargasso Sea
LDVDHGTYPYVTSSNTVASCAATGTGCGPNSINYVLGITKAYTTRVGEGPFPTELKDDVGELLGTRGKEFGTVTSRKRRCGWFDGVLVRQTIKISGIDGIALTKLDVLDELDEIKMCIHYELDGKKIDYLPAAVEDQLKIKPIFKTFPGWKVSTSGIKNMDKLPENAKKYIFAIEDFIGAKISSISTSPEREDTILVENPFEI

SEQ ID NO: 196657 - protein, 277 aa, Unknown
  Bacterial polypetide isolated from the Sargasso Sea
KNLILSEAANLILPFHKEMDEIKEDDAGKGKIGTTRRGIGPAYEDKIGRRSIRVMDLISESNLDQRLEVVLTHHNALRKGLGKKAFKKEQLKKDLINIAPEILKFSQPVWKKLDEYKKEGKKILFEGAQGILLDVDHGTYPFVTSSNTVASTAATGTGCGLDTINYVLGITKAYTTRVGEGPFPTELKDKTGELLGSRGKEFGTVTSRKRRCGWFDGVLVRQSIKISGINGIALTKLDVLDEMDEIKMCISYELNGKKMNYLPRCAQRPTKNKTQFI

SEQ ID NO: 196658 - protein, 156 aa, Unknown
  Bacterial polypetide isolated from the Sargasso Sea
MQGSINDQLCDRGSEFGTTTGRRRRCGWFDGVIGKYAVSVNGLDCLAVTKLDVLDELDEIQVCIAYDLDGEEIDYFPTNSDDLKKCKPIFKKLKGWQCSTANCRNLSDLPQNAMNYLRFLAELMEVPIAIVSLGANRDQTIVIEDPIHGPKRALLR

SEQ ID NO: 196659 - protein, 232 aa, Unknown
  Bacterial polypetide isolated from the Sargasso Sea
KYSQPVWKKIDEFKSQEKKILFEGAQGILLDVDHGTYPFVTSSNTVAAAAATGSGCGPNSINYVLGITKAYTTRVGAGPFPTELTDKIGEELGTIGKEFGTVTSRKRRCGWFDGVLVRQTIKISGIDGIALTKLDVLDELEEVKMCIAYELDGKKIDYLPAAVDDQLKVKPVYKTFKGWKSSTKGIKKFDNLPDNAKNYINELEKFIESKISSISTSPERNDTILIEDPFKV

SEQ ID NO: 196660 - protein, 285 aa, Unknown
  Bacterial polypetide isolated from the Sargasso Sea
RSIRVMDLASENNLDKRLEAALIHHNALRKGLKQKVFKKDKLKKDLLKIAPQILKFSQPVWKRLNEYKSKGKKILFEGAQGILLDVDHGTYPFVTSSNTVASTAATGSGLGSNSESYVLGITKAYTTRVGEGPFPTEQKNKIGDLLGTRGKEFGTVTSRKRRCGWFDAVLVRQTIKISGINGIALTKLDVLDELDEIKMCTSYKLNGKKLDYLPAGAEDQFKIEPIYETFPGWKESTKGVRNIENLPDKAKKYIYALEDFIEAKISSISTSPEREDTILLENPFS

SEQ ID NO: 196661 - protein, 180 aa, Unknown
  Bacterial polypetide isolated from the Sargasso Sea
GLGSGLGPKDIDYVLGIAIAYTTRVGEGPFPTELIDSTGEALAKKGQEFGATTGRPRRCGWFDAVAMRRAVKVSSVSGLCLTKIDVLDDLEVVKICVDYECDYKRELFDFSSASLSDVTPNYIEIPGWRESTSGLTEYDQLPEAARNYVKVIEEKVGVPISMISTGPDREETIILENPFR

SEQ ID NO: 196662 - protein, 156 aa, Unknown
  Bacterial polypetide isolated from the Sargasso Sea
MKNVIVVGTQWGDEGKGKIVDWLSSEADVVVRFQGGHNAGHTLVIDGVTYKLRLLPSGTVRKDKVSIIGNGVVVDPWALIAEIKEMKSKGIEIDEKNLILSEAANLILPYHQEMDVIREDAAGKAKIGTTRRGIGPAYEDKVGKRSIRVMDLASEK

SEQ ID NO: 196663 - protein, 308 aa, Unknown
  Bacterial polypetide isolated from the Sargasso Sea
DTSKLKLSSNAHLIMPYHKLLDELIETKLGKNMIGTTKRGIGPCYADKIQRQGIRVQDLFDEKIFEEKVSTILDDKNEIITKIYNDKPFVLEEILSEFNEYRDTVKEIMTDTSLLISNAITEGKNVLFEGAQGTLLDIDHGTYPFVTSSNTTSGNAAIGSGIGPRDIDKIVGVTKAYISRVGTGPFLTEQENEVGDFLIEKGAEYGVVTGRKRRCGWLDLVSLKYSVRVNSLTELFITKLDVLSGLNELKLNIAYEINGSEVTDFPRQQRVLYDGKPIYKNFKGWEEDISDTTSFEELPNEAKEYIKF

SEQ ID NO: 196664 - protein, 227 aa, Unknown
  Bacterial polypetide isolated from the Sargasso Sea
ASKNKKNILFEGAQGTLLDLDHGTYPFVTSSNPISGGACIGAGVGPTLIDRVIGVAKAYTTRVGEGPFPTELQGSINDQLCDRGSEFGTTTGRRRRCGWFDGVIGKYAVSVNGLDCLAVTKLDVLDELDEIQVCIAYDLDGEEIDYFPTNSDDLKKCKPIFKKLKGWQCSTADCRKLSDLPENAMNYLRFLAELMEVPIAIVSLGANRDQTIVIEDPIHGPKRALLR

SEQ ID NO: 196665 - protein, 278 aa, Unknown
  Bacterial polypetide isolated from the Sargasso Sea
AKIGTTRRGIGPAYEDKVGRRSIRVMDLVSDKNLDHRLETVLMHHNAIRKGLGKEIYKKDKLKEDLLKIAPEILKYSQPVWKKIDEFKSQGKKILFEGAQGVLLDVDHGTYPFVTSSNTVASAAATGSGCGPNSINYVLGITKAYTTRVGEGPFPTELTDTIGEKLGTIGKEFGTVTSRKRRCGWFDGVLVRQTIKISGIDGIALTKLDVLDQLDEIKMCIAYEVDGKKIDYLPAAVDDQLRAKPIYKNFKGWNCSTKGIKNFDDLPDDAKNYVKELE

SEQ ID NO: 196666 - protein, 254 aa, Unknown
  Bacterial polypetide isolated from the Sargasso Sea
DIHQKIDLAREKKRGKNKIGTTGRGIGPAYEDKVARRGIRVADLDSPDQVLSKLEDQFTYHNIFLKDADEEIASAEETFKDLMAISDDIRQFAQPVWKKMDELRAQGSRILFEGAQGVMLDVDHGTYPFVTSSNTVAGQAAAGSGTGPTSINYVLGITKAYTTRVGSGPFPTELLDKIGETLGERGHEFGVVTGRKRRCGWFDAVMVKQAIKTSGITGIALTKMDVLDGFETLKVCDGYELQGSRIDYFPSSSK

SEQ ID NO: 196667 - protein, 74 aa, Unknown
  Bacterial polypetide isolated from the Sargasso Sea
MSKNVVVIGTQWGDEGKGKIVDLLTEDVAAVVRFQGGHNAGHTLVIEGNKTVLHLIPSGILHENVHCLIGNGVV

SEQ ID NO: 196668 - protein, 139 aa, Unknown
  Bacterial polypetide isolated from the Sargasso Sea
MDIYNFLIKRHDESQQEDLNELFENNLKQSERLQPFVGNVISLLKDLQESSKTVLFEGAQGALLDYSLGTYPFVTSSNSSLGGIASGAGVSATNIDYSLGICKAYTTRVGEGPFPTELQDETGDYIAEKGGEVGATTGR

SEQ ID NO: 196669 - protein, 297 aa, Unknown
  Bacterial polypetide isolated from the Sargasso Sea
MKNVAVVGSQWGDEGKGKIVDWLSEQADVVIRFQGGHNAGHTLVIEGVTYKLRLLPSGIVRKNKISIIGNGVVVDPWALLDEIKEIKEKGVDVNSENFMISEAANLILPFHREMDEIREDAAGKGKIGTTRRGIGPAYEDKVGRRSIRVMDLRSEKNLDQRLETVLLHHNAIRKGLEKKIFEKNQLKKDLLKIAPEILKFSKPVWLKIDQFKKQKKKILFEGAQGILLDVDHGTYPFVTSSNTVASSAATGTGCGPNSINYVLGITKAYTTRVGEGPFPTELVDEIGELLGTRGKEL

SEQ ID NO: 196670 - protein, 276 aa, Unknown
  Bacterial polypetide isolated from the Sargasso Sea
REIVDWLSSEADVVITFQGGHNAGHTLVIDGITYKLRLLPSGIVRKNKISIIGNGVVVDPWALLDEIEEAKSKGVEINENNLILSEAATLILPFHREMDEIREDSAGKSKIGTTRRGIGPAYEDKVGRRSIRVMDLASKQNLENRLSLVLEHHNAIRKGLGKPIYEKDKLVEDLLKIAPNILKYSAPVWRKIDQFKSENKKILFEGAQGILLDVDHGTYPYVTSSNTVAASAATGSGCGPNSINYVLGITKAYTTRVGEGPFPTELTDDIGNHLGE

SEQ ID NO: 196671 - protein, 284 aa, Unknown
  Bacterial polypetide isolated from the Sargasso Sea
NGIRTIDLLEPKVLKEKLEKGYSFAKGLIEKALERSLDIKEEEIYDSYLSYGEQLKPYIHDTSVELYDALKAGKSILFEGAQGISLDVDHGVYPFTTSSNTAAGHISTGTGVSFRDIGRIIGVVKAYLSRVGESPLPSEIHGDEAEDLRQKGGEYGTTTGRPRRVGWLDLVQVRQAVRVNGLTEIALTKLDVLNGFEVLKVCTAYDIDGEQITEMPASLTKYRNAKPKYKSLPGWKTLPDQVWTKGFNALPETLKDYISFIEDAVDCSVKIVSVGPQRHETIIR

SEQ ID NO: 196672 - protein, 41 aa, Unknown
  Bacterial polypetide isolated from the Sargasso Sea
MTALVVVGTQWGDEGKGKIVDLLTEQADAVVRYQGGNNAGH

SEQ ID NO: 196673 - protein, 168 aa, Unknown
  Bacterial polypetide isolated from the Sargasso Sea
LGITKAYTTRVGAGPFPTELIDKIGDELGTKGKEFGTVTSRKRRCGWFDGVLVRQTIKISGINGIALTKLDVLDELSEIKMCVAYELDGKKIDYFPTSIEDQMKLKPIYKSFNGWKTSTKGIKNFNDLPERAKTYVTELEKFINSKISSISTSPERKDTILMVNPFNI

SEQ ID NO: 196674 - protein, 270 aa, Unknown
  Bacterial polypetide isolated from the Sargasso Sea
LILPTHISIDQRRDKKESIGTTGRGIGPAYEDKVGRRAIRFGDIGDNKLLRKKVELLVDYHNRLLKDLYKDSPHDVDEVYDYVMKYKHLYDEYCVDSQDQMYEWVENKKSILFEGAQGTLLDIDHGTYPYVTSSSTTAGGVSTGLGIGPKYIDKIIGISKAYTTRVGEGPFLTELFDEDGELLAKKGNEFGATTGRPRRCGWLDLVALKKAVFTNSVTDLCITKLDVLDETKIIKVCIEYDNDNPVYKKFDGWLCSTEGITEYSELPEKA

SEQ ID NO: 196675 - protein, 265 aa, Unknown
  Bacterial polypetide isolated from the Sargasso Sea
KIKDNIYKLNLLPSGIIRNKQCLIGNGVVLDPYALINEIESLNSQGIAVSTKNLFIAENVCLILPIHKVIDEVNELDRGNKTIGTTKKGIGPAYEDKVGRRAIRLCDLKNHKTLKNKLEKLIIFHELRLKKYNKNIDLDEIYNSLVRISEYLIKFSTPIWKIINEAGVKNKFILFEGAQGSLLDIDFGTYPYVTSSNTSSGQIFAGTGFGIKENHKILGITKAYTTRVGSGPFATELNDKIGDYFVEIGKEYGTVTKRRRRCGWF

SEQ ID NO: 196676 - protein, 274 aa, Unknown
  Bacterial polypetide isolated from the Sargasso Sea
FQGGHNAGHTLVIDKKVFKLRLLPSGIVRDGKISILGNGVVIDPWALLSEIEEIKKKGVKVTPENFMISDTASLILPFHQEMDEIREDAAGKSKIGTTRRGIGPCYEDKVGRRSIRVMDLGSESNLDARLENVLMHHNAIRKGLKKKIYKKEILKKKLLDVAPKILKFAKPIWLELDKFQNNRKKILFEGAQGILLDVDHGTYPYVTSSNTVPSSAATGSGSGPDKIGYVLGITKAYTTRVGSGPFPTELKNKIGETLGKRGKEYGTVTARKRR

SEQ ID NO: 196677 - protein, 131 aa, Unknown
  Bacterial polypetide isolated from the Sargasso Sea
TGRKRRTGWFDAVAMKRAVQINSITGFCLTKLDVLDGLESLQICVGYKDADGNVKDVPPMAADGYEKVTPVYEEMPGWTDNTFGVTEFEALPQAAKNYIKRLEELTGVPVDIVSTGPDRNETIVLRSPYDA

SEQ ID NO: 196678 - protein, 300 aa, Unknown
  Bacterial polypetide isolated from the Sargasso Sea
LPIHKIIDEVNEIERGNENIGTTMRGIGPAYEDKVGRRAIRLCDIQNFDLLKNKLDKLHKFHQPRLEKYNKNIDVDIVYKDILSIGKHIIKFASPVWKIINEAGEKKNIILFEGAQGSLLDIDFGTYPFVTSSNTSSGQVFAGTGFGIKDNHKVFGITKAYTTRVGSGPFPTELKDDIAIYLTEKGKEFGTVTKRKRRCGWFDASLVKQSLKISGVTDIVLTKLDVLDELDIIKICTGYKINGKNYDYLPFDEKLQEHIEPIYKSLDGWNQTTFGITKWESLPENAKKYILFIEKILKRK

SEQ ID NO: 196679 - protein, 284 aa, Unknown
  Bacterial polypetide isolated from the Sargasso Sea
AGKEKIGTTRRGIGPCYEDKVGRRSIRVMDLRSESNLDSRLENVLLHHNTIRRGLKKKVYKKIDIKKKLMKIAPEILKYAKPIWLKLEEFKKDRKKILFEGAQGILLDVDHGTYPYVTSSNTVPAMAATGSGLSPDKIGYILGITKAYTTRVGSGPFPTELKNKIGDTLGRRGKEFGTVTARKRRCGWFDGVLVRQTIKISGINGIALTKLDVLDELDEIKMCIKYDLNGKKLDYLPAATEDQFKIKPVYKTFSGWKSNTKGVRNIRDLPENAKKYIFALEDFI

SEQ ID NO: 196680 - protein, 327 aa, Unknown
  Bacterial polypetide isolated from the Sargasso Sea
LSSQADVIVRFQGGHNAGHTLVIDGVVYKLRLLPSGIVRKSKISIIGNGVVVDPWALLEEIDEIKSKKVEINSDNLILSEAATLILPFHKEMDEIREDAAGKSKIGTTRRGIGPAYEDKIGRRSIRVMDLASENNLDKRLDVVLNHHNAIRKGLGKPEFKKEKLKKDLLNIAPQILKFSQPVWKKIDEFKSENKKILFEGAQGVLLDVDHGTYPFVTSSNTVASSAATGSGCGMNFINYVLGITKAYTTRVGEGPFPTELRDEIGDLLGTRGKEFGTVTSRKRRCGWFDGVLVRQTLKISGIDGIALTKLDVLDELDEIKMCVAYEI

SEQ ID NO: 196681 - protein, 246 aa, Unknown
  Bacterial polypetide isolated from the Sargasso Sea
MKSVVVVGTQWGDEGKGKIVDWLSSEADVVIRFQGGHNAGHTLVINGVTYKLRLLPSGIVRKDKISVIGNGVVLNPWAFLDEIEEIKSKGIEVNDENLILSESATLILPFHIELDEIREDAAGKAKIGTTRRGIGPAYEDKVGRRSIRVMDLISEKSLDLRLDSVLIHHNAIRKGLGKKIFNKDKLKKELLEIAPKILKFSKPVWKIINDFKLKGKKILFEGAQGILLDVDHGTYPFVTSSNTVAA

SEQ ID NO: 196682 - protein, 269 aa, Unknown
  Bacterial polypetide isolated from the Sargasso Sea
MKNVAVVGSQWGDEGKGKIVDWLSSEADVVVRFQGGHNAGHTLVINGITYKLRLLPSGIVRQNKISIIGNGVVVDPWALLEEIEELKLKGTDVNENNLILSEAATLILPFHREMDEIREDAAGNSKIGTTRRGIGPAYEDKIGRRSIRVMDLKSEKNLDHRLDAILSHHNTIRKGLGKKIYEKEQVIKDLLKIAQEILKYSQPVWKKIDEFKSQGKKILFEGAQGILLDVDHGTYPFVTSSNTVAASAAIGSRLWSNFINYVLSITKAI

SEQ ID NO: 196683 - protein, 123 aa, Unknown
  Bacterial polypetide isolated from the Sargasso Sea
GQLLAKRGNEFGATTGRPRRCGWLDLVSLKKAVFINSVTDLCITKLDVLDEIEIIKVCIEYSNNEPIYMEFDGWLSSTEGITEYSNLPLKARTYIEYIEDYIECSASIISTGPSREQTILRNT

SEQ ID NO: 196684 - protein, 251 aa, Unknown
  Bacterial polypetide isolated from the Sargasso Sea
VVRFHGGNNAGHTVIVDDNTYKLHLIPSGVLYEHPTSIIGNGVVVDPAALIKEINYLKDKGVNPKLKISDRAHVIMPYHIEMDIALTKHQGKLAAGSTKRGIAPVYGDKMYRHGIRMIDLTDPDVFSEKLDKAYSFNQTMIEAFGHNIEQNKKNIYEQYIEYGEILSPYISDISVDLFNAHKKGASILFEGAQGISLDVDHGVYPHTTSSNTVAGHVAAGTGVSFRDIHRIIGVTKAYLNRVGQSPLPTEL

SEQ ID NO: 196685 - protein, 273 aa, Unknown
  Bacterial polypetide isolated from the Sargasso Sea
GSQWGDEGKGKIVDWLSEQADVVIRFQGGHNAGHTLVIDGVTYKLRLLPSGIVRKKKISIIGNGVVVDPWALLDEVEEIKLKGVDVNVNNFIISESANLILPFHREMDEIREDAAGESKIGTTRRGIGPAYEDKVGRRSIRVMDLRSEQNLDHRLESVLLHHNAIRKGLGKKIFEKEQLKKELLKIAPKILQFSQPVWLKIDQFKKQKKKILFEGAQGILLDVDHGTYPYVTSSNTVASNAATGTGCGPNSINYVLGITKAYTTRVGEGPFPT

SEQ ID NO: 196686 - protein, 243 aa, Unknown
  Bacterial polypetide isolated from the Sargasso Sea
EEIYDSYLSYGEQLKPYIHDTSVELYNALKAGKSILFEGAQGISLDVDHGVYPFTTSSNTAAGHISTGTGVSFRDIGRIIGVVKAYLSRVGESPLPSEIHGDEAEDLRQKGGEYGTTTGRPRRVGWLDLVQVRQAVRVNGLTEIALTKLDVLNGFEVLRVCTAYDIDGEQITEMPASLTQYRNAKPKYESLPGWKTLPDEVWTKGFNALPETLKDYISFIEDAVDCSVKIVSVGPQRHETIIR

SEQ ID NO: 196687 - protein, 242 aa, Unknown
  Bacterial polypetide isolated from the Sargasso Sea
LLSMSNYLNSFSVPLWKIINELGQKNKNIVFEGAQGSMLDIDFGTYPYVTSSNTISGQIFSGTGFSDRKNHKILGITKAYTTRVGSGPFPTELLDEIGEHLGEKGQEFGTVTKRKRRCGWFDSVLLKQSIKLNGITDIVLTKLDVLDELKEINVCTGYLIDNKHYDYLPSEEFLFEKIKPIYKKVDGWEKSTAGINIFNDLPENAKKYIQILEDLMETNISIVSTGPDRKETIDINGTLSNI

SEQ ID NO: 196688 - protein, 305 aa, Unknown
  Bacterial polypetide isolated from the Sargasso Sea
MRNVVVVGSQWGDEGKGKIVDWLSEQADIIVRFQGGHNAGHTLVIDGITYKLRLLPSGIVRKNKISIIGNGVVVDPWALLDEISEIKSKGVEVNEKNFIISDSANLILPFHSELDAIREDIAGKEKIGTTRRGIGPAYEDKVGRRSVRVMDLKSEKNLDKRLENVLTHHNAIRKGLGKDLYEKNKLKKELLEIAPKILKFSQPVWLKIDEFKKKNKRILFEGAQGILLDVDHGTYPFVTSSNTVASSAATGTGCGPNTINYVLGITKSYTTRVGEGPFPTELKDNIGEHLGTVGKEFGTVTSRKE

SEQ ID NO: 196689 - protein, 213 aa, Unknown
  Bacterial polypetide isolated from the Sargasso Sea
INDLCKQGGVVFEGAQGTMLDVDHGTFPYVTSSNTTLSGVVSGTGANMSLIKYGLGITKAYSTRVGHGPFPSELHNDIGQKIGKIGGEIGATTGRARRCGWLDLKVLKKSIRLNNLSGIALTKIDVLDNFDEISICVDYGSINYETFEVENLKFIKLPGWNESTVGITKYDDLPKNAKAYIEAIENLADISVDIISTGPARNEIIQKINIFDA

SEQ ID NO: 196690 - protein, 216 aa, Unknown
  Bacterial polypetide isolated from the Sargasso Sea
LERMLQVRQKFGTTRRGIGPAYEDKVGRRSIRVMDLVSEQNLDHRLETVLLHHNAIRKGLGKKVYQKKKLKQDLLKISSEILKYSKPVWKKIDEFKLQEKKILFEGAQGILLDVDHGTYPFVTSSNTVASSAATGSGCGPNSINYVLGITKAYTTRVGEGPFPTELTDEIGEELGTKGNEFGTVTSRKRRCGWFDGVLVRQTIKISGINGIALTKL

SEQ ID NO: 196691 - protein, 293 aa, Unknown
  Bacterial polypetide isolated from the Sargasso Sea
MCWITFSEIKLGTDAIGTTGKGIGPAYGDKISRKGIRAADLLDIDTLKDRLIALVESSNQLVDKNKVQNSLSVDELLELCKIWSEKLHPYIAPTGEYINDQLYKGYNAVLEGAQGVLLDIDHGTYPYVTSSNSSIGGAITGLSIQPRYLTSVVGVFKAYTTRVGAGPLPTELFDDVGESIRTIAREFGTTTGRARRVGWFDGVVAKYSHQVNGYTSAVITRLDVLDQFEVVKICTGYELDGEIVDQLPGGMAALSRCVPVYEELPGWDIPTAGMSDLNKLPKNARHYVDRIQD

SEQ ID NO: 196692 - protein, 203 aa, Unknown
  Bacterial polypetide isolated from the Sargasso Sea
MACLIIVGTQWGDEGKGKIVDLLTERADAVVRFQGGNNAGHTVMFGKKTFVLHLLPSGILRETTSILGNGVVIDLSELIKEINELEKMGIDVAKHLHISDRAHLVMPWHKTIDQLREQKKGKSKIGTTGRGIGPTYEDKAGRTGFRVGDLLEQQKFSSHLSEIAMEKNIFLTKYFDTDDKSFFAEDIFSAIYRLYKKNKALYC

SEQ ID NO: 196693 - protein, 310 aa, Unknown
  Bacterial polypetide isolated from the Sargasso Sea
REDAAGKDKIGTTRRGIGPAYEDKVGRRSIRIMDLRSEKNLDQRLESVLLHHNAIRKGLGKKIFEKNQLKNDLLKIAPEILKFSQPVWLKIEELKKQKKKILFEGAQGILLDVDHGTYPFVTSSNTVASSAATGTGCGPNSINYVLGITKAYTTRVGEGPFPTELKDQVGDLLGTRGKEFGTVTSRKRRCGWFDGVLVRQSIKISGIDGIALTKLDVLDELDEIKICIEYELNGKKIEYLPAAVDDQLKIKPIYRTFPGWKSSTKGIKNLRDLPEKAKKYVTAIEDFIGAKISSISTSPERDDTILIENP

SEQ ID NO: 196694 - protein, 164 aa, Unknown
  Bacterial polypetide isolated from the Sargasso Sea
VKGHSQQNYKGSINDQLCDRGSEFGTTTGRRRRCGWFDGVIGKYAVSVNGLDCLAVTKLDVLDELDEIQVCIAYDLDGEEIDYFPTNSDDLKKCKPIFKKLKGWQCSTANCRKLSDLPENAMNYLRFLAELMEVPIAIVSLGANRDQTIVIEDPIHGPKRALLR

SEQ ID NO: 196695 - protein, 189 aa, Unknown
  Bacterial polypetide isolated from the Sargasso Sea
MKNIVVVGSQWGDEGKGKIVDWLSEEADVIIRFQGGNNAGHTLVIDGVTYKLRLLPSGIVRKNKISIIGNGVVLDPWALIEEINELKSKGIEINQNNLIISESVSLILPYHKELDEIREDEAGKENIGTTRRGIGPAYEDKVGRRSVRLMDLFDPDNLDKKLEKALLHHNSIRKGIGKEIYKISELKEK

SEQ ID NO: 196696 - protein, 295 aa, Unknown
  Bacterial polypetide isolated from the Sargasso Sea
RDLDGLREDASGAGKIGTTRRGIGPAYEDKVGRRAIRVCDLAHLDDLDLQIDRLTAHHDALRAGFGEAPIDRAQLMADLTEIAAFILPFVKPVWLTLNKAKSEGKRILFEGAQGTLLDIDHGTYPFVTSSNTVAGTAASGTGLGPNAAGFVLGIVKAYTTRVGSGPFPSEQENDIGQRLGERGHEFGTVTGRKRRCGWFDAVLVRQSVAVSGVTGIALTKLDVLDGFEELKICVGYKIGDQSFDYLPAHAQDQAKAEPIYESIAGWSETTAGARSWAELPAQAIKYIRRIEELIG

SEQ ID NO: 196697 - protein, 169 aa, Unknown
  Bacterial polypetide isolated from the Sargasso Sea
QEMDEIRENAAGKDKIGTTKRGIGPCYEDKVGRRSIRVMDLRSESNLNARLEKVLLHHNAIRKGLKKKVYKKDELKKRLLEIAPKILKFAQPIWLKFEDFKKERKKILFEGAQGILLDVDHGTYPYVTSSNTVPAMAATGTGSGPNMIGYILGITKAYTTRVGSGPFPT

SEQ ID NO: 196698 - protein, 283 aa, Unknown
  Bacterial polypetide isolated from the Sargasso Sea
GIRIRDLLNKERLSNVIEIPLREKNGLLEKIYGIKPLKLEEIVEEYLDYGQRLSKHVVDCTRTIHAASKNKKNILFEGAQGTLLDLDHGTYPFVTSSNPISGGACIGAGVGPTLIDRVIGVAKAYTTRVGEGPFPTELQGSINDQLCDRGSEFGTTTGRRRRCGWFDGVIGKYAVSVNGLDCLAVTKLDVLDELDEIQVCVAYDLNGEEIDYFPTNSDDLKKCKPIFKKLKGWQCSTADCRKLSDLPENAMNYLRFLAELMEVPIAIVSLGANRDQTIVIEDP

SEQ ID NO: 196699 - protein, 205 aa, Unknown
  Bacterial polypetide isolated from the Sargasso Sea
LLDIDHGTYPYVTSSNTTAGGVATGSGLGPRYVDYVLGIIKAYSTRVGAGPFPTELFDDVGEFLCKQGNEYGATTGRRRRTGWLDSVAVRRAVQINSLSGFCLTKLDVLDGLKEVKICVAYRMPDGREVTTTPLAADDWKGIEPIYETMPGWSESTFGVKERSGLPQAALNYIKRIEELTGVPIDIISTGPDRTETMILRDPFDA

SEQ ID NO: 196700 - protein, 296 aa, Unknown
  Bacterial polypetide isolated from the Sargasso Sea
FIGQGVILSLDSLLKEIQEIEEKGIGLHGKLKISRYCSLLLPIHAKIDQLREDNKNAIGTTRRGIGPAYEDKTARRSIKAFDLENEEVLKKKVIDLVDYYNYQIKTIHKSEEFDADLVFTELLSNYEKASKYFGDVTDSLEDIYESGEAILYEGAQGTLLDVDYGTYPYVTSSNTLATSVGIGSGFPKSIFSDVLGVAKAYNTRVGEGPFPTELFCQDGKKIADIGNEYGATTGRPRRCGWLDLVALKYSAKLNNLTSLCITKLDVLDSFEKIKVCVGYEIEGKEVPFKSRLLHQA

SEQ ID NO: 196701 - protein, 267 aa, Unknown
  Bacterial polypetide isolated from the Sargasso Sea
NDKLMQALDFYNSVFKHSFSASQIDLNELVDLNLKQAEQLKPYVGNVIEEIRKLQKSKKKILYEGAQGALLDVSLGTYPFVTSSNLIGGVPAGVGISPSEIDYTIGITKAYTTRVGEGPFPTELFDDMGIYLAETGGEVGATTGRPRRCGWLDGFLLKNMVKVSGVDGLCLTKIDVLDGLEKIKICTEYSSELTEAEIIETMDLELAIPKYLEMPGWSKSTAGQTSYNQLDDNAKSFIEKIEEISGVPVIMISTGPKREERIIRQDI

SEQ ID NO: 196702 - protein, 247 aa, Unknown
  Bacterial polypetide isolated from the Sargasso Sea
NQLKKDLLKIAPIILKFSQPVWKKLDEFKLTGKKILFEGAQGILLDVDHGTYPFVTSSNTVASSAATGTGCGVNAINYVLGITKAYTTRVGEGPFPTELKDKTGEILGTRGKEFGTVTSRKRRCGWFDGVLVRQTIKISGINGIALTKLDVLDELEEIKMCVGYELRGKKIDYLPAAVEDQLEVKPIYKSFKGWKTSTKGTKSFKELPKNAQNYIEGLEKFIETKVASISTSPERKDTILIENPFSF

SEQ ID NO: 196703 - protein, 198 aa, Unknown
  Bacterial polypetide isolated from the Sargasso Sea
GTYPFVTSSNTVASAAATGSGCGLDSINYVLGITKAYTTRVGEGPFPTELKDKIGILLGTKGKEFGTVTNRKRRCGWFDGVLVKQSIKISGINGIALTKLDVLDGLNEIKMCVKYEINGKEIDYLPASSEDQKKVKPIYKTFPGWKEPTKGIRNLEDLPDNAKKYVHAVEDFIGAKISSISTSPEREDTVLLENPFGD

SEQ ID NO: 196704 - protein, 258 aa, Unknown
  Bacterial polypetide isolated from the Sargasso Sea
GHTVIVDGDTYKLHLFPSGVLYEYPTSIIGNGVVIDPAALINEINYLKDKGVNPKLKISDRAHVIMPYHIEMDIALTKHQGKLAAGSTKRGIAPVYGDKMYRHGIRMIDLTEPDVFSEKIDKAYSFNQTVIEAFGHSIEQNKKSIYEQYIEYGKILSPYISDVSVDLFNAHKKGASILFEGAQGISLDVDHGIYPHTTSSNTVAGHVAAGTGVSFRDIHRIIGVTKAYLSRVGQSPLPTELSGVDAETLREKGGEYGT

SEQ ID NO: 196705 - protein, 219 aa, Unknown
  Bacterial polypetide isolated from the Sargasso Sea
GSSRPDVTPVIGNGVVVDPEVLFEEIEGLRQQGVDTSKLVISSNAHLITPYHVTLDKVTERFLGKSKIGTTGRGIGPTYSDKIARIGIRVQDVFDESILRQKVEGALANKNQVLVKVFNRRAIETDAIVEGLLTYADALRPMVRDTSLLLNEALDADKVVLLEGGQGTLLDVDHGTYPFVTSSNPTSGGACTGSGIGPTRITRVIGILKAYTTRVGSGP

SEQ ID NO: 196706 - protein, 302 aa, Unknown
  Bacterial polypetide isolated from the Sargasso Sea
MGVVIDPKALLDEVSYLKTKGVTPNLLISDRAHIIMPYHKMLDLALTNHQQKLAAGSTKRGIAPVYGDKMFRNGIRMVDLLEPNIFHEKLNKSFIFATNLLSAISSSDFDLDFDSVYNDYLKMGKLLSPYISDISLELYNAYNNNKTILFEGAQGISLDVDHGVYPYTTSSNTIAGSISTGTGVSYRDIHRIIGVTKAYLSRVGEGPLPSEVHGEEAIQLREKGGEYGTTTGRPRRVGWLDLVQVRQAVRVNGLTEIALTKLDILSNTKELSVCTEYDINGVKESEIPASLHKFRSAKTIYK

SEQ ID NO: 196707 - protein, 186 aa, Unknown
  Bacterial polypetide isolated from the Sargasso Sea
ASAAATGSGCGPNSINYVLGITKAYTTRVGEGPFPTELKNEIGEKLGTVGKEFGTVTSRKRRCGWFDGVLVRQTIKIAGIDGIALTKLDVLDQLDEIKMCVAYEVGNKKMDYLPAAVEDQLKAKPIYKNFKGWRCSTKGIKNFDELPKNAKVYIKELEKFIETKIASISTSPERNDTILIVDPFSS

SEQ ID NO: 196708 - protein, 279 aa, Unknown
  Bacterial polypetide isolated from the Sargasso Sea
MPATVVLGAQWGDEGKGKLVDRIAEQATWVARFQGGNNAGHTVVLGDQILKFHLLPSGITRKECNLVLGDGMVIDPWVLDTELKNWQESSGEDPRGDRLFVSERAHIILPFHRYLDGLDKKIGTTGRGIGPSYADKINRIGLRFGDVEEVKDDDEWYESTVERMNASLTAAGCQDRITKDGLKSDVNWIWDNYSSCINNTGLMLDNALKMNEHVILEGAQGCLLDIDQGTFPYVTSSVTSRGNASHGAGIHPGHIEEVIGITKAYITRVGNGAMPTELL

SEQ ID NO: 196709 - protein, 258 aa, Unknown
  Bacterial polypetide isolated from the Sargasso Sea
RKGLGKKIFEKNQLKKDLLKIAPLILKFSQPVWKKLDEFKSKGKKILFEGAQGILLDVDHGTYPFVTSSNTVASSAATGTGCGVNTINYVLGITKAYTTRVGEGPFPTELKDGFGEILGSRGKEFGTVTSRKRRCGWFDGVLVRQTIKISGINGIALTKLDVLDELEEIKICIGYELKGKKIDYLPAAVEDQLQVKPIYKIFNGWKTSTKGIKSFKDLPKNAQEYVRGLEKFIETKVATISTSPERKDTILIENPFTI

SEQ ID NO: 196710 - protein, 179 aa, Unknown
  Bacterial polypetide isolated from the Sargasso Sea
MRGHFLVSHNVVILGTQWGDEGKGKIVDLLTEQADAVVRFQGGHNAGHTLVIGGEKTVLHLIPSGVLRGGVQCLIGNGVVLSPEALLKEIDTLESSGVPVQDRLKISAACPLILPYHVALDQAREARRGENKIGTTGRGIGPCYEDKAARRALRLGDFRDSARFAASLEEVLDYHNHVL

SEQ ID NO: 196711 - protein, 184 aa, Unknown
  Bacterial polypetide isolated from the Sargasso Sea
IFSGTGFSNRNNHKILGITKAYTTRVGAGPFPTELHDSIGDYLGEKGHEFGTVTKRKRRCGWFDSVLLKQSIKLNGITDVVLTKLDVLDELKEINICIRYDIEGEQYDFLPSEEFLYDKIKPIYKTINGWQTSTAGINNIRDLPNNAIRYINLLEELIEARISIVSTGPDRKETIDINGILTNI

SEQ ID NO: 196712 - protein, 217 aa, Unknown
  Bacterial polypetide isolated from the Sargasso Sea
GQQLLFEGAQGTLLDVDFGTYPYVTSSSTTSGMASIGTGVPFHAINFVLGIVKAYTTRVGEGPFPTELYDKDGMHLASVGHEKGTVTGRKRRCGWFDAVLVKQSCIVNGVKGIALTKLDVLCGLKQIKICVGYNLDGKKLEYFPSQQARQEKIKPIYEVLDGWEESIVGVKRLLDLPQNAIRYIKRIEELINCKVAILSFSPEREDTIMVQNPFEVR

SEQ ID NO: 196713 - protein, 212 aa, Unknown
  Bacterial polypetide isolated from the Sargasso Sea
ILFEGAQGFLLDIDYGSYPFVTSSNTHSSYAAIGSGLNPNRINHVMGITKAYTTRVGSGPFPTEEDNDIGQKLGEIGHEFGTVTNRRRRCGWFDAVLVSQAVQQSGINGIALTKLDVLDTFEVLKVCVGYEIKGKKIDYFPSSEFDQANLKPIYEEIEGWNSKTAGSQNIKELPEKAVNYINRLSNLIGAKIDLVSTSPKREDTILLNDVFS

SEQ ID NO: 196714 - protein, 210 aa, Unknown
  Bacterial polypetide isolated from the Sargasso Sea
MNSTLILGLQWGDEGKGKIVDALCKEGSLVCRFQGGHNAGHTIKVDGSQKVLHLIPSGIMHSSSSCIIGNGVVISLPALNEEIEMLSNSGISVKNRLYISNDCPLILPTHIAIDQVRDKHEGIGTTGRGIGPAYEDKVGRRSLKFGDLADLELHRSKISELVKYHNQLLTKIYDSTPIDTNLVMEELTSFRKLQTNFGCDTYKILHKSIE

SEQ ID NO: 196715 - protein, 260 aa, Unknown
  Bacterial polypetide isolated from the Sargasso Sea
IMPYHIKLDQAEENYRGSKAVGTTGRGIGPAYSDKVSRNGIRIGDLRDVDSLQKKISKNLKFKNKILREIYETEEISEKEIFEKIDNWHNKLSKYIANTEQIIHRNIEEKKSILLEGAQGALLDIDHGTYPYVTSSNSISGGSLTGLGIGAKEIDKVMGVFKAFTTRVGEGPFPTEIFGENAEKIREIAGEFGATTGRPRRIGWFDAVAAKYSTKINGLDSIVITKLDILDHFEKIRVCTAYEYKGEKLDFFPTDPEILS

SEQ ID NO: 196716 - protein, 136 aa, Unknown
  Bacterial polypetide isolated from the Sargasso Sea
MKNVVVVGSQWGDEGKGKIVDWLSSEADVVIRFQGGHNAGHTLVIKGITYKLRLLPSGIVRKDKISVIGNGVVIDPWALLEEIEEIKSKGVNINEKNLIISESATLILPFHKEMDEIREDAAGNSKIGTTRRGIGP

SEQ ID NO: 196717 - protein, 279 aa, Unknown
  Bacterial polypetide isolated from the Sargasso Sea
MRSEKNLDLRLESVLIHHNAIRKGLGKKIFEKEELKSKLLEIAPKILQYAQPVWLKIDEFKKQKKRILFEGAQGILLDVDHGTYPYVTSSNTVASNAATGSGCGPNSINYVLGITKAYTTRVGEGPFPTELKDNIGELLGTRGKEFGTVTSRKRRCGWFDGVLVRQTIKISGIDGIALTKLDVLDELDEIKMCVQYEIDGKKIDYLPAALEDQLKIKPIYKTFSGWKKSTNGIKNIKELPDNAQKYVFAIEDFIGAKISSISTSPERKDTILVENPFEI

SEQ ID NO: 196718 - protein, 319 aa, Unknown
  Bacterial polypetide isolated from the Sargasso Sea
TLVIDGITYKLLLLPSGIVRKKKISVIGNGVVIDPWALIEEIDEIKSKGVNVDENNLIISETATLILPFHREMDEIREDVAGNSKIGTTRRGIGPAYEDKVGRRSIRVIDLASKENLDKRLDGVLFHHNAIRKGLGKNNFEKENLKKELLEIAPKILKFSQPVWKKIEEFKKENKKILFEGAQGILLDVDHGTYPFVTSSNTVASSAATGSGCGPNSINYVLGITKAYTTRVGEGPFPTELKNDIGEILANKGKEFGTVTSRKRRCGWFDGVLVRQTIKISGINGIALTKLDVLDELEEIKMCIGYEMKGKKFIFYLRE

SEQ ID NO: 196719 - protein, 248 aa, Unknown
  Bacterial polypetide isolated from the Sargasso Sea
KIYKLRLLPSGIVRKGKISIIGNGVVIDPWALLEEIKDIKKQGVEVNEENLIISDCANLILPFHKEMDEIREDYAGKGKIGTTRRGIGPAYEDKVGRRSIRLMDLNSEINLDRRLDNILFHHNAIRKGLNKKIYKKDDLKKELLKIAPEILKFSHPVWLKIDEMKKNRKKILFEGAQGILLDVDHGTYPFVTSSNTVASMAATGTGCGLNTINYVLGITKAYTTRVGSGPFPTELSNKIGNLLGEKGK

SEQ ID NO: 196720 - protein, 163 aa, Unknown
  Bacterial polypetide isolated from the Sargasso Sea
MKNVVVVGSQWGDEGKGKIVDWLSSEADVVIRFQGGNNAGHTLVIDGTTYKLKLLPSGIVRKNKISVIGNGVVVDPWALIEEINEIKSKGVEIDEKNLILSESATLILPLHKELDEIRENSAGNSKIGTTRRGIGPAYEDKIGRRSVRVMDLASENNLDKRLE

SEQ ID NO: 196721 - protein, 291 aa, Unknown
  Bacterial polypetide isolated from the Sargasso Sea
KSGKNKIGTTGRGIGPAYEDKISRRGIKLGDLFDATKAKEKIDAICEYHNFLLKNYFGVSELNPSDVLDGLLNLFERYKKNVCNTTDYIQELIDSDKKIIFEGAQGSMLDIDHGTYPFVTSSSTTVGGILTGTGVSHKNLDYVLGIVKAYTTRVGEGPFPTELFDETGETLSSRGHEFGATTGRARRCGWLDLYTLKKIAKTNGFDGICITKLDVLDTLEEIQVFFGEKEGYKKFAGWKCKTNGIEEFKKLPLEAQTYINSIEEYLEIPIEIISTGPGRNENIFHQRKLDI

SEQ ID NO: 196722 - protein, 181 aa, Unknown
  Bacterial polypetide isolated from the Sargasso Sea
MKNVVVVGSQWGDEGKGKIVDWLSSQADVVVRFQGGHNAGHTLVIEKKIFKLRLLPSGIVREGKISILGNGVVIDPWALLEEIKEIKKQGINVTSENFMISESASLILPFHQEMDEIREDAAGKEKIGTTRRGIGPCYEDKVGRRSIRVMDLRSKSNLDNRLENVLLHHNAIRKGLKKKIF

SEQ ID NO: 196723 - protein, 216 aa, Unknown
  Bacterial polypetide isolated from the Sargasso Sea
MKNIVVVGSQWGDEGKGKIVDWLSSEADVVIRFQGGHNAGHTLVIDGVTYKLRLLPSGIVRKNKISIIGNGVVIDPWALLDEIEEIKNKGVEVTAKNLIISETATLILPFHKEMDEIREDSAGKGKIGTTRRGIGPAYEDKVGRRSIRVMDLISEKNLDERLVTVLSHHNAIRKGLGRLIFEKDKLKKELLKIAPIILKYSQPVWKKIDQFKNEGK

SEQ ID NO: 196724 - protein, 284 aa, Unknown
  Bacterial polypetide isolated from the Sargasso Sea
DEKNLILSESANLILPFHKEMDEIREDSAGKSKIGTTRRGIGPAYEDKMGRRAIRVMDLVSERNLDHRLETVLIHHNAIRKGLGKKIFKKDQLKKDLLKIAPEILKFSQPVWKKIDEYKLKNKKILFEGAQGILLDVDHGTYPFVTSSNTVASSASTGTGCGPNTINYVLGITKAYTTRVGEGPFPTELKNQTGELLGSKGKEFGTVTSRKRRCGWFDGVLVKQSIKISGITGVALTKLDVLDELNEIKMCIKYEINGKEIDHLPAAVDDQAKVKPIYKTFPGL

SEQ ID NO: 196725 - protein, 262 aa, Unknown
  Bacterial polypetide isolated from the Sargasso Sea
KGKIVDWLSEEADIVIRFQGGHNAGHTLVIDGTTYKLRLLPSGIVRDGKISIIGNGVVVDPWALLEEIEEIKLKGINVSEENFIISESANLILPFHKEMDEIREDAAGKSKIGTTRRGIGPAYEDKVGRRSIRVMDLRSESNLDHRLENVLLHHNAIRKGLGKKIFRKDQLKKELLEIAPKILKFSQPVWLKIDEYKKKGKKILFEGAQGVLLDVDHGTYPFVTSSNTVASSAATGTGCGPNSINYVLGITKAYTTRVGEGP

SEQ ID NO: 196726 - protein, 186 aa, Unknown
  Bacterial polypetide isolated from the Sargasso Sea
ASSAATGSGCGPNLINYVLGITKAYTTRVGEGPFPTELEDKIGELLGTRGKEFGTVTSRKRRCGWFDGVLVRQTIKISGIDGIALTKLDVLDELDKINICIEYDLNGKKIDYLPAAVEDQLRIKPVYQTFDGWKTSTKGIRNINDLPENAKKYIFAIEEFIGAKISSISTSPERDDTILVENPFEI

SEQ ID NO: 196727 - protein, 249 aa, Unknown
  Bacterial polypetide isolated from the Sargasso Sea
MNKTYEELVNISNKIINFSAPVWKIINDAGKQNKFILFEGAQGSLLDVDFGTYPYVTSSNTSSGQIFSGTGFGIKENHNVLGITKAYTTRVGSGPFVTELDNEIGDHFVEKGQEFGTVTKRKRRCGWFDAVLVGQSIAINGITDVVLTKLDVLDELEEIQVCVGYEIMDKKYNYLPFDENIHNALVPIYETIPGWQESTFGLTTWDDLPKQAQNYISILESKIQKNISIISTGPDRAHTIDRNNLLGNN

SEQ ID NO: 196728 - protein, 165 aa, Unknown
  Bacterial polypetide isolated from the Sargasso Sea
MKNIVVVGSQWGDEGKGKIVDWLSSEADVVVRFQGGHNAGHTLVIDKKVFKLRLLPSGVVRKGKISILGNGVVIDPWALLDEIQEIKKQGINVSPENFMISESASLILPFHKEMDEIREDAAGKGKIGTTRRGIGPCYEDKVGRRSIRVMDLRSETNLDSRLENV

SEQ ID NO: 196729 - protein, 253 aa, Unknown
  Bacterial polypetide isolated from the Sargasso Sea
MNKAIIGLQWGDEGKGKIVDFLSEDFDLVVRYQGGNNAGHTVMVDNITYKLNLIPSGVIRGKKCFLGQGVVLDPNHFSKEYDQIKQKVNNPQIFLSSNISLILDYHKKLDIINESILNSKKKIGTTSKGIGPAYQDKVGRKSIKLYDLKSRNIIEEKLYSIKKFYDPILESFSEDKINVEKTAQVLMNFYDLVKELIVDNSLIKKEFKNKKILFEGAQGALLDLDHGSYPYVTSSNTVSSNIAIGSALQVDTK

SEQ ID NO: 196730 - protein, 129 aa, Unknown
  Bacterial polypetide isolated from the Sargasso Sea
RRRRTGWLDIVAIRRAVQINSLSGFCLTKLDVLDGLKEVKLCVAYRLPDGREVTTTPLAADNWEGIEPIYETMPGWSETTFGVKTRSGLPQAALNYIARIEELTGVPVDIISTGPDRSETMILRDPFDA

SEQ ID NO: 196731 - protein, 180 aa, Unknown
  Bacterial polypetide isolated from the Sargasso Sea
MANVVVIGAQWGDEGKGKITDLLSRSADVVVRYQGGVNAGHTIVVDDKVLKLHLIPSGILYKNTSCLIGSGTVVDPKILLKEIDMLIDNGIDISGLQISSTSHVTMPYHRILDEAMEADRGSNKIGTTGRGIGPTYADKSQRNGIRIRDLLNKERLSDVIDIPLREKNGLLEKIYGIKPT

SEQ ID NO: 196732 - protein, 139 aa, Unknown
  Bacterial polypetide isolated from the Sargasso Sea
MSLDLLLGLQWGDEGKGKIVDAITSNYDIIARFQGGPNAGHTIEFDGNKHVLHTIPSGIFNKDSINIIGNGVVIDPGIFLKEIEGLNKYKIDLRKSLFISKRAHIILPTHKIIDATSEASKGKKKIGLTLKGIGPTYMD

SEQ ID NO: 196733 - protein, 84 aa, Unknown
  Bacterial polypetide isolated from the Sargasso Sea
MSNNTLILGLQWGDEGKGKIVDALSENVYAVCRFQGGHNAGHTIKVDGVQTVLHLIPSGVLHKNVKCLIGNGVVLSLEAIKKEM

SEQ ID NO: 196734 - protein, 232 aa, Unknown
  Bacterial polypetide isolated from the Sargasso Sea
LNETVFKKRLKKSFDFNKGLVEKVFEQPFNYSYEEILEEYLGYAETIRPYVKNVTEELTNAVKENRTILFEGAQGACLDIDHGLYPYTTSSNTVGGHIEAGAGVGINKEKHVVGIAKAYLTYVGRGPFPTEIQSSLGEKIREIGQEYGTTTGRPRRVGWIDLVQLKHANQINAFSELILTKVDVLSGFSEIKVCVGYKIDGETINYVPSDLESFTKIEPIYESLKGWASLPT

SEQ ID NO: 196735 - protein, 280 aa, Unknown
  Bacterial polypetide isolated from the Sargasso Sea
RRGIGPAYEDKVGRRSIRVMDLRSEKNLDQRLETVLMHHNAIRKGLGKKIFEKKQLKEDLLKIAPEILKFSEPVWLKIDKFKKQKKKILFEGAQGILLDVDHGTYPFVTSSNTVASSAATGTGCGINSINYVLGITKAYTTRVGEGPFPTELSNEIGELLGTRGKEFGTVTSRKRRCGWFDGVLVRQTIKVSGIDGIALTKLDVLDELEEIKMCVEYDLDGKKIDYLPAAVEDQLKIKPIYKKFEGWKTSTKGIRNIDDLPDNAKKYVFAVEEFIGAKNI

SEQ ID NO: 196736 - protein, 283 aa, Unknown
  Bacterial polypetide isolated from the Sargasso Sea
MHRVYADKMFRNGIRMIDLLEPDVFREKLEKGYNFAKGLIEKSLGKLLEMNQEDIFSAYIEHGKQLEEYICDTSVELYKAHQSGKSILFEGAQGISLDVDHGIYPFTTSSNTAAGHISTGTGVSFRDISRIIGVVKAYVSRVGESPLPSEIQGEDAEILREKGSEYGTTTGRPRRVGWLDLVQVRQAVRVNGLTEIALTKLDVLNGFEKLLVCIAYDVDGTQVTEMPASLTAYRKAKPIYKTLNGWGTLTGNIWEKGYHALPQTLQNYIDFIEHEVECPVKIV

SEQ ID NO: 196737 - protein, 177 aa, Unknown
  Bacterial polypetide isolated from the Sargasso Sea
CGPQNINYVLGITKAYTTRVGEGPFPTELTDKIGEELGIRGKEFGTVTSRKRRCGWFDGVLVRQTIKISGINGIALTKLDVLDTLEEIKMCVGYEIDGKKIDYLPASLEEQIKVKPIYKVFNGWLQSTKGIKNLEELPQNARNYIKELENFIDAKISSISTSPERNDTILIEDPFKA

SEQ ID NO: 196738 - protein, 282 aa, Unknown
  Bacterial polypetide isolated from the Sargasso Sea
MFYTVIGTQWGDEGKGKIVDWLSSKVDIVVRFQGGNNAGHTIKVGKKVFKLNLLPSGIIQNKKCIIGNGVILDPWALLEEIKNLKSKGIKINTKNLFVAENICLILPIHKLIDQLNEKKLGKKNIGTTKKGIGPAYEDKVGRRAVRLCDLKYKKIFNNKILEIIKYHQPKFVNLNKKVNAKKIIKDLSDISKEISKFSFPVWKMINQAGKNNKKILFEGAQGTLLDVDFGTYPYVTSSNTSSGQIFSGTGFSIKEKHKLLGITKAYTTRVGSGPFPTELNNE

SEQ ID NO: 196739 - protein, 125 aa, Unknown
  Bacterial polypetide isolated from the Sargasso Sea
MNSTLVLGLQWGDEGKGKIVDALCNEGSLVCRFQGGHNAGHTIKVDGSQKVLHLIPSGIMHSSSSCIIGNGVVISLPALNEEIEMLSNSGISVKNRLYISNDCPLILPTHIAIDQVRDKHEGMAR

SEQ ID NO: 196740 - protein, 218 aa, Unknown
  Bacterial polypetide isolated from the Sargasso Sea
MRNIVIVGSQWGDEGKGKIVDWLSDLADIIIRFQGGHNAGHTLVIDGVTFKLRLLPSGIVRKNKISIIGNGVVVNPWALLEEIKEIRLKGVNIDSSNLIISESATLILPFHSELDEIRENIAGKNKIGTTRRGIGPAYEDKAGRRSIRIMDLKYEKNLDKKLEVILQHHNAIRKGLGKKIYKKDKLKKELIKIAPEILKFAQPVWLKIEEFKKKGKKI

SEQ ID NO: 196741 - protein, 240 aa, Unknown
  Bacterial polypetide isolated from the Sargasso Sea
LLNHHNAIMRGFGLDEYNLEEVVSEIYELGEYAKPFAKTINDITNVINSGKEKILFEGAQGFLLDIDHGTYPFVTSSNVHASYASIGSGLNPKVINHILAITKAYTTRVGNGPFPTEQDNEIGNKLGEIGHEFGTVTNRKRRCGWFDSVLVRQALIQSGATGIALTKIDVLDHFDEIKMCVGYNLNGKEIDYYPSSEQDQETIEPIYETFQGWMSTTTGINSFDELPENAKKYVNRISEL

SEQ ID NO: 196742 - protein, 205 aa, Unknown
  Bacterial polypetide isolated from the Sargasso Sea
LAEGAQGTLLDIDFGTYPFVTSSNTISAGACNGLGIAPNKIKNIIGVFKAYCTRVGNGPFSTELQNDTGEKIAQKGNEFGSTTGRARRCGWIDLPALKYAIDINGVTELSMMKSDVLSGFDKIKVCTGYTYMGQQIEHLPYNLNEHNTQPIYIELKGWHDDISNIKSTEELPKEFKEYILFLETKLNIPISIISVGPDRSQTIFR

SEQ ID NO: 196743 - protein, 309 aa, Unknown
  Bacterial polypetide isolated from the Sargasso Sea
ESATLILPFHRELDEIREDAAGNSKIGTTRRGIGPAYEDKVGRRSIRVMDLASKKNLENRLTVVLEHHNAIRKGLGKPIYQKDQLIDDLIKLAPNVLKYSAPVWRKIEQFKSEKKKILFEGAQGILLDVDHGTYPYVTSSNTVAASAATGSGCGPNSINFVLGITKAYTTRVGEGPFPTELKDDIGNYLGEKGHEFGTVTSRKRRCGWFDGVLVRQTIKISGIDGIALTKLDVLDELDEINLCVAYELNGKKIDYFPSAVEDQLNAKPVYKKFDGWKSKTKGIKKFDDLPEKAKIYVKAIEQFIETKIS

SEQ ID NO: 196744 - protein, 293 aa, Unknown
  Bacterial polypetide isolated from the Sargasso Sea
EEIKETKSKGIKINENNLILSDSATLILPFHKELDEIREDTAGKDKIGTTRRGIGPAYEDKIGRRSIRVMDLNSEKNLSEKLENILIHHNAIRKGLGKSPFKKNILMKDLLKIAPEILKFSQPVWKRIDEFKSKRKKILFEGAQGILLDVDHGTYPFVTSSNTVASAAATGSGCGPDTIDYVLGITKAYTTRVGKGPFPTELKDKTGELLGIRGKEFGTVTSRKRRCGWFDGILVRQTIKIAGIKGIALTKLDVLDELDEIKICINYELNGKTIDYLPASSKDQEDIKPIYKT

SEQ ID NO: 196745 - protein, 281 aa, Unknown
  Bacterial polypetide isolated from the Sargasso Sea
GSNIIGTTKKGIGPAYEDKVGRRAIRLCDLNDHKNLKNKIKNLYYFHEPRLKKFNKKVDFEKAFDDLVKISGEIINFSAPVWKVINDAGKQNKFILFEGAQGSLLDIDFGTYPYVTSSNTASGQIFSGTGFGIKESHNVLGITKAYTTRVGSGPFITELDDEIGNHFVEKGQEFGTVTKRRRRCGWFDSVLVKQSIAINGITDVVLTKLDVLDDIEEIKVCVGYEAEKKKYNYLPFDENLHDKLLPIYETIPGWCTSTFGLTEWNQLPTNAQDYIYFLESK

SEQ ID NO: 196746 - protein, 261 aa, Unknown
  Bacterial polypetide isolated from the Sargasso Sea
WLRAAGQELAVAGKMMADLLAIRDELLSYAGQSWRCLADARAANKRVLFEGAQGVMLDIDHGTYPFVTSSNTVAGQAATGAGTGPTDIGFVLGITKAYTTRVGSGPFPTEDFGDDGDRMGRRGREFGTVTGRKRRCGWFDAVMVRQAGHVAGITGMALTKLDVLDGLKTLKICVGYQIDGSDTVLDYFPSEAGAQAACKPVYEKMPGWSDSTCGARSWVELPANAVKYIRRIEELTKLSVSLLSTSPERDDTILIKDPFEG

SEQ ID NO: 196747 - protein, 175 aa, Unknown
  Bacterial polypetide isolated from the Sargasso Sea
KENHNVLGITKAYTTRVGSGPFVSELDDEIGDHFVEKGQEFGTVTKRRRRCGWFDSVLVKQSIAINGITDVVLTKLDVLDELDEIKVCVGYESEKKKYDYLPFDENLHDKLLPIYETIPGWRKSTFGLTGWNELPSKAQDYIIFLESKIEKNISIISTGPDRVHTIDRNNLLNNS

SEQ ID NO: 196748 - protein, 276 aa, Unknown
  Bacterial polypetide isolated from the Sargasso Sea
MNNVVVVGSQWGDEGKGKIVDWLSSEADVVVRFQGGHNAGHTLVIDGVTYKLRLLPSGIVRKNKISIIGNGVVVDPWALLDEIEEAKSKGVEINENNLILSEAATLILPFHREMDEIREDSAGKSKIGTTRRGIGPAYEDKVGRRSIRVMDLASKKNLENRLAVVLEHHNAIRKGLGKPIYEKDKLVEDLLKIAPNILKYSAPVWKKIDQFKSENKKILFEGAQGILLDVDHGTYPYVTSSNTVAASAATGSGCGPNSINYVLGITKAYTTRVGEG

SEQ ID NO: 196749 - protein, 248 aa, Unknown
  Bacterial polypetide isolated from the Sargasso Sea
KSGLFSDLNEIAPMILKYSAPVWKVLNEKRKAGSRILFEGAQGALLDIDFGTYPFVTSSNVIAGQAATGSGLGPNGIDFVLGIVKAYTTRVGEGPFPTELNDNDGTRLGERGHEFGTTTGRKRRCGWFDSVLVRQTCATSGVTGISLTKLDVLDGFKKLKICIGYELDGENLDYLPTAADQQARCTPIYEEISGWAESTEGARSWADLPANAIKYVRRIEELIDCPVALVSTSPERDDTILVTDPFED

SEQ ID NO: 196750 - protein, 277 aa, Unknown
  Bacterial polypetide isolated from the Sargasso Sea
SENNLDKRLDEVLSHHNAIRKGLGKTEFKKEQLKKNLLSIAPKILKFSQPVWKKIDEYKSQNKKILFEGAQGVLLDVDHGTYPFVTSSNTVASSAATGSGCGINSINYVLGITKAYTTRVGEGPFPTELTDEIGDLLGTRGKEFGTVTSRKRRCGWFDGVLVRQTLKISGIDGIALTKLDVLDQLDEIKMCIAYEINGKKYDYLPASVDDQFMAKPIYKSFKGWKSSTVGLKKFEELPDNAKNYIKELEKFVDTRISSISTSPERNDTILIQDPFNV

SEQ ID NO: 196751 - protein, 261 aa, Unknown
  Bacterial polypetide isolated from the Sargasso Sea
MKKSLILVGTQWGDEGKGKIVDFYSKKFDAVCRFQGGHNAGHTIYKEEEKFVLHLIPSGIFYDHVSCFIGQGVILSIDSLLEEIEQLEQKGINLEGKLRISRYCSLLLPLHAKIDQLREDNKNSIGTTRRGIGPAYEDKTARRSIKAFDLEDNDLLETKLRSLVEYYNYQIQNIHDSEPFAFEDVYNELMQSYKKASKYFGDVTDTLENIYEQGGNILYEGAQGTLLDVDYGTYPYVTSSNTLATSVGIGSGFPKVFIPMF

SEQ ID NO: 196752 - protein, 180 aa, Unknown
  Bacterial polypetide isolated from the Sargasso Sea
MSKNVVVLGIQWGDEGKGKIVDLLTDRCKAVVRFQGGHNAGHTLVIDGEKTVLHLVPSGILRPQVQCMIGNGVVVAPDALIKELEALEQAGESPRSRLTISPGCPVILPSHVALDQARERARGSKAIGTTGRGIGPAYEDKVARRGVRIGELTELDLCKESTRELLDYHNFLLEHRFGEA

SEQ ID NO: 196753 - protein, 170 aa, Unknown
  Bacterial polypetide isolated from the Sargasso Sea
MGKNIIVLGTQWGDEGKGKIVDLLTESVSAVVRYQGGHNAGHTVVIDKDKTVLHLIPSGILHDDVECLIGNGVVLSPHALVEELNILKKAGISAHSRVKISPACTLILPYHIALDQAREKHKGKDAIGTTGRGIGPAYEDKIARRAIRVDDLTDENRFARMLQEILDYYN

SEQ ID NO: 196754 - protein, 179 aa, Unknown
  Bacterial polypetide isolated from the Sargasso Sea
RLSNTVTSSAATGSGCGPNSINYVLGITKAYTTRVGEGPFPTELKNEIGEILGSKGKEFGTVTSRKRRCGWFDGVLVRQTIKISGIDGIALTKLDVLDDLEEIKICIAYELDGKQIYYLPAAFDKQIKIKPIYKKFKGWKSSTSGIKNFKDLPKNAKIYIKDLEKFIETKISSISTSPE

SEQ ID NO: 196755 - protein, 148 aa, Unknown
  Bacterial polypetide isolated from the Sargasso Sea
MTALVVVGTQWGDEGKGKIVDLLTEQADAVVRYQGGNNAGHTVMFGDETHILHLIPSGILRDTMSILGNGVVIDLPELLKEIEELRENGVEVQGKLHVSARSHLVMPWHRLIDQLREKDKGEKKIGTTGRGIGPAYEDKVGRRGIRMG

SEQ ID NO: 196756 - protein, 263 aa, Unknown
  Bacterial polypetide isolated from the Sargasso Sea
NLILPFHREMDEIREDAAGKSKIGTTRRGIGPAYEDKVGRRSIRIMDLRSEKNLDQRLDSVLVHHNAIRKGLGKKIFEKDQLKSDLLKIAPKILEFSQPVWLKIDQFKKQKKRILFEGAQGILLDVDHGTYPFVTSSNTVASSAATGSGCGPNSINYVLGITKAYTTRVGEGPFPTELKDDVGELLGTRGKEFGTVTSRKRRCGWFDGVLVRQTIKVSGIDGIALTKLDVLDELDEIKMCVAYELDGKRLDYLPAAVEDQIKI

SEQ ID NO: 196757 - protein, 162 aa, Unknown
  Bacterial polypetide isolated from the Sargasso Sea
MTSVVIVGTQWGDEGKGKIVDSLSDKADVIVRFQGGHNAGHTLVIDGQTIKLSLLPSGIVRENKLTIIGNGVVLDPQALSSEIEYLSKIGIKVTPKNLKIAENTTIILPLHKDLDLAREERAGKAKIGTTGRGIGPAYEDKVARRSIKLNDLSNLENIKDKI

SEQ ID NO: 196758 - protein, 211 aa, Unknown
  Bacterial polypetide isolated from the Sargasso Sea
FEGAQGILLDVDHGTYPFVTSSNTVASMAATGTGCGPNSINYVLGITKAYTTRVGAGPFPTELKDNIGEKLGLKGNEFGTVTSRKRRCGWFDAVLVRQTIKISGIDGIALTKLDVLDDFEEIKICVAYELNGKRINYLPSSSEEQSKVVPVYETFKGWQSSTSGIKKFELLPDNAKTYINKLEKLIQTKISSISTSPERNDTIFIKDPFSS

SEQ ID NO: 196759 - protein, 248 aa, Unknown
  Bacterial polypetide isolated from the Sargasso Sea
LKVKQRFLEASQPTGSDAIELDSNTIFDQYQEYAERLRDYVGETTNFLLDSVETGKPVLFEGAQGALLDIDHGTFPFVTSSNSSGVGVSSGSGVPGRWITRTIGVLKAYSTRVGGGPLPTEQDNNIGKHLQERGREFGTVTQRPRRCGWFDAVATRYSARLSGADELAVMLLDVLSELDELRICTGYRINGKVVNEFPGQIDDLKAAEPIYETLPGWNNDLTTVRNEADLPLNAIQYKNRIGELLGRP

SEQ ID NO: 196760 - protein, 273 aa, Unknown
  Bacterial polypetide isolated from the Sargasso Sea
DWLSSEADVVVRFQGGHNAGHTLVIDKKVFKLRLLPSGIVRKGKISILGNGVVIDPWALLNEIEEIKKQGVIVSPENFMISESASLILPFHKEMDEIREDAAGKGKIGTTRRGIGPCYEDKVGRRSIRAMDLRSESNLDKRLENVLLHHNAIRKGLNKKIYEKDKLKNDLLKIAPEILKFTQPVWLKLNEFNNNRKKILFEGAQGILLDVDHGTYPYVTSSNTVPATAATGSGSGPDKINYVLGITKAYTTRVGSGPFPTELNDEIGESLGRR

SEQ ID NO: 196761 - protein, 219 aa, Unknown
  Bacterial polypetide isolated from the Sargasso Sea
MHKANQSGKSILFEGAQGISLDVDHGIYPYTTSSNTTAGHISTGTGVNFRNVDRVIGVVKAYLSKVGDGYLPSEIHDDSAKLIREKGNEYGTTTGRPRRIGWIDLVQLRQAVRVNGLTDIVLTKLDILNGLKEIKACIGYEVEEKIIKEMPASLKTFRKAKPIYKTLSCWDSLPEKVWKKGFKSLPDSLKNYISFIEGEINCDISIVSVGPQRHETIIR

SEQ ID NO: 196762 - protein, 287 aa, Unknown
  Bacterial polypetide isolated from the Sargasso Sea
VVGAQWGDEGKGKIVDWLSERADVVVRFQGGHNAGHTLVIDEKIYKLHALPSGVVRGGKLSIIGNGVVLDPWHLLSEIETLTDQGVTIDADTLKIAENTPLILPVHGELDRAREAQSGIAKIGTTGRGIGPAYEDKVGRRAVRVSDLADETTLSNRIDRLLQHHNTLRNGMGLEPIEKGNLFKKLLDVAPHILKFAAPVWKILNDKRKSGQRILFEGAQGALLDVDFGTYPFVTSSNVIAGQAATGSGLGPGGIDFVLGIVKAYTTRVGEGPFPTELNDDCGNMLGE

SEQ ID NO: 196763 - protein, 284 aa, Unknown
  Bacterial polypetide isolated from the Sargasso Sea
IRVMDLASQFNLEKRLDSVLIHHNAIRKGLGKNEFKKNQLKKDLLKIAPQILKFSQPVWKKIEEFKSQNKKILFEGAQGVLLDVDHGTYPFVTSSNTVASSAATGTGCGVNSINYVLGITKAYTTRVGEGPFPTELTDEIGKIIGTRGKEFGTVTSRKRRCGWFDGVLVRQTLKISGIDGIALTKLDVLDELDEIKMCIAYEINGKKFDYLPASVDDQLKAIPVYKSFKGWKSSTVGIKNFDKLPENAKNYIKELENFTETKISSISTSPERNDTILIQDPFDL

SEQ ID NO: 196764 - protein, 203 aa, Unknown
  Bacterial polypetide isolated from the Sargasso Sea
VLLDVDHGTYPFVTSSNTVASSAATGTGCGPNTINYVLGITKAYTTRVGEGPFPTELKDKIGELLGTRGKEFGTVTSRKRRCGWFDGVLVRQTIKISGINAIALTKLDVLDELDEIKMCVAYELDGKKIDYLPAAVDDQLKVKPIYKVFKGWKSSTHGTKKLDKLPENARIYIKELEKFIEAKISSISTSPERQDTILIENPF

SEQ ID NO: 196765 - protein, 242 aa, Unknown
  Bacterial polypetide isolated from the Sargasso Sea
MKNVVVVGSQWGDEGKGKIVDWLSSEADVIIRFQGGHNAGHTLVIDGVVYKLRLLPSGIVRKNKISIIGNGVVVDPWALLDEIDEIKFKGVEVNPNNLILSEAATLILPFHKEMDEIREDAAGKSKIGTTRRGIGPAYEDKIGRRSIRVMDLASESNLDKRLDAVLSHHNAIRNGLGKTEFKKVQLKKDLLNIAPQILKFSQPVWKKIDDFKSQNKKILFEGAQGVLLDVDHGTYPYVTSSN

SEQ ID NO: 196766 - protein, 219 aa, Unknown
  Bacterial polypetide isolated from the Sargasso Sea
MDERKTSMANVVVVGAQWGDEGKGKIVDWLSERADIIVRFQGGHNAGHTLVIDGKTYKLHALPSGVVRGGKLSVIGNGVVLDPWHLIDEIKVVRDQGVDISSENLIIAENTPLILPIHGELDRAREDINKVAKIGTTGRGIGPAYEDKVGRRAVRVADLADRSTLEARIDRLLLHHNTLRRGMQLGEIDKSKLITDLLEIAPSILQYSAPVWKVLNEKR

SEQ ID NO: 196767 - protein, 183 aa, Unknown
  Bacterial polypetide isolated from the Sargasso Sea
AATGSGCGPNSIHYVLGITKAYTTRVGEGPFPTELTDDIGELLGTRGKEFGTVTSRKRRCGWFDGVLVRQTIKISGIDGIALTKLDVLDELDEIKMCIEYELDGKKTNYLPAAKEDQLKIKPVYKTFPGWKTTTKGIKNIDSLPENAKNYIYALEDFVGAKVSSISTSPEREDTILVENPFDV

SEQ ID NO: 196768 - protein, 295 aa, Unknown
  Bacterial polypetide isolated from the Sargasso Sea
LTVSREMDEIREDSAGKSKIGTTRRGIGPAYEDKVGRRSIRVMDLVSEKNLDHRLETVLMHHNAIRKGLGKEIYKKDKLKKDLLDIAPEVLKYSKPVWKKIDEFKSQGKKILFEGAQGILLDVDHGTYPFVTSSNTVAASAAIGSGCGPNSINYVLGITKAYTTRVGEGPFPTELTNEIGEKLGTKGKEFGTVTSRKRRCGWFDGVLVRQTIKISGIDGIALTKLDVLDQLDEIKMCIAYEVDGKKIDYLPASVDDQFKVKPIYKSFKGWNCSTSGVKKFEDLPDNAKNYIKELE

SEQ ID NO: 196769 - protein, 296 aa, Unknown
  Bacterial polypetide isolated from the Sargasso Sea
LPFHREMDEIREDAAGKAKIGTTRRGIGPAYEDKAGRRSIRVMDLASEKNLDHKLEMALMHHNAIRKGLGKEIYHKDKLKKDLIEIAPKILKYSQPVWKRIDELKFQKKKILFEGAQGILLDVDHGTYPFVTSSNTVAANAATGSGCGPNSINYVLGITKAYTTRVGEGPFPTELRDKIGEELGIRGKEFGTVTSRKRRCGWFDGVLVRQTIKVSGIDGIALTKLDVLDELDEIKMCIAYEIDGKKIDHLPAAVDEQLMVRPVYKSFKGWKSSTGGVKKFEDLPDNAKKYVKELEK

SEQ ID NO: 196770 - protein, 215 aa, Unknown
  Bacterial polypetide isolated from the Sargasso Sea
MFYTIVGTQWGDEGKGKIVDWLSSKAQFIVRFQGGNNAGHTIKVDKNVYKLNLLPSGIIRNKKCIIGNGVILDPWALITEIKNLRNQKINIDENNLFIAENICLILPIHKLIDHINEESKGINSIGTTKKGIGPAYEDKVGRRAIRLCDLNNYKILKSKIRDLYEFHKPRLEKYNKFLDFEKDYEELIKIEKNISIFSAPVWKLINEAGKENKII

SEQ ID NO: 196771 - protein, 250 aa, Unknown
  Bacterial polypetide isolated from the Sargasso Sea
FKKEQLKKNLLNIAPQILKFSQPVWKKIDEFKSQNKKILFEGAQGVLLDVDHGTYPFVTSSNTVASSAATGSGCGINSINYVLGITKAYTTRVGEGPFPTELTDEVGDLLGTRGKEFGTVTSRKRRCGWFDGVLVRQTLKISGIDGIALTKLDVLDQLDEIKMCIAYEINGKKYDYLPASVDDQFMAKPIYKSFKGWKSSTVGIKKFEDLPENAKNYIKELEKFVETRISSISTSPERNDTILIQDPFNL

SEQ ID NO: 196772 - protein, 328 aa, Unknown
  Bacterial polypetide isolated from the Sargasso Sea
VVRYQGGVNAGHTIVVDDKVLKLHLIPSGILYKNTSCLIGSGTVVDPKILLKEIDMLIDNGIDISGLKISSTSHVTMPYHRILDEAMEADRGSNKIGTTGRGIGPTYADKSQRNGIRIRDLLNKERLSDVIEIPLREKNGLLEKIYGIKPLKLEDIVEEYLDYGERLSKHVVDCTRTIHAASKNKKNILFEGAQGTLLDLDHGTYPFVTSSNPISGGACIGAGVGPTLIDRVIGVAKAYTTRVGEGPFPTELQGSINDQLCDRGSEFGTTTGRRRRCGWFDGVIGKYAVSVNGLDCLAVTKLDVLDELDEIQVCIAYDLDGEEIDYFP

SEQ ID NO: 196773 - protein, 307 aa, Unknown
  Bacterial polypetide isolated from the Sargasso Sea
WALLDEIDEIKSKGVKVSPENLIISESANLILPFHREMDEIREDAAGKAKIGTTRRGIGPAYEDKVGRRSIRVMDLISEKNLDHRLETVLLHHNAIRKGLGKNVYQKDKLKKDLLKIAPEILKFSKPVWKKIDEFKSQNKKILFEGAQGILLDVDHGTYPFVTSSNTVASSAATGSGCGPNSINYVLGITKAYTTRVGEGPFPTELKDKIGEKLGNKGKEFGTVTSRKRRCGWFDGVLVRQTIKISGINGIALTKLDVLDDLDHVKMCIAYELNGNKIDYLPAAVDDQLKVKPVYKTFEGGKFLRKV

SEQ ID NO: 196774 - protein, 149 aa, Unknown
  Bacterial polypetide isolated from the Sargasso Sea
MIQFGEHIREKAKEYGTTTGRARRVGWFDAVAARFSAHINGFTSIVLTRLDVLDGFDELKICNKYQFGDKAISDFPTDNATLNRCQPIYETLPGWSDPTASMTGLDNFPINALEYVKTLEKYIGVPIKIISTGPQREETVLVESFVNEI

SEQ ID NO: 196775 - protein, 97 aa, Unknown
  Bacterial polypetide isolated from the Sargasso Sea
MKNVVVVGSQWGDEGKGKIVDWLSSQADIVVRFQGGHNAGHTLVIDGTTYKLRLLPSGIVRKDKISVIGNGVVIDPWALLDEIDEIRLKGIKVDEKN

SEQ ID NO: 196776 - protein, 216 aa, Unknown
  Bacterial polypetide isolated from the Sargasso Sea
LQHLHDKYCTDTQDLIYDWIIKENQSLLFEGAQGTLLDIDHGTYPYVTSSSTTAGGVSTGLGLGPKYINKIIGISKAYCTRVGEGPFLTELFDDNGKMLAKKGNEFGATTGRPRRCGWLDLLALKKAVFTNSVTDICLTKLDVMDEFNSIEACINYKDGEPVYKTFEGWKSSTEGITEFENLPLKAQEYINFIEDFVGCNISIVSTGPSRDQTIHR

SEQ ID NO: 196777 - protein, 169 aa, Unknown
  Bacterial polypetide isolated from the Sargasso Sea
VLGITKAYTTRVGEGPFPTELTDSTGELLGMRGKEFGTVTSRKRRCGWFDGVLVRQTIKVSGINSIALTKLDVLDELNEIKMCVAYELDGKKLDYLPAAVEDQIKIKPIYKTFQGWKVPTSGIKNMDSLPENAKKYIFAIEDFIGAKVSSISTSPERNDTILIENPFEV

SEQ ID NO: 196778 - protein, 174 aa, Unknown
  Bacterial polypetide isolated from the Sargasso Sea
MANVVVIGAQWGDEGKGKITDLLSRSADVVVRYQGGVNAGHTIVVDDKVLKLHLIPSGILYKNTSCLIGSGTVVDPKILLKEIDMLIDNGIDISGLKISSTSHVTMPYHRILDEAMEADRGSNKIGTTGRGIGPTYADKSQRNGIRIRDLLNKERLSDVIEIPLREKNGLLEKI

SEQ ID NO: 196779 - protein, 315 aa, Unknown
  Bacterial polypetide isolated from the Sargasso Sea
SGTVVDPIILLKEIDMLIDNGIDISGLKISSTSHVTMPYHRILDEAMEADRGSNKIGTTGRGIGPTYADKSQRNGIRIRDLLNKERLSDVIEIPLREKNGLLEKIYGIKPLKLEDIVEEYLDYGERLSKHVVDCTRTIHSASKNKKNILFEGAQGTLLDLDHGTYPFVTSSNPISGGACIGAGVGPTLIDRVIGVAKAYTTRVGEGPFPTELQGSINDQLCDRGSEFGTTTGRRRRCGWFDGVIGKYAVSVNGLDCLAVTKLDVLDELDEIQVCIAYDLDGEEIDYFPTNADDLKKCKPIFKKLKGWQCSTADAE

SEQ ID NO: 196780 - protein, 292 aa, Unknown
  Bacterial polypetide isolated from the Sargasso Sea
FHREMDEIREDAAGKSKIGTTRRGIGPAYEDKVGRRSIRVMDLRSEKNLEQRLDSVLVHHNAIRKGLGKKIFEKDQLKSDLLEIAPKILKFSQPVWLKIDQFKKQKKKILFEGAQGILLDVDHGTYPFVTSSNTVASSAATGTGCGPNSINYVLGITKAYTTRVGEGPFPTELTDDIGELLGTRGKEFGTVTSRKRRCGWFDGVLVRQTIKVSGIDGVALTKLDVLDELDEIKMCVAYELDGKRLDYLPAAVEDQIKIKPIYQTFPGWKISTSGVKNIDLLPENAKKYIFAV

SEQ ID NO: 196781 - protein, 277 aa, Unknown
  Bacterial polypetide isolated from the Sargasso Sea
IHQKIDLAREKKRGENKIGTTGRGIGPAYEDKVARRGIRVADLESPDQVLSKLKDQFEYHNIFLRDAGEQIASAEKTFENLMAISHNIRQFAQPVWKKMDELRAQGSKILFEGAQGVMLDVDHGTYPFVTSSNTVAGQAAAGTGTGPTSINYVLGITKAYTTRVGGGPFPTELLDETGQILGERGHEFGVVTGRKRRCGWFDAVMVKQAIKTSGITGIALTKMDVLDGFETLKVCDGYELENSRIDYFPSSSKHQAAVKPLYREIEGWSESTRGARS

SEQ ID NO: 196782 - protein, 170 aa, Unknown
  Bacterial polypetide isolated from the Sargasso Sea
MKNIVVVGSQWGDEGKGKIVDWLSDQADVVIRFQGGHNAGHTLVIDDVTYKLRLLPSGIVRKNKISVIGNGVVVDPWALLDEIKEIKSKGVEVNENNFIISDSATLILPFHREMDEIREDAAGKGKIGTTRRGIGPAYEDKVGRRSIRVMDLRSESNLDHRLENVLLHHN

SEQ ID NO: 196783 - protein, 230 aa, Unknown
  Bacterial polypetide isolated from the Sargasso Sea
LQPVWLKIDQYKKQKKKILFEGAQGILLDVDHGTYPYVTSSNTVASSAATGTGCGPNSINYVLGITKAYTTRVGEGPFPTELINEIGEILGNRGKEFGTVTSRKRRCGWFDGVLVRQTIKVSGIDGIALTKLDVLDELDEIKVCIEYDLNGKKIDYLPAAVEDQLKIKPIYKTFTGWKTSTKGIKNLNDLPENAKKYVFAIEDFVQAKISSISTSPERDDTILIENPFEI

SEQ ID NO: 196784 - protein, 293 aa, Unknown
  Bacterial polypetide isolated from the Sargasso Sea
MANVVVVGSQWGDEGKGKIVDWLSEKADAVVRFQGGHNAGHTLVIDGVTYKLSLLPSGIVRPDKLSFIGNGAAIDPWALISEIETIRQLSIDVSPKNLRISESAVLILPLHRNLDLLREEAAGNSKIGTTGRGIGPAYEDKIARRAIRVGDLADVRTITEKTDKLLFHHNALLKGMGMKLVEQEPLVAELKEIAPKIIPYSTAVWHELDQLQKRGNRILYEGAQGTMLDIDHGTYPFVTSSNTVAAQAAVGSGQGPHSINYVLGICKAYTTRVGSGPFPTEQENSIGQLLGTR

SEQ ID NO: 196785 - protein, 218 aa, Unknown
  Bacterial polypetide isolated from the Sargasso Sea
KEKKKILFEGAQGILLDVDHGTYPFVTSSNTVASSAATGTGCGPNSINYVLGITKAYTTRVGEGPFPTELKCKIGELLGTRGKEFGTVTSRKRRCGWFDAVLVRQSIKISGINGIALTKLDVLDELDEIKMCVGYKLDEQEIDHLPASVEDQLKIKPVYKSFLGWKKSTQGTKSINDLPKNAKNYIFAVEDFIGTKISSISTSPERKDTILIENPFEN

SEQ ID NO: 196786 - protein, 165 aa, Unknown
  Bacterial polypetide isolated from the Sargasso Sea
ITKAYTTRVGQGPFPTELTDEIGNHLGEKGHEFGTVTSRKRRCGWFDGVLVRQTIKISGINGIALTKLDVLDELDEINLCIAYELKGKTIDYFPASVEDQLNVKPVYKTFKGWKSKTQGIKKFENLPKNAKIYVKAIEEFIETKISSISTSPEREDTILLIDPFN

SEQ ID NO: 196787 - protein, 179 aa, Unknown
  Bacterial polypetide isolated from the Sargasso Sea
MPNVTVVGTQWGDEGKGKIVDWLSEKADVIVRFQGGHNAGHTLVVNGITYKLKLLPSGIVRKNKISIIGNGVVIDPWALLDEIKQIEKLGIKITRKNLYVAENATLILPLHRELDGIREDTKNTDKIGTTRRGIGPAYEDKVGRRGIRVIDLVNKKNLSKKINMILSHHNSVRKGLKKK

SEQ ID NO: 196788 - protein, 311 aa, Unknown
  Bacterial polypetide isolated from the Sargasso Sea
GKIGTTRRGIGPAYEDKVGRRSIRVMDLRSEKNLDQRLHSALIHHNAIRKGLGKKIYEKDQLKSDLLSIAPKILEFSQPVWLKIDQFKKQKKKILFEGAQGILLDVDHGTYPFVTSSNTVASSAATGSGCGPNSINYVLGITKAYTTRVGEGPFPTELTDDIGELLGTRGKEFGTVTSRKRRCGWFDGVLVRQTIKVSGIDGIALTKLDVLDELDEIKMCVKYKLDGKDIDYLPATIEDQLRIKPVYKTFPGWKTSINGIKNIELLPENAKKYIYAIEDFIGAKVSSISTSPERDDTILVQNPFNILFSWQ

SEQ ID NO: 196789 - protein, 191 aa, Unknown
  Bacterial polypetide isolated from the Sargasso Sea
MGNNTLILGLQWGDEGKGKIVDALAETAEAVCRFQGGHNAGHTLKVDGVQKVLHLVPSGILHPSVNCVLGNGIVLSLSALAKEIKELQESEINFKDRFYVSEDCSLILPTHIAIDKVRDKSEGIGTTGRGIGPAYEDKIARRAVRFGDLKDPEELEVKLSKLVNYHNQILENLYGAQPIKYEDVLEELTGN

SEQ ID NO: 196790 - protein, 194 aa, Unknown
  Bacterial polypetide isolated from the Sargasso Sea
MPNLAVIGAQWGDEGKGKIIDVLSDKAEVIVRFQGGHNAGHTLVIGSETIKLSLLPSGIMRPGKLAAIGNGVVLNPWALLDEIKMIEKKGIKVSPKNLVIAENVSLILPPHEELDKAREEQLKKAKIGTTGRGIGPAYEDKVGRRSIRLCDIFDEVNLNDRLEIFIAHHDIIRRGLGMASLNMEGLEVKLSKVG

SEQ ID NO: 196791 - protein, 189 aa, Unknown
  Bacterial polypetide isolated from the Sargasso Sea
MYYSVVGTQWGDEGKGKIVDWLSSIADIVVRFQGGNNAGHTIKINEQTYKLNLLPSGIIRGKKCIIGNGVVLDPWALNDEINSLRDKKIKIDEKNLIIAENICLILPIHQLLDEINEGVRGDSSIGTTKKGIGPAYEDKIGRRSIRLCDLFNEKILLNKIKNLISFHNIRLEYYGKKINEDELFQSLIE

SEQ ID NO: 196792 - protein, 227 aa, Unknown
  Bacterial polypetide isolated from the Sargasso Sea
MSNVAVIGSQWGDEGKGKIVDWLSKKADVIVRFQGGHNAGHTLVIDNITYKLKLLPSGIVRKNKISIIGNGVVIDPWALLDEIKSIEKLGIRITNKNLYIAENATLILPIHKELDGIIEDSKNNDKIGTTRRGIGPAYEDKVGRRAIRVMDLANKKILSKRLDTMLFHHNAVRQGLGKKKINKKKLIKDLGKISSKVLKYSKPVWKKINEFRKKRKTILFEGAQGIL

SEQ ID NO: 196793 - protein, 250 aa, Unknown
  Bacterial polypetide isolated from the Sargasso Sea
MNNVVIIGAQWGDEGKGKIVDLLSEKADAVVRFQGGHNAGHTLVIKDNEFKLSLLPSGIIRDTTLSLIGNGVIIDPMHLIKEIAEIENKGIKITSEKLIISENCFLILPIHKFIDQLRENNQSSIKSKIGTTGRGIGPAYEDKVARRGIRIDDLKNKNIFLDKMKKTYDHHNIWVSYSETDLMDFEKDAKQILKAYDVLKPFVKNSWNELNKYVEKKKNILFEGAQGTFLDIDFGTYPYVTSSNTVAGNA

SEQ ID NO: 196794 - protein, 246 aa, Unknown
  Bacterial polypetide isolated from the Sargasso Sea
SDRAHVIMPYHIEMDIALTKHQGKLAAGSTKRGIAPVYGDKMYRHGIRMIDLTEPDVFSEKLDKAYSFNQTMIEAFGHSIEQNKKSIYEQYIKYGEILSPYISDISVDLFNAHKKGASILFEGAQGISLDVDHGVYPHTTSSNTVAGHVAAGTGVSFRDIHRIIGVTKAYLSRVGQSPLPTELSGVEAETLREKGGEYGTTTGRPRRVGWLDLVQVRQAVRTNGLTEIALTKLDILSGFSSLPVCH

SEQ ID NO: 196795 - protein, 275 aa, Unknown
  Bacterial polypetide isolated from the Sargasso Sea
DEIEEVKSKGVEINENNLILSEAATLILPFHREMDEIREDSAGNSKIGTTRRGIGPAYEDKVGRRSIRVMDLASKKNLENRLMVVLEHHNAIRKGLGKTIYQKDKLVEDLLKLAPNILKYSAPVWRKIDQFKSENKKILFEGAQGILLDVDHGTYPYVTSSNTVAASAATGSGCGPKSISFVLGITKAYTTRVGEGPFPTELKDDIGNHLGEKGHEFGTVTSRKRRCGWFDGVLVRQTIKISGIDGIALTKLDVLDELDEINLCVAYELNGKKID

SEQ ID NO: 196796 - protein, 297 aa, Unknown
  Bacterial polypetide isolated from the Sargasso Sea
VDYLSEDFDLVVRYQGGNNAGHTVIVDDKTYKLNLIPSGVIRGKDCYLGQGVVLDPNHFSSEYDQIVKKILNPKVFLSSNISLILEYHKQLDKINESILNSEKKIGTTSKGIGPAYQDKVGRKSIKLYDLKSKNIIEEKIHSIKKFYDPILEKFNESKIDVDQIVKELQIFYELVKDLIIDNSLIKKKFKNKKILFEGAQGALLDLDHGSYPFVTSSNTVSSNIVIGSALQVDYQTIGIFKAYATRVGNGPFPSELFDSVGDYIAEKGVEIGTVTKRKRRCGWLDLVSLKYSCEINR

SEQ ID NO: 196797 - protein, 188 aa, Unknown
  Bacterial polypetide isolated from the Sargasso Sea
MANVVVIGAQWGDEGKGKITDLLSRSADVVVRYQGGVNAGHTIVVDDKVLKLHLIPSGILYKNTSCLIGSGTVVDPKILLKEIDMLIDNGIDISGLKISSTSHVTMPYHRILDEAMEADRGSNKIGTTGRGIGPTYADKSQRNGIRIRDLLHKERLSDVIEIPLREKNGLLEKIYGIKPLKLEDIVEE

SEQ ID NO: 196798 - protein, 216 aa, Unknown
  Bacterial polypetide isolated from the Sargasso Sea
MALNKNILIEGAQGTMLDIDYGTYPYVTSSNCSSGGIGTGLGIPGSKLDDIIGIFKAYTTRVGGGPFPTELFDKDGELLGSIGKEFGATTGRPRRCGWFDLVAARYSARVNGLTGIALTKLDILNSFETIKVCTSYDFKGHQTQNMTEALNNLEDVTPIYKSFNGWKIDIDDITSFDQLPNEAQVYIKYLESEIGVPISIISIGPKRHQIIECNTK

SEQ ID NO: 196799 - protein, 196 aa, Unknown
  Bacterial polypetide isolated from the Sargasso Sea
SICTSSNTISGQIFSGTGFSDRNNHKIFGITKAYTTRVGSGPFPTELHDNIGKYLGEKGQEFGTVTKRKRRCGWFDSVLLKQSIKLNGITDIVLTKLDVLDELKEINVCIGYIIDDKKYDYLPSEEILYDKIKPIYKKIDGWQTNTAGINDWRNLPKNAVKYIKLLEELMETNISIVSTGPDRNETIDINGTLLNI

SEQ ID NO: 196800 - protein, 287 aa, Unknown
  Bacterial polypetide isolated from the Sargasso Sea
CDLFNTEKLIDKIQSALFHHNPIRKGLGIKELEAKTILNEITSYSNFIKPFVKNVWHELLNLQYKNKNILFEGAQGTLLDIDHGTYPFVTSSNTVSAQASIGTGVGSINNCFTLGITKAYLTRVGEGPFPTEQSNEIGEKLGFLGKEFGTVTGRKRRCGWLDLVLLKQSVNVSGLKGLALTKLDVLDSFKKIKVCTSYTYKNKKYDYLPLGVDRFNQVKPNYIELNGWNEKTMGAKKLSDLPKNAKKYITFIEEFVGVPITMLSTSPEREDTILFKDPLWSLNIFTF

SEQ ID NO: 196801 - protein, 246 aa, Unknown
  Bacterial polypetide isolated from the Sargasso Sea
SKIDLNELVDLNLKQAEQLKPYIGNVIDEIRELQKSKKKILYEGAQGALLDVSLGTYPFVTSSNLIGGVPAGAGISPSDIDYTIGITKAYTTRVGEGPFPTELFDEMGTYLAETGGEVGATTGRPRRCGWLDGFLLKNMVKVSGVDGLCLTKIDVLDGLEKIKICNAYSSDLTEAEMIETMDLELAQPEYLEMPGWSKLTAGQTSYEELDDNAKSFVEKIEEISGVPVIMISTGPKREDTIIRKDI

SEQ ID NO: 196802 - protein, 224 aa, Unknown
  Bacterial polypetide isolated from the Sargasso Sea
ENLDNRLETVLMHHNAIRKGLGKKLFYKDELKKNLLKIAPQILKYSQPVWKKINEYKNKGKKILFEGAQGVLLDVDHGTYPFVTSSNTVASSAATGSGCGPNSINYVLGITKAYTTRVGEGPFPTELLDKTGEELGERGKEFGTVTSRKRRCGWFDGVLVRQTIKISGIDGIALTKLDVLDELDEIKICVAYKLNGREIDYLPAAVDDQLKVKPIYKTFRGWKS

SEQ ID NO: 196803 - protein, 242 aa, Unknown
  Bacterial polypetide isolated from the Sargasso Sea
LIKIHNKLLEHFYDAEPFSVEEILNNLLSFKNFAEAFSVNTTDLLMNWSEEGKEVLFEGAQGTFLDIDHGTYPYVTSSSTTIGGVSSGLGIGPKHINNVIGIVKAYATRVGEGPFITELFDEDGEEIAKRGNEFGATTGRPRRCGWLDLVALKKAIFINSVDSLCMTKADVLDTFENIRVCVAYDDNNLPIYKRFEGWQEDTSQCSSYDELPQKLKDYVKFIEETVNCKVSIISVGPSREQS

SEQ ID NO: 196804 - protein, 239 aa, Unknown
  Bacterial polypetide isolated from the Sargasso Sea
TKISLKILKYSKPVWKKLDEFKKKRKIILFEGAQGILLDVDHGTYPFVTSSNTVAGAAYAGTGCSLNTINYVLGIVKAYTTRVGEGPFPTELKNEIGNKIGRKGKEFGTVTNRKRRCGWFDAVLVKQSCIISGINGIALTKIDVLDELKNLYICVAYRLNGKKIDYFPSSLHEQIKAKPIYKRFDGWLKNTKGIRKLKDLPNNAKKYINFIQKYCGVKISSISTSPRREDTILLENPFK

SEQ ID NO: 196805 - protein, 278 aa, Unknown
  Bacterial polypetide isolated from the Sargasso Sea
DWLSSEADVIVRFQGGHNAGHTLVIDSIVYKLRLLPSGIVRKNKISIIGNGVVIDPWALLDEIDEIKSKGVEVNPDNLILSEAATLILPFHKEMDEIREDAAGKSKIGTTRRGIGPAYEDKIGRRSIRVMDLASENNLDKRLDVVLSHHNAIRKGLGKTEFKKEHLKKNLLNIAPQILKFSQPVWKKIDEFKSQNKKILFEGAQGVLLDVDHGTYPFVTSSNTVASSAATGSGCGINSINYVLGITKAYTTRVGEGPFPTELTDEVGDLLGTRGKEFG

SEQ ID NO: 196806 - protein, 241 aa, Unknown
  Bacterial polypetide isolated from the Sargasso Sea
GRRSIRVMDLRSENNLNQRLDTVLMHHNAIRKGLGKKVYEKKKLKNELMMIADKILKFAKPTWKILDNYKNLGKKILFEGAQGILLDVDHGTYPFVTSSNTVAASASIGSGCGPNSLGYVLGITKAYTTRVGEGPFPTELTNDIGALLGRRGNEFGTVTNRQRRCGWFDSVLVKQTCKISGINGIALTKLDVLDELEEIKICIQYELNGKKIDYFPTAVEDQIKVKPVYKTLKGWKTSTKG

SEQ ID NO: 196807 - protein, 145 aa, Unknown
  Bacterial polypetide isolated from the Sargasso Sea
GACIGAGVGPTLIDRVIGVAKAYTTRVGEGPFPTELQGSINDQLCDRGSEFGTTTGRRRRCGWFDGVIGKYAVSVNGLDCLAVTKLDVLDELDEIQVCVAYDLNGEEIDYFPTNSDDLKKCKPIFKKLKGWQCSTADCRKLSDLP

SEQ ID NO: 196808 - protein, 248 aa, Unknown
  Bacterial polypetide isolated from the Sargasso Sea
MFYTVIGTQWGDEGKGKIVDWFSSKADAVVRFQGGNNAGHTIKINEKVFKLNLLPSGIIRGKKCFIGNGVILDPWALRDEIFKLTDSGIAINPQNLQIAENICLILPLHKDLDGINEDSRGNESIGTTKKGIGPAYEDKIGRRSIRLCDLSDKDLIKKKIKNLVSFHGLKLNYYNKNIKEDELLTKLIEVYSDISQYSFPIWKTINDLGDKNKIILFEGAQGALLDIDFGTYPYVTSSNTSAGQIFAG

SEQ ID NO: 196809 - protein, 316 aa, Unknown
  Bacterial polypetide isolated from the Sargasso Sea
MKNVVVVGSQWGDEGKGKIVDWLSSEADVVVRFQGGHNAGHTLVIDKKVFKLRLLPSGIVRQGKISILGNGVVIDPWALLDEIKEIKKKGINVSSDNFMISESASLILPFHQEMDEIREDAAGKSKIGTTRRGIGPCYEDKVGRRSIRVMDLRSTSNLDSRLENVLLHHNAIRKGLKKKLYKKVDLKKKLLKIAPEILKFAQPVWLKLDEFIKDRKKILFEGAQGILLDVDHGTYPFVTSSNTVPAMAATGSGLGPNKINYVLGITKAYTTRVGSGPFPTELKNKIGENLGKRGKEFGTVTARKRRCGWFDGVLVR

SEQ ID NO: 196810 - protein, 275 aa, Unknown
  Bacterial polypetide isolated from the Sargasso Sea
ENLDHRLETVLLHHNAIRKGLGKNIYQKDKLKKDLLKIAPEILKFSKPVWKKIDEFKSQNKKILFEGAQGVLLDVDHGTYPFVTSSNTVASSAATGSGCGPSSINYVLGITKAYTTRVGEGPFPTELKDEIGEELGTKGKEFGTVTSRKRRCGWFDGVLVRQTIKISGINGIALTKLDVLDDLDHVKMCIAYELDGNKIDYLPAAVDDQLKVKPIYKTFEGWKTSTKGTKNFKDLPENAKKYIRELEQFIETKVSSISTSPERNDTILIVDPFKN

SEQ ID NO: 196811 - protein, 322 aa, Unknown
  Bacterial polypetide isolated from the Sargasso Sea
HVALDKAREVARGDKPIGTTGRGIGPAYEDKVARRGLRVGDLFNPELFAEKLKVLMDLHNFTLTQYYKVDAIDFQSTLDSALAIAEVLKPMVVDVTDLLDKARKAGKEIMFEGAQGTLLDIDHGTYPYVTSSNTTAGGVATGAGFGPRYLDYVLGIVKAYTTRVGSGPFPTELDCEVGEHLGVKGHEFGATTGRKRRCGWFDAVAVKRAVQLNSISGFCLTKLDVLDGLSVVKICVGYKAADGSVTDVPPMAAEGYEVVTPVFEEMPGWTQSTFGVQKLEELPVEARNYITRLEQVTGVPIDIISTGPDRIQTITLRHPFAV

SEQ ID NO: 196812 - protein, 313 aa, Unknown
  Bacterial polypetide isolated from the Sargasso Sea
KRRFLAGNSKIGTTRRGIGPAYEDKVGRRSIRVMDLASKKNLENRLTVVLEHHNAIRKGLGNPIYQKDKLFEDLLKIAPNILKYSAPVWRKIDQLKSENKKILFEGAQGILLDVDHGTYPYVTSSNTVAASAATGSGCGPNSINFVLGITKAYTTRVGEGPFPSELIDDIGNHLGEKGHEFGTVTSRKRRCGWFDGVLVRQTIKISGITGIALTKLDVLDELDEINLCVAYELNGKKIDYFPAAVEDQLNVKPVYKKFEGWKSKTQGIKKFNDLPEKAKIYVKAIEEFVEIKISSISTSPEREDTILLIDPFK

SEQ ID NO: 196813 - protein, 193 aa, Unknown
  Bacterial polypetide isolated from the Sargasso Sea
NRSILFEGAQGTLLDIDHGTYPYVTSSSTTAGGVSTGLGIGPKYIDKIIGISKAYTTRVGEGPFITELFDDNGKMLAERGNEFGATTGRPRRCGWLDLVALKKAIFINSVTDLCITKLDVLDEMKKINVCIDYENDLPVYKEFEGWLSSTEGITEYDSLPKNAKIYIKYIEDFVKSKASIISTGAFRDQTIFK

SEQ ID NO: 196814 - protein, 279 aa, Unknown
  Bacterial polypetide isolated from the Sargasso Sea
MKNVVVVGSQWGDEGKGKIVDWLSSKADVVIRFQGGHNAGHTLVIDGITYKLRLLPSGIVRKDKVSIIGNGVVIDPWALLDEIKEIRSKGVKVDEKNLIISEAANLILPFHREMDEIREDAAGKAKIGTTRRGIGPAYEDKVGRRSIRVMDLISEKNLDHRLETVLMHHNAIRKGLGKEIFKKDKLKQELLSIAPKILKFSQPVWKKIDEFKSQKKKILFEGAQGILLDVDHGTYPFVTSSNTVASAAATGSGCGPNSINYILGITKAYTTRVGEGPFP

SEQ ID NO: 196815 - protein, 221 aa, Unknown
  Bacterial polypetide isolated from the Sargasso Sea
MGKNNKVIVFEGAQGSMLDIDFGTYPYVTSSNTISGQIFSGTGFSNRNNHKILGITKAYTTRVGSGPFPTELNDNIGEHLGVRGQEFGTVTKRKRRCGWFDSVLLKQSINLNGITDIVLTKLDVLDQLEEIKVCIGYDIEGKKYDYLPSSEFLYEKIKPVYKTIAGWQTSTAGISNFSNLPNKAIDYIKTLEDLMEIKISIVSTGPDRKETIDINGTLLNI

SEQ ID NO: 196816 - protein, 259 aa, Unknown
  Bacterial polypetide isolated from the Sargasso Sea
MKNIVVVGSQWGDEGKGKIVDWLSQQADVVIRFQGGHNAGHTLVIDGVTYKLRLLPSGIVRKDKVSIIGNGVVVDPWALLEEIEEIKSKGVNVTTDNFIISEAANLILPFHKEMDEIREDAAGKGKIGTTRRGIGPAYEDKVGRRSIRVMDLRSEKNLDQRLESVLIHHNAIRKGLGQKIFEKKRLKSDLLKIAPQILQYSQPVWLKIDEFKKQKKKILFEGAQGILLDVDHGTYPYVTSSNTVASSAATGSGCGPNSI

SEQ ID NO: 196817 - protein, 432 aa, Unknown
  Bacterial polypetide isolated from the Sargasso Sea
MAKNVVVLGTQWGDEGKGKIVDLLTDKASYVVRYQGGHNAGHTLVIDGEKTVLHLIPSGVLRANVKCVIGNGVVLSPEALLKEMAMLEQKGVPVKERLLLSEACPLILPFHVALDKAREVARGDKPIGTTGRGIGPAYEDKVARRGLRVGDLFNPELFAEKLKVLMDLHNFTLTQYYKVDAIDFQTTLDNALAIADVLKPMVVDVTDLLDKARKAGKEIMFEGAQGTLLDIDHGTYPYVTSSNTTAGGVATGAGFGPRYLDYVLGIVKAYTTRVGSGPFPTELDCEVGEHLGVKGHEFGATTGRKRRCGWFDAVAVKRAVQLNSISGFCLTKLDVLDGLDVVKICVGYKAADGSITDVPPMAAEGYEIVTPVFEEMPGWTQSTFGVQKLEDLPVEARNYITRLEQITGVPIDIISTGPDRIQTITLRHPFAV

SEQ ID NO: 196818 - protein, 214 aa, Unknown
  Bacterial polypetide isolated from the Sargasso Sea
MTWKGKLMNNLVVVGCQWGDEGKGKLVDYLGDKADIIVRFQGGNNAGHTIVTGDKIFKLSLLPSGILRNNKLSIIGNGVVLDPWALKKEIDSLENLGIKISKKNLMIAENVSLILPFHKELDKLREEIAGGKKIGTTGRGIGPAYEDKVGRRSVRLSDLNNPELLRERLERSLAHYNILMKGYGKSEYSVFEVQKKLDEISHFISKFSTCVGKN

SEQ ID NO: 196819 - protein, 390 aa, Unknown
  Bacterial polypetide isolated from the Sargasso Sea
MKNVVVVGTQWGDEGKGKIVDWLSNEADVVVRFQGGHNAGHTLVIDGVTYKLRLLPSGIVRKNKISIIGNGVVVDPWALLDEIKEAKSKGINIDEKNLILSESANLILPFHSEMDQMREDVAGKDDIGTTRRGIGPAYEDKVGRRSVRVMDLVSESNLDKRLKTALVHHNTIRKGLGKKIIDKDKLKKDLLKIAPELLKFSQPVWKKIDEYKSKGKKILFEGAQGILLDVDHGTYPFVTSSNTVAASAATGTGCGPNTINYVLGITKAYTTRVGKGPFPTELKDKTGELLGHRGKEFGTVTSRKRRCGWFDAVLVRQTIKISGVNGIALTKLDVLDELDEIKMCVAYKLNGKEIDYLPAAAEDQIKVVPVYKVFKGWKSPTSKIKEFNKL

SEQ ID NO: 196820 - protein, 254 aa, Unknown
  Bacterial polypetide isolated from the Sargasso Sea
MANVVVVGAQWGDEGKGKIVDWLSERADIIVRFQGGHNAGHTLVIDGKTYKLHALPSGVVRGGKLSVIGNGVVLDPWHLIKEIKIVKSQGVDISPENLIIAENTPLILPIHGELDRAREGLNKVAKIGTTGRGIGPAYEDKVGRRAIRVADLADRSTLEARIDRLMLHHNTLRRGMELEEIDKSGLIADLHEIAPTILKYSAPVWKVLNEKRKAGNRILFEGAQGALLDIDFGTYPFVTSSNVIAGQAATGSGL

SEQ ID NO: 196821 - protein, 430 aa, Unknown
  Bacterial polypetide isolated from the Sargasso Sea
MKNVVVVGSQWGDEGKGKIVDWLSSEADVVVRFQGGHNAGHTLVIDKKVFKLRLLPSGIVREGKISILGNGVVIDPWALLDEIKEIKKQGINVTPENFMISESASLILPFHQEMDEIREDSAGKGKIGTTRRGIGPCYEDKVGRRSIRVMDLRSKENLDNRLKNVLLHHNAIRKGLKKKIYQKDDLKKKLLKIAPEILKFAQPVWLKLDEFKKDRKKILFEGAQGILLDVDHGTYPYVTSSNTVPAMAATGSGLGPNTINYVLGITKAYTTRVGSGPFPTELKNKIGESLGKRGKEFGTVTARKRRCGWFDGVLVRQTIKIAGINGIALTKLDVLDELDEIKICVEYELNGKRIDYLPAASEDQFNIKPIYKTFPGWKSSTQGIRNIKDLPEKAKSYIYALEDFIGAKISSISTSPERDDTILIEDPFKI

SEQ ID NO: 196822 - protein, 429 aa, Unknown
  Bacterial polypetide isolated from the Sargasso Sea
MKNVVVVGSQWGDEGKGKIVDWLSREADIVIRFQGGHNAGHTLVIDGVTYKLRLLPSGIVRKNKVSIIGNGVVVDPWALLDEIEEVKSKGVKINEKNLILSEAATLILPFHREMDEIREDSAGKSKIGTTRRGIGPAYEDKVGRRSIRVMDLASKTNLENRLTAVLEHHNAIRKGLGKPIYQKDKLIEELLKLAPNILKYSAPVWRKIDQFKSENKKILFEGAQGILLDVDHGTYPFVTSSNTVAASAATGSGCGPNSINFVLGITKAYTTRVGEGPFPTELKDDIGNHLGEKGHEFGTVTSRKRRCGWFDGVLVKQTIKISGIDGIALTKLDVLDELDEINLCIAYELNGKKIDYFPAAVEDQLNVKPIYKKFDGWKSKTQGIKKFEDLPEKAKTYVKAIEEFIETKISSISTSPEREDTILLIDPFK

SEQ ID NO: 196823 - protein, 386 aa, Unknown
  Bacterial polypetide isolated from the Sargasso Sea
AGHTLEFEGIKHVLHTIPSGIFHSKALNLIGNGVVIDPVIFVEEIDKLKKYKINYQEKLLISKKAHIILPTHRLLDATSEASKGKLKIGSTLKGIGPTYMDKTGRNGIRVGDLLNKDWKKKYNLLTKKHIRMLSFFEVNVEFDLKKLEKKFFDSITVLKKCKIVDSEEYLNKAQKEGKKILAEGAQGSLLDVDFGTYPYVTSSNTTAAGACTGLGIAPNKIKEVFGVFKAYCTRVGSGPFPTEIKNNYGKKMAEVGNEFGSTTGRTRRCGWIDLIALKYSIQINGVTQLMMMKGDVLSGFDKIKICTGYIQKNKKINFFPYSLDCKDVKPIYIEMDGWDENLTEIKNQNEFPENFKNYLSFLEKELQTPIKIISVGPDRSQTIHMA

SEQ ID NO: 196824 - protein, 332 aa, Unknown
  Bacterial polypetide isolated from the Sargasso Sea
MPLEQGTITVIVGAQWGDEGKGKITDFFSGDSDYVVRYHGGNNAGHTVIVNGDTYKLHLIPSGVLYPTPISIIGNGVVIDPKALLDEVSYLNTKGVTPNLLISDRAHIIMPYHKMLDLALTNHQQSLAAGSTKRGIAPVYGDKMFRNGIRVVDLLEPNIFHEKLNKSFIFATNLLSAISSSDFDLDFDSVYNDYLKMGKLLSPYISDISLELYNAYNNNKTILFEGAQGISLDVDHGVYPYTTSSNTIAGSISTGTGVSYRDIHRIIGVTKAYLSRVGEGPLPSEVHGEEAIQLREKGGEYGTTTGRPRRVGWLDLVQVRQAVRVNGLTEIA

SEQ ID NO: 196825 - protein, 313 aa, Unknown
  Bacterial polypetide isolated from the Sargasso Sea
LPTHVALDIAHEKSLGKSSIGTTGRGIGPTYEDKVARRGIRLIDFSNIDILKKKLQKSMDYHNFLLKEYYKSDTISIDIVLEKLVPIFEEIKSYVCNVAPLILNLNKDSNIIFEGAQGTMLDIDHGTYPFVTSSNTTMSGVISGTGIGVDKIDYSLGITKAYSTRVGHGPFPTELHDQLGLNIAEWGGEVGATTGRARRCGWLDLKILKQSIELNRINGIALTKLDVLDNLEKIKICLDYGPIDYETLNTSDMKYIEMEGWKSSTVGITNYDELPENAKKYIKTIEEISKTKIVMISTGPSRDQIIVLEDIFK

SEQ ID NO: 196826 - protein, 314 aa, Unknown
  Bacterial polypetide isolated from the Sargasso Sea
MFYTIIGTQWGDEGKGKIVDWLSSKADLVVRFQGGNNAGHTIKVDKNVYKLNLLPSGIIRNKKCVIGNGVVLDPWALIREIANLREQKILIDKKNLFIAENVCLILPIHKLIDEVNEESRGNNSIGTTKKGIGPAYEDKVGRRAIRLCDLNDLKNLKLKIKNLYDFHKPRLDKFKKNSDYKKTFNDLVEISEQIFIFSAPVWKIINDAGKQNKFILFEGAQGSLLDIDFGTYPYVTSSNTSSGQIFSGTGFGIKENHNVLGITKAYTTRVGSGPFATELNDEIGDHFVDKGQEFGTVTKRRRRCGWFDSVLVKQ

SEQ ID NO: 196827 - protein, 245 aa, Unknown
  Bacterial polypetide isolated from the Sargasso Sea
LKSDLLKIAPKILKFSQPVWLKIDQFKKRKKKILFEGAQGILLDVDHGTYPFVTSSNTVASSAATGTGCGPNSINYVLGITKAYTTRVGEGPFPTELTDKVGELLGTRGKEFGTVTSRKRRCGWFDGVLVRQTIKVSGIDGIALTKLDVLDELDEIKMCVAYELEGEKLDYLPAAVEDQIKIKPIYKSFPGWKVSTSGIKNMDSLPDNAKKYIFAVEDFIGAKISSVSTSPERDDTILIENPFEA

SEQ ID NO: 196828 - protein, 285 aa, Unknown
  Bacterial polypetide isolated from the Sargasso Sea
KIQRKGIRIQDLLDETNFEIKVRKNIEDVNLTLTKIYDHSPLVVDDILDEFSTYKDIVTNHVADTSLLIANAIKNKKTILFEGAQGTLLDIDHGTYPFVTSSNTSSGNAAIGSGVGPKNIDRIVGVTKAYISRVGSGPFLTEQKNEIGDFLIEKGAEFGVVTGRRRRCGWLDLISLKYSVRVNSLTELFITKLDVLSGLEELKLCVGYKDNDEVITDYPFNQNVLNSAEPVYETFDGWTDDISTVKSFEDLPNNAQSYIKAIEAFIEVPITFISVGPERTENIII

SEQ ID NO: 196829 - protein, 284 aa, Unknown
  Bacterial polypetide isolated from the Sargasso Sea
IRLMDLVSEQNLTHRLETVLTHHNAIRKGLGKKIYEKENLMKDLLKIAPEILKYSQPVWKKIDEFKSQGKKILFEGAQGILLDVDHGTYPFVTSSNTVAAAAATGSGCGPNSINYVLGITKAYTTRVGEGPFPTELTDKIGEELGTRGKEFGTVTSRKRRCGWFDGVLVRQTIKISGIDGIALTKLDVLDELDQIKMCIGYELNGKKIDYLPASVDDQLKAKPIYKTFEGWKSPTSGIKKFDHLPDNAKNYINELEKFIESKISSISTSPERNDTILIEDPFKI

SEQ ID NO: 196830 - protein, 430 aa, Unknown
  Bacterial polypetide isolated from the Sargasso Sea
MKNVVVVGSQWGDEGKGKIVDWLSSEADVIVRFQGGHNAGHTLVIDSIVYKLRLLPSGIVRKNKVSIIGNGVVVDPWALLDEIDEIKSKGVEVNPENLILSEAATLILPFHKEMDEIREDAAGKSKIGTTRRGIGPAYEDKIGRRSIRVMDLASENNLDKRLDEVLSHHNAIRKGLGKTEFKKEQLKKNLLNIAPQILKFSQPVWKKIDEFKSQNKKILFEGAQGVLLDVDHGTYPFVTSSNTVASSAATGSGCGMNSINYVLGITKAYTTRVGEGPFPTELTDDIGELLGTRGKEFGTVTSRKRRCGWFDGVLVRQTLKVSGIDGIALTKLDVLDNLDEIKMCIAYEINGKKFDYLPASVDDQFMAKPIYKSFKGWKSSTVGIKNFDELPENAKNYIKALEKFIETKISSISTSPERNDTILIQDPFNL

SEQ ID NO: 196831 - protein, 313 aa, Unknown
  Bacterial polypetide isolated from the Sargasso Sea
IREDSAGNSKIGTTRRGIGPAYEDKVGRRSIRVMDLASKKNLEKRLTVVLEHHNAIRKGLGKSLYEKKKLVEELVKIAPNILNYSAPVWRKIDQFKSENKKILFEGAQGILLDVDHGTYPYVTSSNTVAASAATGSGCGPNSINFVLGITKAYTTRVGEGPFPTELTDDVGNHLGEKGHEFGTVTSRKRRCGWFDGVLVRQTIKISGIDGIALTKLDVLDELDEINVCVAYDLNGKEIDYFPAAVEDQLNVKPVYKKFKGWKSKTQGIKKFENLPKNAKIYIKAIEEFIETKISSISTSPEREDTILLIDPFN

SEQ ID NO: 196832 - protein, 206 aa, Unknown
  Bacterial polypetide isolated from the Sargasso Sea
MKNVIVVGTQWGDEGKGKIVDWLSSEADVVVRFQGGHNAGHTLVIDGKTYKLRLLPSGTVREGKISIIGNGVVVDPWALIDEIKEMKSKGVEVDENNLILSEAANLILPYHKEMDEIREDAAGNAKIGTTRRGIGPAYEDKVGRRSIRVMDLASESNLDKRLEAALIHHNALRKGLKQKVFKKDKLKKDLLKIAPQILKFSQPVWK

SEQ ID NO: 196833 - protein, 231 aa, Unknown
  Bacterial polypetide isolated from the Sargasso Sea
SIQASLEKIDQYKSEGNKILFEGAQGILLDVDHGTYPFVTSSNTVASSAATGSGCGPDTINYVLGITKAYTTRVGEGPFPTEQNNSIGELLGSIGKEFGTVTSRKRRCGWFDGVLVRQTIKISGINGVALTKLDVLDELEEIKMCIKYEIDGKQIDYLPAAVDEQLKVKPIYKTFKGWKCSTKGIKNFEKLPEKAKLYILELEKFIGAKISSISTSPERNDTILLENPFKI

SEQ ID NO: 196834 - protein, 258 aa, Unknown
  Bacterial polypetide isolated from the Sargasso Sea
MRNVVVVGSQWGDEGKGKIVDWLSSEADVVVRFQGGHNAGHTLVIDGITYKLRLLPSGIVRKNKISVIGNGVVVDPWALLDEIAEIKTKGVNVDENNLILSESANLILPFHKEMDEIREDTAGKAKIGTTRRGIGPAYEDKIGRRSIRVMDLVSESNLDHRLEAVLIHHNAIRKGLGKKIFEKDKLKKNLLKIAPKILKFSQPVWKRIDEFKSKGKKILFEGAQGILLDVDHGTYPFVTSSNTVASAAATGTGCGVNS

SEQ ID NO: 196835 - protein, 430 aa, Unknown
  Bacterial polypetide isolated from the Sargasso Sea
MKNVVVVGSQWGDEGKGKIVDWLSSHADVVIRFQGGHNAGHTLVIDGVTYKLRLLPSGIVRKNKISIIGNGVVIDPWALLDEIKEINSKGVNVDEKNLIISEAANLILPFHREMDEIREDAAGNSKIGTTRRGIGPAYEDKVGRRSIRVMDLASKENLNKRLDNVLAHHNAIRKGLKKKIYEKGVLIEELLKIAPKILKFSQPVWKKIDEFKQKNKKILFEGAQGILLDVDHGTYPFVTSSNTVASSAATGTGCGPNSINYVLGITKAYTTRVGEGPFPTELKDKVGEELGTRGKEFGTVTSRKRRCGWFDGVLVRQTIKISGIDGIALTKLDVLDELDEIKICVAYEINGKKIDYLPAAVDDQLKVKPIYKTYDGWKSSTVGIKNFDELPENAKIYIQDLEKFIETKISSISTSPEREDTILILDPFKN

SEQ ID NO: 196836 - protein, 379 aa, Unknown
  Bacterial polypetide isolated from the Sargasso Sea
MFYTIVGTQWGDEGKGKIVDWISSKADLIVRYQGGNNAGHTIKVDNNVYKLNLLPSGIINNKKCAIGNGVVLDPWALINEIDNLKEQGIEVNKDNLYIADNICLILPIHKLLDEINETSRGKKELGTTKKGIGPAYEDKVGRRAIRICDLKDPIFLKQKIDNLYEFHKDKISKHINKITHNYYEELLSMSNYLNSFSVPLWKIINELGQKNKNIVFEGAQGSMLDIDFGTYPYVTSSNTISGQIFSGTGFSYRKNHKILGITKAYTTRVGSGPFPTELMDEIGEHLGEKGQEFGTVTKRKRRCGWFDSVLLKQSIKLNGITDIVLTKLDVLDELKEINVCTGYLIDDEHYDYLPSEEFLFDKIKPIYKKIDGWEESTAG

SEQ ID NO: 196837 - protein, 423 aa, Unknown
  Bacterial polypetide isolated from the Sargasso Sea
MSTTIVLGAQWGDEGKGKVTDFFASKADLVVRFQGGNNAGHTIVVGDEKFALSMVPSGVMYESCTPIIGSGCVIDFEVLKNEIETLNGKNIDTTKLKLSYNAHIIMPYHKILDELIEDSLGDKKIGTTRKGIGPCYGDKIQRKGIRIQDFLSEENFYEKLKNNLEEKNQIIEKIYGGNSINFDEIVDEYKKYKELVSSIADDTSLVISNSLKENKKILFEGAQGTLLDIDHGTYPFVTSSNTSAGNAATGSGIGPLNFDEVVGVTKAYISRVGTGPFITEQENEIGDYMIEKGAEFGTVTGRRRRCGWLDLVSLKYSKRINSLSQLFITKLDVLSGLEEIKVCIGYSFEDKKITDYPLVDEILDKCEPIYESFEGWNEDISGITKYDALPENAKKYIEFIEDFSDVPIKYISVGPERNQNIIR

SEQ ID NO: 196838 - protein, 166 aa, Unknown
  Bacterial polypetide isolated from the Sargasso Sea
MQGGLSSGLGVGPRHIDSILGITKAYTTRVGEGPFITELFDSNAEQLAKVGHEFGATTGRPRRCGWLDLKALETVVFINSVTNLCITKLDVLDGFEEIKVCIDYDKDQLPIYKSFSGWMQDTSNARSFDDLPKAAQDYILFIEETLDCPIGIVSVGPSRDQTIYRD

SEQ ID NO: 196839 - protein, 392 aa, Unknown
  Bacterial polypetide isolated from the Sargasso Sea
AGHTLVIDNVTYKLRLLPSGIVRKDKVSIIGNGVVVDPWALLDEIEEIKSKGVEINEKNLILSEAANLILPFHREMDEIREDAAGKAKIGTTRRGIGPAYEDKVGRRSIRVMDLGSKKNLEHRLELVLMHHNAIRKGLGKEIYKKDKLMQDLLKIAPDILKYSQPVWKKIDEFKSEGKKILFEGAQGILLDVDHGTYPFVTSSNTVASAAATGSGCGPNSINYVLGITKAYTTRVGEGPFPTELKNEIGEKLGTIGKEFGTVTSRKRRCGWFDGVLVRQTIKISGINGIALTKLDVLDQLDEIKMCIAYEVDGKKMDYLPAAVNDQLKAQPIYKTFKGWNCSTKGIKKFEDLPDNAKNYITELEKFIETKVASISTSPERNDTILIVDPFSS

SEQ ID NO: 196840 - protein, 428 aa, Unknown
  Bacterial polypetide isolated from the Sargasso Sea
MTGVVIVGSQWGDEGKGKIVDWLSSQADIVIRFQGGHNAGHTLVINNETFKLNILPSGILRKGKISIIGNGVVLDLAAFQKEVAGLKDRGVDITPSNLYISDRATIILPLHQSLDELRENNNLIKIGTTKRGIGPAYEDKVGRRAIRLCDLFDKEKLNKKIEILLNHHNAIMRGFGLDEYNVEEVVSEIYELGEYAKPFAKTINDITNVINSGKEKILFEGAQGFLLDIDHGTYPFVTSSNVHASYASIGSGLNPKVINHILAITKAYTTRVGNGPFPTEQDNEIGNKLGEIGHEFGTVTNRKRRCGWFDSVLVRQALTQSGATGIALTKIDVLDHFDEIKMCVGYNLNGKEIDYYPSSEQDQETIEPIYETFQGWMSTTTGINSFDELPENAKKYVNRISELTKTKIDLISTSPRREDTILINKLFN

SEQ ID NO: 196841 - protein, 430 aa, Unknown
  Bacterial polypetide isolated from the Sargasso Sea
MRNVVVVGSQWGDEGKGKIVDWLSSEADIVVRFQGGHNAGHTLVIDKKVFKLRLLPSGIVRDNKISILGNGVVIDPWALIEEIKDIKKQGINVTPKNFMISESASLILPFHQEMDEIREDTAGRGKIGTTRRGIGPCYEDKVGRRSIRVMDLRSESNLDARLENVLLHHNAIRKGLKKKIYKKNELKKKLLKIAPEILKFAKPVWLKLDEFKKDRKKILFEGAQGILLDVDHGTYPFVTSSNTVPAMAATGSGSGPDKIGYILGITKAYTTRVGSGPFPTELKNKIGEMLGKRGKEFGTVTARKRRCGWFDAVLVRQTIKISGINGIALTKLDVLDELDEIKMCIEYQLNGEKIDYLPAASEDQFKIKPIYKTFPGWKTTTQGIRNIKDLPENAKKYIYSLEDFIGAKVSSISTSPERDDTILIEDPFKV

SEQ ID NO: 196842 - protein, 405 aa, Unknown
  Bacterial polypetide isolated from the Sargasso Sea
MSENTLILGLQWGDEGKGKIVDNLSQSVDVVCRFQGGHNAGHTIKVNDEQTVLHLIPSGILHDNAKCLIGNGVVLALDALDEEITKLKDKGINFQDRFYISSACSLILPSHISIDKVRDKKESIGTTGRGIGPAYEDKIGRRAVRFGDIGNKSLLKEKIELLVGYHNRLLKELHNHEPHDVNEIFESVIKYKDLYDQFCVDSQDLMYKWVKNKKSILFEGAQGTLLDIDHGTYPYVTSSSTTAGGVSTGLGIGPKFIDKIIGISKAYATRVGEGPFLTELFDENGEMIAKKGNEFGATTGRPRRCGWLDLVALKKAIFTNSVTDLCITKLDVLDEMQEISVCIEYEKNKPVYMKFKGWLSSTEGITEYSNLPKEAKDYIEFIEDYIECSASIISTGPSRDQTINK

SEQ ID NO: 196843 - protein, 419 aa, Unknown
  Bacterial polypetide isolated from the Sargasso Sea
MSSIFLVGTHWGDEGKGKIVDVLSENAKACIRFQGGHNAGHTLVINNEKTILHLIPSGILRDDCLSIIGNGVVVSLEALNNELKELKDKKIKIDGKLFISESAHIILPSHRALDIAREKSLGSKSIGTTGRGIGPCYEDKVARRGIRLSDVGDLDIFRTKLEKSMEFHNFILEKYYGTKTLDFEETCSELVSLYSSVKGYICDTRSLINNTVSSSNVIFEGAQGTMLDVDHGTYPFVTSSNTTFAGLLSGTGIGANQVNYSLGITKAYTTRVGHGPFPSELTNEIGKNLADWGGEVGATTGRDRRCGWLDLKILKHSVMVNRIDGIALTKLDVLDKLDKIKICIDYGEIDYSDFSVKDLNYIEMDGWLSSTVGITNFNDLPTAAKEYIRTIEKLANVPVVLISTGPSRDQIIVQKNLFT

SEQ ID NO: 196844 - protein, 430 aa, Unknown
  Bacterial polypetide isolated from the Sargasso Sea
MNNVVVVGSQWGDEGKGKIVDWLSSEADVVVRFQGGHNAGHTLVIDGVTYKLRLLPSGIVRKNKISIIGNGVVVDPWALLDEIEEAKSKGVQINENNLILSETATLILPFHREMDEIREDSAGKSKIGTTRRGIGPAYEDKVGRRSIRVMDLASKQNLENRLSLVLEHHNAIRKGLGKPIYEKDKLVEDLLKIAPNILKYSAPVWRKIDEFKFENKKILFEGAQGILLDVDHGTYPYVTSSNTVAASAATGSGCGPNSINYVLGITKAYTTRVGEGPFPTELTDDIGNHLGEKGHEFGTVTSRKRRCGWFDGVLVRQTIKISGIDGIALTKLDVLDELDEINLCVAYELNGKEIDYFPAAVEDQLNVKPVYKTFNGWKSKTQGVKKFDDLPNNAKIYVKAIEEFIETKISSISTSPERKDTILLVDPFNY

SEQ ID NO: 196845 - protein, 366 aa, Unknown
  Bacterial polypetide isolated from the Sargasso Sea
MSNITLILGLQWGDEGKGKIVDALAEKAGAVCRFQGGHNAGHTLRVDGVQKVLHLVPSGILHPNVHCVLGNGIVLSLSALAKEIKELQESNINFKDRFYVSEDCSLILPTHIAIDKVRDQSEGIGTTGRGIGPAYEDKIARRALRFGDLKNLDELKVKLTKLVNYHNQILEHLYNAEPVEFENVLEELTGNIDLYNQYHCKTQDLLKVWVKEGKNILFEGAQGSMLDIDHGTYPYVTSSSTTAGGLSTGLGVGPRYLDTILGITKAYTTRVGEGPFATELFDSNAEQLAKVGHEFGATTGRPRRCGWLDLKALEIVVFINSVTNLCLTKLDVLDSFDEIKVCVDYDENEQPIYKTFSGWKQDTSKA

SEQ ID NO: 196846 - protein, 260 aa, Unknown
  Bacterial polypetide isolated from the Sargasso Sea
MKNVVVVGSQWGDEGKGKIVDWLSSEADVVVRFQGGHNAGHTLVIDGITYKLRLLPSGIVRKNKISIIGNGVVVDPWALLDEIKEIKSKGVIVDENNLILSESANLILPFHKEMDEIREDAAGNAKIGTTRRGIGPAYEDKIGRRSIRVMDLVSESNLDHRLETVLIHHNAIRKGLGKQIYKKEQLKKDLLKIAPEILKFSQPVWKKIDEYKAKGKKILFEGAQGILLDVDHGTYPFVTSSNTVAATAATGSGCGPNTIN

SEQ ID NO: 196847 - protein, 321 aa, Unknown
  Bacterial polypetide isolated from the Sargasso Sea
MTNVTVVGTQWGDEGKGKIVDWLSERADVVARFQGGHNAGHTIVLNKKVYKLSLLPSGIIRKKISIIGNGVVIDPWALINEINKIESQGLKITSKLLKISNKASLILPYHQELDLLRENAKGNNKIGTTGRGIGPAYEDKVGRRAIRVCDLFNKDSREKQLKAAITHHNIILRGLNKKTIRKTNINKMLDKIAPILKPFVTNTMELIISSNKKNKNILFEGAQGSMLDIDHGTYPFVTSSNTVSSQSATGSGIGPSLINNVLGITKAYTTRVGNGPFPSELNNKTGELLGKIGHEFGVVTGRKRRCGWFDAVIVNYTVKLS

SEQ ID NO: 196848 - protein, 430 aa, Unknown
  Bacterial polypetide isolated from the Sargasso Sea
MKNIVVVGSQWGDEGKGKIVDWLSEQADVVIRFQGGHNAGHTLVIDGVTYKLRLLPSGIVRKNKISIIGNGVVVDPWALLDEVEEIKLKGVDVNVDNFIISESANLILPFHREMDEIREDAAGKGKIGTTRRGIGPAYEDKVGRRSIRVMDLRSEQNLDHRLESVLVHHNAIRKGLGKKIFEKEQLKEELLKIAPKILQFSQPVWLKIDQFKKQKKKILFEGAQGILLDVDHGTYPYVTSSNTVASSAATGTGCGPNSINYVLGITKAYTTRVGEGPFPTELKDDIGELLGTRGKEFGTVTSRKRRCGWFDGVLVRQTIKISGIDGIALTKLDVLDELDEIKMCIHYELDGKKIDYLPAAVEDQLKIKPIFKTFPGWKSSTSGIKNMDALPENAKKYIFAIEDFIGAKISSISTSPEREDTILVENPFEI

SEQ ID NO: 196849 - protein, 372 aa, Unknown
  Bacterial polypetide isolated from the Sargasso Sea
VVIRFQGGHNAGHTLVIDGITYKLRLLPSGIVRKGKISIIGNGVVVDPWALLEEIEEIKSKGVEVNVNNFIISESANLILPFHREMDEIREDAAGKSKIGTTRRGIGPAYEDKVGRRSIRVMDLRSEKNLDQRLDSVLVHHNAIRKGLGKKIFEKDKLKSDLLKIAPKILEFSQPVWLKIDQFKKQKKKILFEGAQGILLDVDHGTYPFVTSSNTVASSAATGTGCGPNSINYVLGITKAYTTRVGEGPFPTELTDDIGELLGTRGKEFGTVTSRKRRCGWFDAVLVRQTIKVSGIDGIALTKLDVLDELDEIKMCVAYNLDGKRLDYLPAAVEDQIKIKPIYETFPGWKVSTSGVKNIDSLPENAKKYILQ

SEQ ID NO: 196850 - protein, 430 aa, Unknown
  Bacterial polypetide isolated from the Sargasso Sea
MKNIVVVGSQWGDEGKGKIVDWLSSEADVVIRFQGGHNAGHTLVIDGVTYKLRLLPSGIVRKNKISIIGNGVVIDPWALLDEIEEIKNKGVEVTDKNLIISETATLILPFHKEMDEIREDSAGKGKIGTTRRGIGPAYEDKVGRRSIRVMDLISEKNLDERLVTVLSHHNAIRKGLGRPIFEKDKLKKELLKIAPIILKYSQPVWKKIDQFKNEGKKILFEGAQGILLDVDHGTYPFVTSSNTVASSAATGSGCGPNSINYVLGITKAYTTRVGEGPFPTELLDDLGEKLGKRGKEFGTVTSRKRRCGWFDGVLVRQTIKISGIDGIALTKLDVLDEFEEIKMCIAYSLNGKEIDYLPAAVEDQIKVKPIYKTFIGWKSSTQGIKKFDDLPDNAKVYIKELEKFIETKISSISTSPEREDTILLENPFNS

SEQ ID NO: 196851 - protein, 431 aa, Unknown
  Bacterial polypetide isolated from the Sargasso Sea
MVAKSLVVIGAQWGDEGKGKIIDILTEKADLVVRFQGGHNAGHTLVIDGEKTVLHLIPSGIFNDAKCLIGNGVVLHLPTIIKEIEYLESKGIDVQSKLMISSQCPLIMPSHIAIDEAREKSLGKNAIGTTGRGIGPVYEDKVARRAVHVMDLFEEDLFSSKLLSLTTFHNFLLEKLYESEGIDLDGIYKDWMNHFNKIKNLIVDSSEVVNNLKSQGSNILFEGAQGSMLDIDQGTYPFVTSSNTLSGAASLGSGSGPLDIDGVLGITKAYATRVGSGPFPTEIEDDYGKHMAKVGVEFGATTGRPRRCGWLDLVALRKAVNINSISHLCITKIDVLDGLDKILVAEEYKIDDKSYDTLPAMSQNRFDSIVPNYTEYKGWSGTTYGLKSFDQLPVEAQTLIKGIEDSIGIPVSLISTGPDRNDMIVIDEIFS

SEQ ID NO: 196852 - protein, 448 aa, Unknown
  Bacterial polypetide isolated from the Sargasso Sea
MSASAVNVTPGRNVVVVGTQWGDEGKGKIVDWLTDHAQGVVRFQGGHNAGHTLIIGGKKTILRLIPSGIMREGVACYIGNGVVLSPEALFKEIGELEEAGVNVRDRLFISEATTLILPYHIAIDQAREARKGAGKIGTTGRGIGPAYEDKVGRRALRVQDLFDAKTFADRLRENLDFHNFVLTQYLGGAAVDFQATLDTMLGYADRLKPMVADVSRRLYDANNAGQNLLFEGAQGTLLDIDHGTYPFVTSSNCVAGAASAGAGVGPQKLNYILGITKAYCTRVGSGPFPSELYDADNPQRQDQVGVTLANVGKEFGSVTGRPRRTGWLDAAALRRSIQINGVSGLCMTKLDVLDGLDEVKLCVGYKIDGKDVDILPRGAADVARCEPVYETFAGWKESTVGIKTWEALPANAQAYLTRVQEVAGVPVDMVSTGPDRDETILLRHPFKV

SEQ ID NO: 196853 - protein, 223 aa, Unknown
  Bacterial polypetide isolated from the Sargasso Sea
MDEFGKDRKKILFEGAQGILLDVDHGTYPFVTSSNTVPAMAATGSGLGPNTINYVLGITKAYTTRVGSGPFPTELKNKIGESLGKRGKEFGTVTARKRRCGWFDGVLVRQTIKIAGINAIALTKLDVLDELDEIKICVEYELNGKKIDYLPAVSEDQFNIKPIYKTFPGWKSSTQGIRNIKDLPEKAKNYIYALEDFIGAKISSISTSPERDDTILIEDPFKS

SEQ ID NO: 196854 - protein, 292 aa, Unknown
  Bacterial polypetide isolated from the Sargasso Sea
MKNVAVVGSQWGDEGKGKIVDWLSSEAEVVVRFQGGHNAGHTLVIDGITYKLRLLPSGIVRKNKISIIGNGVVIDPWALLDEINEIKEKGINLDQNNLIISEAATLILPFHRELDEIREDLAGNSKIGTTRRGIGPAYEDKVGRRSIRVIDLAYEENLDKRLDNALNHHNAIRKGLGKDNFEKENLKKELLKIAPKILRFCQPVWKKIEEFKKENKRILFEGAQGILLDVDHGTYPFVTSSNTVASSAATGSGCGLNSINYILGITKAYTTRVGEGPFPTEQKNEIGNHLGE

SEQ ID NO: 196855 - protein, 420 aa, Unknown
  Bacterial polypetide isolated from the Sargasso Sea
MKKSLILVGTQWGDEGKGKIVDYFSQKFEAVCRFQGGHNAGHTIYNEEEKFVLHLIPSGVFYDHVSCFIGQGVILSLDSLLEEIEQLESKGIKLEGKLRISRYCSLLLPIHAKIDQLREDKKNAIGTTRRGIGPAYEDKTARRSIKAFDLEDNELLEQKLKNLVDYYNFQIETIHKSDTFIFEDVLDNLKKSYQKASKYFGDVTDSLEEIYDNGGNILYEGAQGTLLDVDYGTYPYVTSSNTLATSVGVGSGFPKSIYSDVLGVTKAYTTRVGSGPFPTELFCKDGEKLAELGNEFGATTGRPRRCGWLDLVALKYSAKLNNLTELCITKLDVLDSFEAIKVCHGYNSDGVDTPFKSRLLHKVDPVYEVLKGWNTSLNDCKDYDSLPEQTKVFIKYVEDYVGVKVTLISNGPNRSDLIHR

SEQ ID NO: 196856 - protein, 334 aa, Unknown
  Bacterial polypetide isolated from the Sargasso Sea
MPLDQGTITVIVGAQWGDEGKGKITDFFSGDSDYVVRYHGGNNAGHTVIVNGDTYKLHLIPSGVLYPTPISIIGNGVVIDPKALLDEVSYLKTKGVTPNLLISDRAHIIMPYHKMLDLALTNHQQKLAAGSTKRGIAPVYGDKMFRNGIRMVDLLEPNIFHEKLNKSFIFATNLLSAISSSDFDLDFDSVYNDYLKMGKLLSPYISDISLELYNAYNNNKTILFEGAQGISLDVDHGVYPYTTSSNTIAGSISTGTGVSYRDIHRIIGVTKAYLSRVGEGPLPSEVHGEEAIQLREKGGEYGTTTGRPRRVGWLDLVQVRQAVRVNGLTEIALT

SEQ ID NO: 196857 - protein, 321 aa, Unknown
  Bacterial polypetide isolated from the Sargasso Sea
MPYHKMLDLALTNHQQNLAAGSTKRGIAPVYGDKMFRNGIRMVDLLEPNIFHEKLNKSLIFATNLLSAISSSDFDLDFDSVYNDYLKMGKLLSPYISDISLELYNAYNNNKTILFEGAQGISLDVDHGVYPYTTSSNTIAGSISTGTGVSYRDIHRIIGVTKAYLSRVGEGPLPSEVHGEEAIQLREKGGEYGTTTGRPRRVGWLDLVQVRQAVRVNGLTEIALTKLDILSNTKELSVCTEYDINGAKESEIPASLHKLRSAKPIYKQLPGWGDITSSMLKDGYDSLPNELKSYVQFIENQVNCKVSIISVGPERHQTIIR

SEQ ID NO: 196858 - protein, 205 aa, Unknown
  Bacterial polypetide isolated from the Sargasso Sea
MLDIDFGTYPYVTSSNTISGQIFSGTGFSYKNDHKILGITKAYTTRVGSGPFPTELMDEIGEHLGEKGQEFGTVTKRKRRCGWFDSVLLKQSIKLNGITDIVLTKLDVLDELKEINVCTGYLIDNKHYDYLPSEEFLFDKIKPIYKKVAGWEKSTGGINKFDDLPKNAKKYIKILEDLMETNISIVSTGPDRKETIDINGTLSNI

SEQ ID NO: 196859 - protein, 226 aa, Unknown
  Bacterial polypetide isolated from the Sargasso Sea
WKKLDEFKSKGKKILFEGAQGILLDVDHGTYPFVTSSNTVASSAATGSGCGVDTINYVLGITKAYTTRVGEGPFPTELKDKIGDILGSRGKEFGTVTSRKRRCGWFDGVLVRQTIKISGINGIALTKLDVLDELDEIKICIGYELKGKKIDYLPAAVEDQLKVKPIYKNFSGWKTSTKGIKSFNDLPQNAQKYIKGLEKFIETKVASISTSPERKDTILIENPFLI

SEQ ID NO: 196860 - protein, 92 aa, Unknown
  Bacterial polypetide isolated from the Sargasso Sea
MFYTIVGTQWGDEGKGKIVDWISSKADLIVRYQGGNNAGHTIKVDNNIYKLNLLPSGIINNKKCAIGNGVVLDPWALINEIDNLKEPRNRSK

SEQ ID NO: 196861 - protein, 427 aa, Unknown
  Bacterial polypetide isolated from the Sargasso Sea
MTKTISLLGLQWGDEGKGKVVDHLAKDLDAAIRYQGGHNAGHTLIVDGKKVVFHLLPSAICHEDIHCFIGRGVVVSLDALFEEIEEAQDVIGNIKDRLTISSACSLIQPYHIKLDQLREGSKQLTKIGTTGRGIGTAYEDRVGRRSIRVTDLYDENKLKEKLQESLEFYNSIFKHSFNAEGIDLNELFEKNLKQGEKLKPYIGSVIEEIRDLQEADKKILFEGAQGALLDVSLGTYPYVTSSNSSVGGIASGIGISPTNIDYSLGIAKAYTTRVGEGPFPTELFDDIGTFLAEKGGEVGATTGRPRRCGWLDAFLLSHTVKLNGIDGLCITKIDVLDGLETIKVCTDYSSNISKGEILETLALEDVEPIYTELKGWEEPTAGKQSFEELNDRAKEFILNIEDLCKVPVIMISTGPKREDTIIRKYPL

SEQ ID NO: 196862 - protein, 393 aa, Unknown
  Bacterial polypetide isolated from the Sargasso Sea
MIKKSKNSIFIGAQWGDEGKGRIVDLVSKDYDIVTRFQGGSNAGHTIIIKNKKIVLHHIPSGVLRKGKVSVIGNGTVIDLSTLIKEIKGLRKSGFKITGKNLKISSLAHIIAPYHKLIDQQREVLKGNQAIGTTGRGIGPAYEDKVSRQGIRIIDLEDKVLLEKKVKQILKEKNKIISKIFNKKGFNSNSIVTELRKNYLYIKEFIEDTGKFLNKSIEKDKKILFEGAQGVMLDLDFGTYPFVTSSSTIASNASAGSGVAFSKLGEVIGISKAYTTRVGHGPFPTEMIDDQGLTLREFGVEYGATTGRPRRCGWLDLVALKHATAISGIKSLVLTKVDILSIFKKIKVCTGYKLDNKKLSYYPLKIEDLSKIKPIYKEFPSWSIEDLSKNKNS

SEQ ID NO: 196863 - protein, 273 aa, Unknown
  Bacterial polypetide isolated from the Sargasso Sea
MNLNISLLGLQWGDEGKGKVVDNLANDLDAAVRYQGGHNAGHTLIVNGKKIVFHLLPSAICHENIKCFIARGVVVSLDALFSELAEANEVLGDIEDRLIISSACSLIQPYHIKLDQLREQSANLTKIGTTGRGIGTSYEDKVGRRSVRISDLYDEKKLNDKLIQALDFYNSIFDHSFGTSKIDLNELVDLNLKQAEQLKPYVGNVIQEIRELQKSKKKILYEGAQGALLDVSLGTYPFVTSSNLIGGVPAGAGISPSDIDYTIGITKAYTTRV

SEQ ID NO: 196864 - protein, 240 aa, Unknown
  Bacterial polypetide isolated from the Sargasso Sea
LARGEQVLLEGAQGAMLDIDQGTYPFVTSSITCRANATHGAGIHPGHIDQCYGITKAYTTRVGNGPFPTELSLEDGPGKQMSVVGHEFGTTTGRPRRTGWLDAVALNESQRLNGYTGLVVTKLDVLGGLEELKICTSYNLDGNEITHVPSSSEELARCTPVYESHPGFPALDEDRWIEMAEESRKGGGIASLPSSIRSYLSRIEEITGVPVVSVGVGPDRLASVASSDGPFDVEMSEATF

SEQ ID NO: 196865 - protein, 247 aa, Unknown
  Bacterial polypetide isolated from the Sargasso Sea
MKNVVVVGSQWGDEGKGKIVDWLSSKADVVVRFQGGHNAGHTLVIDGVTYKLRLLPSGIVRKNKVSIIGNGVVVDPWALLDEIKEIRSKGVIVDESNLILSESANLILPFHKEMDEIREDAAGKAKIGTTRRGIGPAYEDKIGRRSIRVMDLVSENNLDHRLETVLIHHNAIRKGLGKKIFKKDQLKKDLLEIAPEILKFSQPVWKKIDEYKLKGKKILFEGAQGILLDVDHGTYPFVTSSNTVASS

SEQ ID NO: 196866 - protein, 345 aa, Unknown
  Bacterial polypetide isolated from the Sargasso Sea
ISQGLKISSTSHVTMPYHRILDEAMEADRGSNKIGTTGRGIGPTYADKSQRNGIRVRDLLNRERLNDVIEIPLREKNGLLEKIYGIKPLKVEDIVKEYLDYGQRLSKHVVDCTRTIHTASKNKKNILFEGAQGTLLDLDHGTYPFVTSSNPISGGACIGAGVGPTLIDRVIGVAKAYTTRVGEGPFPTELQGSINDQLCDRGSEFGTTTGRRRRCGWFDGVIGKYAVSVNGLDCLAVTKLDVLDELDEIRVCIAYDLDGEKIDYFPTNSDDLKKCKPIFKKLKGWQCSTADCRKLSDLPENAMNYLRFLAELMEVPIAIVSLGANRDQTIVIEDPIHGPKRALLR

SEQ ID NO: 196867 - protein, 430 aa, Unknown
  Bacterial polypetide isolated from the Sargasso Sea
MNNVVVVGSQWGDEGKGKIVDWLSSEADVVVRFQGGHNAGHTLVIDGVTYKLRLLPSGIVRKNKISIIGNGVVVDPWALLDEIEEAKSKAVEINENNLILSEAATLILPFHREMDEIREDSAGKSKIGTTRRGIGPAYEDKVGRRSIRVMDLASKKNLENRLAVVLEHHNAIRKGLGKPIYEKDKLVEDLLKIAPNILKYSAPVWRKIDQFKLENKKILFEGAQGILLDVDHGTYPYVTSSNTVAASAATGSGCGPNSINYVLGITKAYTTRVGEGPFPTELTDDIGNHLGEKGNEFGTVTSRKRRCGWFDGVLVRQTIKISGINGIALTKLDVLDELDEINLCVAYELNGKEIDYFPAAVEDQLNVKPVYKTFKGWKSKTQGIKKFDDLPINAKIYVKAIEEFIETKISSISTSPEREDTILLVDPFNY

SEQ ID NO: 196868 - protein, 361 aa, Unknown
  Bacterial polypetide isolated from the Sargasso Sea
GVVLSPDALMKEMTMLEERGVPVRERLKISEACPLILPYHIALDVAREKARGAKAIGTTGRGIGPAYEDKVARRGLRVGDLFNAEDFAAKLKEVLDVHNFTLTQYYGEEAVDFDETLKGAMEVADILKAMVVDVTDELDKAHNAGLPIMFEGAQGTLLDIDHGTYPYVTSSNTTVGGVATGAGFGPLKLDYVLGIVKAYTTRVGSGPFPTELECEVGQHLGVKGHEFGATTGRKRRTGWFDAVAMKRAVQINSITGFCLTKLDVLDGLESLQICVGYKDADGNVKDVPPMAADGYEKVTPVYEEMPGWTDNTFGVTEFEALPQAAKNYIKRLEELTGVPVDIVSTGPDRNETIVLRSPYDA

SEQ ID NO: 196869 - protein, 223 aa, Unknown
  Bacterial polypetide isolated from the Sargasso Sea
KKNILFEGAQGTLLDWDHGTYPYVTSSNPISGGACIGAGVGPTLIDRVIGVAKAYTTRVGEGPFPTELQGSINDQLCDRGSEFGTTTGRRRRCGWFDGIIGKYAVYVNGLDCLAVTKLDVLDELDEIQVCIAYELDGKEIDYFPTNSDDLKKCKPIFKKLKGWQCSTANCRKLSDLPENAMNYLRFLAELMEVPIAIVSLGANRDQTIVIEDPIHGPKRALLR

SEQ ID NO: 196870 - protein, 258 aa, Unknown
  Bacterial polypetide isolated from the Sargasso Sea
MKNVVVVGSQWGDEGKGKIVDWLSSEADVVVRFQGGHNAGHTLVIDGVTYKLRLLPSGIVRKNKISIIGNGVVVDPWALLDEIKEIKSKGVNVDEKNLILSESANLILPFHKEMDEIREDAAGKAKIGTTRRGIGPAYEDKIGRRSIRVMDLVSESNLDHRLETVLIHHNAIRKGLGKKIFKKDQLKKDLLKIAPEILKFSQPVWKKIDEYKSKGKKILFEGAQGILLDVDHGTYPFVTSSNTVASSAATGTGCGPIQ

SEQ ID NO: 196871 - protein, 175 aa, Unknown
  Bacterial polypetide isolated from the Sargasso Sea
MWSNTINYVLGITKAYTTRVGEGPFPTELTDKIGEQLGTRGKEFGTVTSRKRRCGWFDGVLVRQTIKISGINGIALTKLDVLDELDEIKMCIAYEINGKKIDYLPAAVDDQLKVKPVYKSFKGWKSSTQGIKDFDKLPESAKVYVKELERFIEAKISSISTSPERKDTILIENPF

SEQ ID NO: 196872 - protein, 354 aa, Unknown
  Bacterial polypetide isolated from the Sargasso Sea
WALLDEVKEIKEKGVEVNSENFMISESANLILPFHREMDEIREDAAGKGKIGTTRRGIGPAYEDKVGRRSIRVMDLRSEQNLDQRLQTVLLHHNAIRKGLGKKIFKKDKLKKDLLEIAPEILKYSKPVWLKINQFKRQKKKILFEGAQGVLLDVDHGTYPFVTSSNTVASSAATGTGCGPNSINYVLGITKAYTTRVGEGPFPTELLDEIGELLGTRGKEFGTVTSRKRRCGWFDGVLVRQTIKVSGIDGVALTKLDVLDELDEIKMCVEYELNGKKMDYLPAAVEDQLKIKPIYKTFDGWKSSTNGIKNINDLPENAKKYIFAIEDFIGAKISSISTSPERDDTILVENPFEI

SEQ ID NO: 196873 - protein, 177 aa, Unknown
  Bacterial polypetide isolated from the Sargasso Sea
MSLDVGTITVIVGAQWGDEGKGKITDFFAGSSNYVVRYHGGNNAGHTVIVNDNKYKLHLIPSGVLYPDPISVIGNGVVIDPRALLDEIAYLIDKDVTPNLMISDRAHVIMPYHKLLDGALTNHQDNLAAGSTKRGIAPVYGDKMFRNGIRIVDLLEKDILYEKLIKSFEFANNLYHA

SEQ ID NO: 196874 - protein, 158 aa, Unknown
  Bacterial polypetide isolated from the Sargasso Sea
RVGSGPFPTELHDKYGEHLGSVGVEFGATTGRPRRCGWLDVVALRRSVLNSSISGFCLTKLDVLDGLEKIKICTEYKLHDKTISNFPLEISELDNCEPLYEEFGGWEDSTKGLKRFSDMPLNAKKYIQAIEEMLHLPIDIISTGPDRDHTIIRNNPFS

SEQ ID NO: 196875 - protein, 406 aa, Unknown
  Bacterial polypetide isolated from the Sargasso Sea
MSNNTLILGLQWGDEGKGKIVDALSESIYAVCRFQGGHNAGHTIKVDGVQTVLHLIPSGVLHKNVKCLIGNGVVLSLEAIKKEIEGLEEFGVEIRDRLYISENCPLILPSHIKIDQVRDKDEFIGTTGRGIGPAYEDKVGRRAIRFGDLKDETLLRKKVSRLIKIHNKLLEHFYDAEPFSEEEILNNLLSFKNFAEAFSVNTTDLLMNWSEEGKEVLFEGAQGTFLDIDHGTYPYVTSSSTTIGGVSSGLGIGPKHINNIIGIVKAYATRVGEGPFITELFDEDGEEIAKRGNEFGATTGRPRRCGWLDLVALKKAIFINSVDSLCMTKADVLDTLKNISVCVAYDDNNLPIYKRFEGWQEDTSQCTSYNELPKKLKDYVKFIEETVNCKVSIISVGPSREQSIHL

SEQ ID NO: 196876 - protein, 97 aa, Unknown
  Bacterial polypetide isolated from the Sargasso Sea
MANVVVIGAQWGDEGKGKITDLLSRSADVVVRYQGGVNAGHTIVVDDKVLKLHLIPSGILYKNTSCLIGSGTVVDPKILLKEIDMLIDNGIDISGLK

SEQ ID NO: 196877 - protein, 151 aa, Unknown
  Bacterial polypetide isolated from the Sargasso Sea
MLKIAPKILEFSQPVWLKIDQFKKQKKKILFEGAQGILLDVDHGTYPFVTSSNTVASSAATGTGCGPNSINYVLGITKAYTTRVGEGPFPTELTDNVGELLGTRGKEFGTVTSRKRRCGWFDGVLVRQTIKVSGIDGIALTKLDVLDELDE

SEQ ID NO: 196878 - protein, 385 aa, Unknown
  Bacterial polypetide isolated from the Sargasso Sea
HLIPSGILYPDTICMIGSGTVVDPKVMLGELDMLIANDIDISGLQLASTAHVTMPYHRLLDLAMEKQRGDRRIGTTGRGIGPTYADKSQRSGIRVIDLLDEARLRERLEGPLQEKNQLLETIYGVEPLDAESVIKEYLGYGKRLAPHVVECTQAIHQAARARKNILFEGAQGTLLDLDHGTYPYVTSSNPVSGGACIGAGVGPTLIDRVIGVAKAYTTRVGEGPFPTELSGRLNDQLTERGGEFGTTTGRRRRCGWFDGVIGRYAVQVNGLDCLAVTKLDVLDELDAIQVCVAYELDGERIEHFPSSAEDFARCNPIFETLPGWQCSTEDCRKLEDLPDAAMAYLRFLADLMEVPIAIVSLGASRDQTIVVEDPIHGPKRALLSA

SEQ ID NO: 196879 - protein, 147 aa, Unknown
  Bacterial polypetide isolated from the Sargasso Sea
MFYTIVGTQWGDEGKGKIVDWISSKADLIVRYQGGNNAGHTIKVDNKIYKLNLLPSGIINNKKCAIGNGVVLDPWALVNEINNLKDQNILVDKNNLLIADNICLILPIHKMIDEINELSRGSKELGTTKKGIGPAYEDKVGRRAIRL

SEQ ID NO: 196880 - protein, 297 aa, Unknown
  Bacterial polypetide isolated from the Sargasso Sea
MKNVVVVGSQWGDEGKGKIVDWLSDQADIVIRFQGGHNAGHTLVIDGVTYKLRLLPSGIVRKGKISIIGNGVVVDPWALLEEIKEIKSKGVDVNEDNFIISESANLILPFHREMDEIREDAAGKGKIGTTRRGIGPAYEDKVGRRSIRVMDLKSEKNLDHRLETVLLHHNAIRKGLGKKIYEKNELKKDLLKIAPEILKFSKPVWLKIDEYKKKKKKILFEGAQGILLDVDHGTYPFVTSSNTVAASAATGSGCGPNSIHYVLGITKAYTTRVGEGPFPTELKDKIGELLGTRGKEL

SEQ ID NO: 196881 - protein, 427 aa, Unknown
  Bacterial polypetide isolated from the Sargasso Sea
MKNVAVVGSQWGDEGKGKIVDWLSSQADVVIRFQGGHNAGHTLVIDGVTYKLRLLPSGIVRKNKISIIGNGVVVDPWALLDEIQEIKSKGVDVNQKNLIISEAANLILPFHREMDEIREDAAGKAKIGTTRRGIGPAYEDKVGRRSIRVMDLISEQNLTHRLETVLTHHNAIRKGFGKEIYKKENLMKDLLKIAPEILKYSQPVWKKIDEFKSQGKKILFEGAQGILLDVDHGTYPFVTSSNTVAAAAATGSGCGPNSINYVLGITKAYTTRVGAGPFPTELTDKIGEELGTRGKEFGTVTSRKRRCGWFDGVLVRQTIKISGIDGIALTKLDVLDELEEIKMCIAYELDGKKIDYLPASIDDQLKVKPVYKIFEGWKSSTSGIKKFDNLPDNAKNYINELEKFIESKISSISTSPERNDTILIEDP

SEQ ID NO: 196882 - protein, 149 aa, Unknown
  Bacterial polypetide isolated from the Sargasso Sea
LDQTGEFLRSEGQEFGATTGRPRRCGWFDAVLVRYAVRLNGITSLALTKLDVLDKFETLKLCFGYRMKDGSIQTDFPFEGHDEVEPVYEELPGWNTKTAGITEYDQLPKNLLDYLARIEELVEAPASIISTGPKREDTIVLQPDRFWKS

SEQ ID NO: 196883 - protein, 431 aa, Unknown
  Bacterial polypetide isolated from the Sargasso Sea
MANVVVVGSQWGDEGKGKIVDWLSSRADVVVRFQGGHNAGHTLVIDGKTYKLSLFPSGIVREDKVSIIGNGVVVDPWAFAEELKILINQDVEINSKNLKIAENASLILPVHKNLDILREHRSSNDSKIGTTKRGIGPAYEDKVGRRSVRVGDLRDLKALKLKVNNLVDHHNIILRGMNEEEINPDTIYDDLIEVSEIIKPFISRTQEFLIRARKDRKRILYEGAQGALLDIDHGTYPYVTSSNTIASAAATGSGQGVKSINYVLGITKAYTTRVGEGPFPSEQDNDVGNELGEKGHEFGTVTGRKRRCGWFDAVLVKHAIEVSGIDGMALTKLDVLDGFEKINICTAYELDGKKIDYFPSSSEEQSRIKPIFEEFDGWDTTTFGARLWNDLPAEAVKYVKRIEELTGTPVALLSTSPEREDTILVKDPFED

SEQ ID NO: 196884 - protein, 448 aa, Unknown
  Bacterial polypetide isolated from the Sargasso Sea
MSASAVNVNPGRNVVVVGTQWGDEGKGKIVDWLTDHAQGVVRFQGGHNAGHTLIIGGKKTILRLIPSGIMHPGVACYIGNGVVLSPEALFKEIGELEAAGVDVQNRLFISEATTLILPYHIAIDQGREARRGAGKIGTTGRGIGPAYEDKVARRGLRVQDLFEPESFAERLRENLDYHNFVLTKYLGVAAVDFQQTLDTMLSYADRLKPMVTDVSRRLYDENAAGNNLLFEGAQGTLLDIDHGTYPFVTSSNCVAGAATAGAGVGPQKLNYILGITKAYCTRVGSGPFPSELYDADNAARQEAIGLELATVGKEFGSVTGRPRRTGWLDAAALRRSIQINGVSGLCMTKLDVLDGLDEVKLCVGYTVDGKPVDLLPRGASEVARCVPVYETFPGWKESTVGITQWDKLPASARAYLTRVQEVAGIPIDMVSTGPDRDETILLRHPFKV

SEQ ID NO: 196885 - protein, 429 aa, Unknown
  Bacterial polypetide isolated from the Sargasso Sea
MRNVIVIGTQWGDEGKGKIVDWLSSEADVVVRFQGGHNAGHTLVIDGVTFKLRLLPSGTVRKNKVSVIGNGVVVDPWALIDEIKEMKSKGIEINKDNLILSEAANLILPYHKEMDEIREDSAGKAKIGTTRRGIGPAYEDKVGRRSIRVMDLMSESNLDTRLEAALIHHNALRKGLKKKVFRKDKLKKDLLKIAPEILKFSQPVWKKLNEFKAKGKKILFEGAQGILLDVDHGTYPFVTSSNTVASAAATGSGFGSSNASYILGITKAYTTRVGEGPFPTEQKNKIGNLLGSRGKEFGTVTSRKRRCGWFDGVLVRQTIKISGINGIALTKLDVLDELDEIKMCVAYKLNGKQYDYLPAGAEDQFKIEPIYETFPGWKESTRGIRNIENLPDKAKKYIYALEDFIEAKISSISTSPEREDTILVESPFA

SEQ ID NO: 196886 - protein, 253 aa, Unknown
  Bacterial polypetide isolated from the Sargasso Sea
MVSDNTLILGLQWGDEGKGKIVDNLSKSIDVVCRFQGGHNAGHTIKVNGQKTVLHLIPSGILHDNTKCLIGNGVVLALDALHKEIKHLEEKKISFQDRFFISSACALILPTHITLDIVKDKKESIGTTGRGIGPAYEDKIGRRAIRLGDLNDLKSLKDKIYSLVEYHNRLLENIYQHKPHNAEEVFNHIVKFKDLHDKYCVDSQETMHKWIKNDETILFEGAQGTLLDIDHGTYPYVTSSSTTAGGVSTGLGI

SEQ ID NO: 196887 - protein, 355 aa, Unknown
  Bacterial polypetide isolated from the Sargasso Sea
MTGVVVVGSQWGDEGKGKIVDWLSSQADLVIRFQGGHNAGHTLVINNETYKLNILPSGILREDKISIIGNGVVLDLSALKKEITSLVDRGVKISPHNLFISDRATIILPIHQKLDAIRENNNLIKIGTTKRGIGPAYEDKVGRRAIRLCDLFDKEKLITKIDVLLNHHNAIMRGLGNEEYKAVDILDEIYELGQFARPFAKTINEILGTIKDNNEKILFEGAQGFLLDIDHGTYPFVTSSNVHASYASIGSGLSPKVVNHVLAITKAYTTRVGNGPFPTEQDNEVGNKLGEIGHEFGTVTNRKRRCGWFDAVLVRQALTQSGATGIALTKIDVLDHFEEIQMCIGYKLNGEDIDF

SEQ ID NO: 196888 - protein, 357 aa, Unknown
  Bacterial polypetide isolated from the Sargasso Sea
MSIHAVLGGQWGDEGKGKIVDYLAKDFSIIARFSGGNNAGHTVINEFGEFKFHLIPSGVCWPHVENIIGNGVVVDPNVLIEEISKLKDLGLTDTKIKVSEKCHLVMPYHILIDNLDEERKGSFQIGTTRRGIGPAYVDKVSREGIRIESLLDIKDFQDQLARVLKIKNEILSKVYDQRPLELKPIMEKVKFWASFLKPYIYDTESYISESIQNNKKILLEGAQGTLLDLDHGTYPYVTSSNPTIGGALTGLGLGPKNISEILGVFKSYCTRVGSGPFPTELKGALGEKIRTQGQEFGTTTGRPRRCGWFDAVIARYSTRINNLDSIILTRLDILDGFEKIKICVGYELETNQIVDFP

SEQ ID NO: 196889 - protein, 209 aa, Unknown
  Bacterial polypetide isolated from the Sargasso Sea
GAQGILLDVDHGTYPFVTSSNTVASSAATGTGCGPNSINYVLGITKAYTTRVGEGPFPTELQNDIGELLGKKGKEFGTVTSRKRRCGWFDGVLVRQTIKISGINGIALTKLDVLDELNEIKMCVEYELDGKKIDYLPASVEDQLKIKPIYKTFPGWKKSTNGIKNINELPQEARDYIYAIEDFIEAKISSISTSPEREDTILIENPFEI

SEQ ID NO: 196890 - protein, 199 aa, Unknown
  Bacterial polypetide isolated from the Sargasso Sea
MPDNSSKVTAIVGAQWGDEGKGKITDFFAGEADFVVRFHGGNNAGHTVIVDGDTYKLHLIPSGVLYEYPTSIIGNGVVIDPAALINEINYLKDKGVNPKLKISDRAHVIMPYHIEMDIALTKHQGKLAAGSTKRGIAPVYGDKMYRHGIRMIDLTEPDVFSEKIDKAYSFNQTVIEAFGHSIEQNKKSIYEQYIEYGKY

SEQ ID NO: 196891 - protein, 476 aa, Unknown
  Bacterial polypetide isolated from the Sargasso Sea
MTFIIASQRNGQPIITSKAFKHLSPCSATVPARVVLGAQWGDEGKGKAIDQLAPNSQWAVRFQGGNNAGHTIVAGGTTLKMHLLPSGITARDCNLVLGCGMVVDPWVLDTELSEWAELTGESPEGKRLFISERAAVILPFHRLYDSADELVGTTGRGIGPAYRDRTERVGLRFVDIGLILGRDSEIAEISERMNAQLSTVGIEEKIEPEQLKSDLSWIHQRFSEAIRATGPMLDKALARGEKVLLEGAQGAMLDIDQGTYPFVTSSITCRANATHGAGIHPGHIDQCYGITKAYTTRVGNGPFPTELSLEDGPGKKMSVVGHEFGTTTGRPRRTGWLDAVALNESQRLNGYTGLVVTKLDVLGGLEELRICTSYNLDGNEIDHVPSSSEELARCTPVYESHPGFPALDEEEWIEMAEESRKGGGIGSLPSPIRSYLSRIEEITGVPVVSVGVGPDRLASVASAGGPFDVEMSEATF

SEQ ID NO: 196892 - protein, 263 aa, Unknown
  Bacterial polypetide isolated from the Sargasso Sea
HHNFIRKGMGKQIFNKDLLKKDLLKIAPHILKFVQPVWKKIDEFKVQGKKILFEGAQGILLDVDHGTYPYVTSSNTVASSAATGSGCGPNSVNYVLGITKAYTTRVGEGPFPTELKNEIGEHLGSVGKEFGTVTSRKRRCGWLDAVLVRQSIKISGINGIALTKLDVLDQLDEIKMCVAYDLDGKKIDYLPATLEDQIKIKPIYKIFEGWKTSTKGIKDFKNLPENAKNYLSEVEKFIGIKISSISTGPERNETILIEDPFDI

SEQ ID NO: 196893 - protein, 363 aa, Unknown
  Bacterial polypetide isolated from the Sargasso Sea
TIKVNGEKTVLLLIPSGILHNNAKCLIGNGVVLALDALDKEIKELKDKGIDFKDRFFVSSACALILPTHISIDKVRDKQESIGTTGRGIGPAYEDKIGRRAIRFGDIGDHQLLKEKVALLIGYHNRILKDLYQQEIYNVDEVFEEIIKYKYLYDEFCVDSQDLIYDWVEDKKSILFEGAQGTLLDIDHGTYPYVTSSSTTAGGVSTGLGIGPKYIDKIIGISKAYTTRVGEGPFITELFDEDGSLLAKRGNEFGATTGRPRRCGWLDLVALKKAIFTNSVTDLCITKLDVLDETKVIRACVEYKNNEPVYKEFDGWLCSTEGITEYSELPDRAKMYIEYIEEYISCSASIISTGPSRDQTISK

SEQ ID NO: 196894 - protein, 171 aa, Unknown
  Bacterial polypetide isolated from the Sargasso Sea
NILGITKAYTTRVGSGPFVTELNDQIGDHLVEKGQEYGTVTKRKRRCGWFDSVLVRQSIAINGISDVVLTKLDVLDDIKEIKVCVGYKDDTTIYNYMPFDENIQKKLIPIYETIPGWQTSTFGLTKWNDLPKKTQDYIKFLELKIEKKISIISTGPDRIHTIDINNLLSKN

SEQ ID NO: 196895 - protein, 232 aa, Unknown
  Bacterial polypetide isolated from the Sargasso Sea
DLVVDSSKELNNLKLKQSNILFEGAQGSMLDIDQGTYPFVTSSSTLSGASSLGSGIGPLDIDGVLGITKAYATRVGSGPFPTEIDDDYGKHMAKVGVEFGATTGRPRRCGWLDLVALRKAVNINSISQLCITKIDVLDGLDKILVAEEYEIDEKIYDTLPAMSQNRFERISPKYKEYKGWSEITSGLQSFDQLPTEAKTLIKGIEDSIGVPVSLISTGPDRNDMIVIDQIFS

SEQ ID NO: 196896 - protein, 401 aa, Unknown
  Bacterial polypetide isolated from the Sargasso Sea
MKNVAVVGSQWGDEGKGKIVDWLSSEADVVVRFQGGHNAGHTLVIDGITYKLRLLPSGIVRKNKISIIGNGVVVDPWALLDEIKEIKSKGVEISEENLILSESANLILPFHKEMDEIREDAAGKAKIGTTRRGIGPAYEDKVGRRSIRVMDLISEKNLDHRLETVLMHHNAIRKGLGKELFEKNKLKKELLEIAPQILKFSKPVWKKIDEFKNEGKKILFEGAQGILLDVDHGTYPFVTSSNTVASSAATGSGCGPNTIGYVLGITKAYTTRVGEGPFPTELKNETGEHLGKIGKEFGTVTSRKRRCGWFDGVLVRQTIKVSGINGIALTKLDVLDELEEIKMCVAYELDGKKVDYLPAAVDDQLKVKPIYKSFKGWKSSTKGIKNFEKLPEKAKIYIKGA

SEQ ID NO: 196897 - protein, 230 aa, Unknown
  Bacterial polypetide isolated from the Sargasso Sea
MKNVVVVGSQWGDEGKGKIVDWLSSEADVIVRFQGGHNAGHTLVIDGVVYKLRLLPSGIVRKNKVSIIGNGVVVDPWALLDEIDEIKSKSVEVNSDNLILSEAATLILPFHKEMDEIREDAAGKSKIGTTRRGIGPAYEDKIGRRSIRVMDLASESNLDKRLDVVLGHHNAIRKGLGKTEFKKEQLKKDLLNIAPQILKFSQPVWKKIDEFKYQKKKILFEGAQGVLLDV

SEQ ID NO: 196898 - protein, 128 aa, Unknown
  Bacterial polypetide isolated from the Sargasso Sea
TELFDVNGEMIAKKGNEFGATTGRPRRCGWLDLVALKKAIFTNSVTDLCITKLDVLDEMKEIFICVEYQKNKPIYKKFNGWLSSTEGITEYSNLPKEAKDYIEFIEDYIECKASIISTGPSRDQTIYK

SEQ ID NO: 196899 - protein, 279 aa, Unknown
  Bacterial polypetide isolated from the Sargasso Sea
FEKDLFKSKLTSLTAYHNFLLEELYESDGTDFEDTHKEWMGHFSKIKDLVVDSSKELNNLKLKQSNILFEGAQGSMLDIDQGTYPFVTSSSTLSGASSLGSGIGPLDIDGVLGITKAYVTRVGSGPFPTEIDDDYGKHMAKIGVEFGATTGRPRRCGWLDLVALRKAVNINSISQLCITKIDVLDGLDKILVAEEYEIDEKIYDTLPAMSQNRFERISPIYKEYKGWSGITSGLKSFDQLPTEAKILIKGIEDSIGVPVSLISTGPDRNDMIVIDQIFS

SEQ ID NO: 196900 - protein, 430 aa, Unknown
  Bacterial polypetide isolated from the Sargasso Sea
MKNVAVVGSQWGDEGKGKIVDWLSEQADVVIRFQGGHNAGHTLVIDGVTYKLRLLPSGIVRKNKISIIGNGVVVDPWALLDEIKEIGEKGVDVNSENFMISEAANLILPFHREMDEIREDAAGKSKIGTTRRGIGPAYEDKVGRRSIRVMDLRSEKNLNQRLETVLLHHNAIRKGLGKKVYEKNQLKEDLLKIAPDILKFSAPVWLKIDQFKKQKKKILFEGAQGILLDVDHGTYPFVTSSNTVASSAATGTGCGPNSINYVLGITKAYTTRVGEGPFPTELVDGIGELLGTRGKEFGTVTSRKRRCGWFDGVLVRQTIKVSGIDGIALTKLDVLDELDEIKMCVEYDLNGKKIDYLPAAVEDQLKIKPIYKTFDGWKTPTNGIKNIDDLPYNAKKYVFAIEDFIGAKISSISTSPERDDTILVENPFEI

SEQ ID NO: 196901 - protein, 406 aa, Unknown
  Bacterial polypetide isolated from the Sargasso Sea
MSNNTLILGLQWGDEGKGKIVDALSKSVYAVCRFQGGHNAGHTIKVDGVQTVLHLIPSGVLHKNVKCLIGNGVVLSLEAIKKEIERLEEFGVEIRDRLYISENCPLILPSHIKIDQVRDKDEFIGTTGRGIGPAYEDKVGRRAIRFGDLKDETLLRKKVSRLVKIHNKLLEHFYDAEPFSKEEILNNLLSFKNFAEAFSFNTTDLLMNWSEEGKEVLFEGAQGTFLDIDHGTYPYVTSSSTTIGGVSSGLGIGPKHINNVIGIVKAYATRVGEGPFITELFDKDGEEIAKRGNEFGATTGRPRRCGWLDLVALKKAIFINSVDSLCITKADVLDTFKNINVCVAYDDNNLPIYKKFEGWQEDTSLCSSYDELPKKLKDYIKFIEESVNCKVSIISVGPSREQSIHL

SEQ ID NO: 196902 - protein, 371 aa, Unknown
  Bacterial polypetide isolated from the Sargasso Sea
GILHAGVRCLIGNGVVFEPFAFIKEVELLETRGFSIRERLTVSPAAQLIMPYHALIDSAREEALGGKKIGTTGRGIGPAYEDKVARRGIRVGDLYNLSSFKEKVAVALDFHNFVLTKYFSKDPVDSENIFDSYASIAEDLKPMVADVVPILEKLQDAGDNILLEGAQGSLLDVDLGTYPYVTSSNTTASSAGLGSGLGPKDIDYVLGIAKAYTTRVGEGPFPTELMDSTGETIAKKGNEFGATTGRPRRCGWFDAVAMKRAVKLSSVTGVCLTKIDVLDDLEVVKICVDYEHEYKRELFDFSSASLAGVTPKYIEMPGWQESTSGLTEYDQLPEAARNYVKELEKQIGVPISMISTGPDREETIILANPFG

SEQ ID NO: 196903 - protein, 285 aa, Unknown
  Bacterial polypetide isolated from the Sargasso Sea
MKIDLILGLQWGDEGKGKIVDFLTNDYNIIARFQGGPNAGHTLEFDGIKHVLHTIPSGIFHENKINVIGNGVVIDPVIFKEEIEKLKELNVDLSKKLLISRKAHLILPTHRLIDKASELSKGKKKIGSTLKGIGPTYMDKTGRNGLRIGDLELDGWEEKLNTLTNKHLNLINNFNVDIDFDINKLVEEFTNSINFIKSLRFIDSEHYLNESINNGKKILGEGAQGSLLDIDFGTYPYVTSSNTTAAGACTGLGIAPNKINNVFGIFKAYTTRVGSGPFPTELRDE

SEQ ID NO: 196904 - protein, 398 aa, Unknown
  Bacterial polypetide isolated from the Sargasso Sea
MVAKSLVVIGAQWGDEGKGKIIDILTEKADLVVRFQGGHNAGHTLVIDGEKTVLHLIPSGIFNDAKCLIGNGVVLHLPTIIKEIEYLESKGIDVQSKLMISSQCPLILPSHIAIDEAREKSLGKNAIGTTGRGIGPVYEDKVARRAVHVMDLFEEDLFRSKLTSLTTYHNFLLEKLYESEGTDLEGTYKDWMNHFNKIKNLIVDSSEIVNNLKSQGSNILFEGAQGSMLDIDQGTYPFVTSSNTLSGAASLGSGSGPLDIDGVLGITKAYATRVGSGPFPTEIEDDYGKHMAKVGVEFGATTGRPRRCGWLDLVALRKAVNINSISHLCITKIDVLDGLDKILVAEEYKIDDKSYDTLPAMSQKRFDSIVPNYTEYKGWSGTTYGLKSFDQLPVEAQT

SEQ ID NO: 196905 - protein, 187 aa, Unknown
  Bacterial polypetide isolated from the Sargasso Sea
NTVASSAATGSGCGPDTINYVLGITKAYTTRVGEGPFPTELTDNTGEHLGKRGKEFGTVTSRKRRCGWFDGVLVRQTIKISGINGIALTKLDVLDELDEIKMCIAYEIEGKKIDYLPAAVGDQLKVKPIYKKFKGWKSNTKGIKDFNKLPENAKLYIKELEKFVGAKISSISTSPERKDTILIESPF

SEQ ID NO: 196906 - protein, 227 aa, Unknown
  Bacterial polypetide isolated from the Sargasso Sea
VWKKIDQFKSEKKKILFEGAQGILLDVDHGTYPFVTSSNTVASSAATGSGCGPNSIDYVLGITKAYTTRVGAGPFPTELNDDIGEQLANRGKEFGTVTSRKRRCGWFDGVLVKQTIKISGIDGIALTKLDVLDELDEVKMCIAYEINGKQIRHLPAAVNEQFNIKPIYKIFKGWKTSTKGVKKFDELPTNAKSYIKELEKYLETKISSISTSPERNDTILIEDPFKI

SEQ ID NO: 196907 - protein, 327 aa, Unknown
  Bacterial polypetide isolated from the Sargasso Sea
MKNVVVVGSQWGDEGKGKIVDWLSSEADVVIRFQGGHNAGHTLVIDGITYKLRLLPSGIVRKDKISVIGNGVVIDPWALLEEIEEIKSKGVIINKKNLIISESATLILPFHKEMDEIREDAAGNSKIGTTRRGIGPAYEDKVGRRSIRVMDLISETNLNSRLDNVLSHHNAIRKGLNKPLFNKEKLLEDLLNLAPHILQFSQPVWKKIDQFKLSGKKILFEGAQGILLDVDHGTYPYVTSSNTVASSAATGSGCGPNSINYVLGITKAYTTRVGEGPFPTELTDEIGELLGTRGMEFGTVTSRKRRCGWFDGVLVRQTIKISGIDGI

SEQ ID NO: 196908 - protein, 238 aa, Unknown
  Bacterial polypetide isolated from the Sargasso Sea
MKKSLILVGTQWGDEGKGKIVDYFSQKFDAVCRFQGGHNAGHTIYNEEEKFVLHLIPSGVFYDHVSCFIGQGVILSLDSLLEEIEQLESKGVKLEGKLRISRYCSLLLPIHAKIDQLREDKKNAIGTTRRGIGPAYEDKTARRSIKAFDLEDNELLEQKLKNLVDYYNFQIETIHASDTFDYEEVLKNLKESYQKASKYFGDVTDSLEEIYDGGGNILYEGAQGTLLDVDYGTYPYVT

SEQ ID NO: 196909 - protein, 423 aa, Unknown
  Bacterial polypetide isolated from the Sargasso Sea
MKIDLILGLQWGDEGKGKIVDVLTEDYNIIARFQGGPNAGHTLEFDGIKHVLHTIPSGIFHDNKLNIIGNGVVIDPVILKTEIDKLHELDVDLSNKLMISRKAHLILPTHRLIDKASELSKGKKKIGSTLKGIGPTYMDKTGRNGLRVGDLELDGWEEKLNNLIKKHLNLVNNFNVDFDFNIQELTVEFTESIKFLKKIKFIDSEHFLNKSIDEGKKVLGEGAQGSLLDIDFGTYPYVTSSNTTSAGACTGLGIAPNKINKVYGIFKAYTTRVGSGPFPTELFDSTGERMAKIGNEFGATTGRPRRCGWLDLVSLKHSITVNGVTDLIMMKGDVLSGIDKIKVCTKYNYNGEVVDYMPFSIMDENIEPIYDEIDGWEEDITQAKSYNDLPLNFKNYVAFLEDKLNLKIKIVSVGPDRKQTIFV

SEQ ID NO: 196910 - protein, 430 aa, Unknown
  Bacterial polypetide isolated from the Sargasso Sea
MKNVAVVGSQWGDEGKGKIVDWLSSEADIVVRFQGGHNAGHTLVIDGVTYKLRLLPSGIVRKDKVSIIGNGVVVDPWAFLDEIKEIKSKGVEITQKNLILSEAANLILPFHREMDEIREDAAGKAKIGTTRRGIGPAYEDKIGRRSIRVMDLVSEKNLEHRLETVLIHHNAIRKGLGKEIYKKDKLKKDLLSIAPEILKYSQPVWKRIDEFKSQGKKILFEGAQGILLDVDHGTYPFVTSSNTVAAAAATGSGCGPNSINYVLGITKAYTTRVGEGPFPTELKDEIGEKLGSIGKEFGTVTSRKRRCGWFDGVLVRQTIKIAGIDGIALTKLDVLDQLDEIKMCIAYEVDGKKMDYLPAAADDQIKAKPIYKSFKGWNCSTKGIKKFDDLPDNAKNYIKELEKFVETKIASISTSPERNDTILIVDPFSV

SEQ ID NO: 196911 - protein, 432 aa, Unknown
  Bacterial polypetide isolated from the Sargasso Sea
MPNVVVVGAQWGDEGKGRVVDWLAAQADLVARYNGGHNAGHTLVVGGKTYKLALLPSGVVRGKRGVIGNGVALDPEALLAEIGRMAELGLSVTPDNLSIAENATLVLPIHRAIDQAQERLRREPIGTTLRGIGPAYEDKVGRRGLRVGDLAEPGQLAAKLDVLVDHHNAWFRGLGLDEYSRDAMLATLVDLAPRILPFVRPVWADLNDATDRGERILFEGSQAVMLDIDWGTYPFVTSSGTVASAAAAGTGLGASKLGHVLGVTKAYATRVGGGPFLTELSDATGETLRARGQEFGVNTGRPRRCGWLDAAQLRQAVRISGIDSLALTKLDVLDGFESIALCVGYELDGVRVDHLPASLDAQSRAKPVYERFDGWHGTVKGVRERAALPRAAQEFIARVEAVAGAPVSMITTGAERDDTIVLRNPFDAAAEA

SEQ ID NO: 196912 - protein, 103 aa, Unknown
  Bacterial polypetide isolated from the Sargasso Sea
SSTSHVTMPYHRLLDEAMEADRGSNKIGTTGRGIGPTYADKSQRNGIRIRDLLNKERLNDVIEIPLREKNGLLEKIYGIKPLKLEDIVEEYLDYGRKIIKACC

SEQ ID NO: 196913 - protein, 180 aa, Unknown
  Bacterial polypetide isolated from the Sargasso Sea
GTGCGPNSIDYVLGITKAYTTRVGEGPFPTELKNAVGEHLGNIGKEFGTVTSRKRRCGWFDGVLVRQTIKISGINGIALTKLDVLDELEEIKICVAYELDGNQVDYLPAAVDDQLKVKPIYKKFKGWNCSTKGIKNFDKLPENAKIYIKELEKFIETKVSSISTSPERNDTILIEDPFKV

SEQ ID NO: 196914 - protein, 423 aa, Unknown
  Bacterial polypetide isolated from the Sargasso Sea
MTTTIVLGAQWGDEGKGKVTDFFASKADLVVRFQGGNNAGHTIVVDDEKFALSMVPSGVMYDTCTPVIASGCVVDFEVLKKEIDSLNQKNIDTSNLKLSYNAHIIMPYHKVLDELIEESLGDRKIGTTKKGIGPCYGDKIQRKGIRIQDFLSPEKFKSKLQENLNEKNKIIEEIYKGKSLNFDEILSEYETFRELIESLSTDTSLFISNSIKENKNILFEGAQGTLLDIDHGTYPFVTSSNTSAGNASIGSGIGPLNFEKVVGVTKAYISRVGTGPFMTEQSNKIGDYLIEKGAEFGTVTGRRRRCGWLDLVSLKYSARINSLSELFITKLDVLTGLDEVNICVGYKFKDQELTDYPLVEDILEKSTPIYKSFEGWNDDISSITEFNKLPESAQTYINFIEEFTEIPIKYISVGPERKQNIIR

SEQ ID NO: 196915 - protein, 337 aa, Unknown
  Bacterial polypetide isolated from the Sargasso Sea
NWYGVVLALDALDEEIKKLKDKNINFKDRFFISSGCSLILPSHITIDKVRDKKESIGTTGRGIGPAYEDKIGRRAVRFGDIGNESILREKIHLLVNYHNRLLKELHNHEIHNEDEIFNEVIKYKSLYDEFCVDSQDLMHEWIKNKKSILFEGAQGTLLDIDHGTYPYVTSSNTTAGGVSTGLGIGPKFIDKIIGISKAYATRVGEGPFPTELFDKNGEIIAEKGNEFGATTGRPRRCGWLDLVALKKAIFTNSVTDLCITKLDVLDEMQEILVCTEYDNDKPIYTSFKGWLTSTEGIKEYSDFPKEAKKYIEFIEDYIECKASIISIGPSRDQTIYK

SEQ ID NO: 196916 - protein, 387 aa, Unknown
  Bacterial polypetide isolated from the Sargasso Sea
IDGEKTVLHLIPSGILRDNVTCIIGNGVVLSPDALMKEMTMLEERGVPVRERLKISEACPLILPYHIALDVAREKARGAKAIGTTGRGIGPAYEDKVARRGLRVGDLFNAEDFAAKLKEVLDVHNFTLTQYYGEEAVDFDETLKGAMEVADILKAMVVDVTDELDKAHNAGLPIMFEGAQGTLLDIDHGTYPYVTSSNTTVGGVATGAGFGPLKLDYVLGIVKAYTTRVGSGPFPTELECEVGQHLGVKGHEFGATTGRKRRTGWFDAVAMKRAVQINSITGFCLTKLDVLDGLESLQICVGYKDADGNVKDVPPMAADGYEKVTPVYEEMPGWTDNTFGVTEFEALPQAAKNYIKRLEELTGVPVDIVSTGPDRNETIVLRSPYDA

SEQ ID NO: 196917 - protein, 425 aa, Unknown
  Bacterial polypetide isolated from the Sargasso Sea
MKRNISLLGLQWGDEGKGKVVDNLANDLDAAVRYQGGHNAGHTLIVNGKKIVFHLLPSAICHENIKCYIGRGVVVSLEALFSEISEASEVLGNIEERLVISSACSLIQPYHIQLDQLREKSNNLTKIGTTGRGIGTSYEDKVGRRSIRVSDLYDEEKLKDKLTQSLDFYNSVFEHSFNAPKIDLNELFELNLEQAEKLKPYVGNVIKEIRDLQDDGKKILYEGAQGALLDVSLGTYPYVTSSNLIGGVSAGTGISPSDIDYTIGITKAYTTRVGEGPFPTELFDEMGTYLAETGGEVGATTGRPRRCGWLDGFLLKNMVKASGVDGLCLTKIDVLDGLEKIKICTNYESDQSEAELIETMDLEDAKPVYLELDGWDEPTAGQSSFEELNDKAKSFIEKIEEISGVPVIMISTGPKREDTIIRQKI

SEQ ID NO: 196918 - protein, 405 aa, Unknown
  Bacterial polypetide isolated from the Sargasso Sea
MSENTLILGLQWGDEGKGKIVDNLSQSVDVVCRFQGGHNAGHTIKVNDEQTVLHLIPSGILHDNAKCLIGNGVVLALDALDEEIRKLKDKDINFQDRFYISSACSLILPSHISIDKVRDKKESIGTTGRGIGPAYEDKIGRRAVRFGDIGNKYLLKEKIELLVEYHNRLLKELHNHEPHDVNEIFESVIKYKDLYDQFCVDSQDLMYEWVKNKKSILFEGAQGTLLDIDHGTYPYVTSSSTTAGGVSSGLGIGPKFIDKIIGISKAYATRVGEGPFLTELFDENGEMIAKKGNEFGATTGRPRRCGWLDLVALKKAIFTNSVTDLCITKLDVLDEMKEILVCTDYEKNQPIYKKFKGWLSSTEGITEYSDLPKEAKEYIEFIEDYIECNTSIISTGPSRDQTINK

SEQ ID NO: 196919 - protein, 317 aa, Unknown
  Bacterial polypetide isolated from the Sargasso Sea
MSTTVVLGAQWGDEGKGKVTDFFASTADFVVRFQGGNNAGHTIVVGEDKIALSLTPSGVLYPDCVPVIGSGCVIDLGFLKQELKMLEDKNIDTEKLAISPNAHLIMPYHKLLDELIEESLGENKIGTTKKGIGPCYTDKIQRRGIRVQDLLDQEVFEKKVKSNIEETNLTLTKIYEQPPLVAEELIEEFNSYKDIVVNHIKDTSLLIENAIKENKTILFEGAQGTLLDIDHGTYPFVTSSNTSAGNAAIGSGVGPKNIDRIVGVTKAYISRVGSGPFITEQKNEIGDFLIEKGAEFGVVTGRRRRCGWLDLISLKYS

SEQ ID NO: 196920 - protein, 263 aa, Unknown
  Bacterial polypetide isolated from the Sargasso Sea
MSTTIVLGAQWGDEGKGKVTDFFASKADLVVRFQGGNNAGHTIVVGDEKFALSMVPSGVMYESCTPVIGSGCVIDFEVLKNEIEALNGKNIDTTKLKLSYNAHIIMPYHKILDELIEDSLGDKKIGTTRKGIGPCYGDKIQRKGIRIQDFLSEEKFYEKLKNNLEEKNQIIEKIYGGNSINFDEIVEEYKKYKELVSSIADDTSLVISNSIKENKNILFEGAQGTLLDIDHGTYPFVTSSNTSAGNAATGSGIGPLNLMKLLV

SEQ ID NO: 196921 - protein, 301 aa, Unknown
  Bacterial polypetide isolated from the Sargasso Sea
MGEIFISEKAHMIMPYHIKLDQAEEAYRGSEAVGTTGRGIGPAYSDKISRNGIRIGDLKNIETLQSKISKNLNIKNKILKEIYNTDEISEKYIFEKIKEWNNKLSKYIANTEQILYENIEKNKFILLEGAQGALLDIDHGTYPYVTSSNSISGGSLTGLGLGAKDIDNVMGVFKAFTTRVGEGPFPTEIFGKDAETIREIAGEFGTTTGRPRRIGWFDAVAAKYSVKINGLDGMVITKLDILDKFEKIKICTHYEYKGEVLSYFPSDENILSNIKPIYKEFEGWDESTFDVSSYEALNSKA

SEQ ID NO: 196922 - protein, 106 aa, Unknown
  Bacterial polypetide isolated from the Sargasso Sea
MGKNVVVLGTQWGDEGKGKIVDLLTEQAAAVVRYQGGHNAGHTLVIDGEKTVLHLIPSGILREGVECLIGNGVVVAPDALLREITQLEEKGVPVRERLRISPALPV

SEQ ID NO: 196923 - protein, 332 aa, Unknown
  Bacterial polypetide isolated from the Sargasso Sea
MANVVVVGAQWGDEGKGKIVDWLSERADIVVRFQGGHNAGHTLVIDGKTYKLHALPSGVVRGGKLSVIGNGVVLDPWHLIEEIKIVRSQGVDISPENLIIAENTTLILPIHGELDRAREGLNKVAKIGTTGRGIGPAYEDKVGRRAIRIADLADRTTLEARIDRLLLHHNTLRRGMELEAIDKSKLFSDLTEIAPMILKYSAPVWKILNEKRKAGSRILFEGAQGALLDIDFGTYPFVTSSNVIAGQAATGSGLGPNGIDFVLGIVKAYTTRVGEGPFPTELNDNDGTRLGERGNEFGTTTGRKRRCGWFDSVLVRQTCATSRCDWYFSYKT

SEQ ID NO: 196924 - protein, 406 aa, Unknown
  Bacterial polypetide isolated from the Sargasso Sea
MVSENTLILGLQWGDEGKGKIVDNLSESIDIVCRFQGGHNAGHTIKVNGQKTVLHLIPSGILHNNTKCLIGNGVVLALDALYKEIKHLQEKGISFKDRFFISSACALILPTHITLDIVKDKKESIGTTGRGIGPAYEDKIGRRAIRFGDLGNLKSLKEKINSLVKYHNRLLENIYQHKPHDVEEVFNEVVKYKKLHDKYSIDTHKTIHQWIKNDKSILFEGAQGTLLDIDHGTYPYVTSSSTTAGGVSTGLGIGPKFIDKIIGITKAYTTRVGEGPFPTELHDESGSMLAEKGNEFGATTGRPRRCGWLDLVLLKKAIFINSVTDLCITKLDVLDEMQEIKVCIDYENGVPVYKNFEGWLTKTEGVSVFSDLPEKARLYIQFIEDFVECNASIISTGPSRNQTILR

SEQ ID NO: 196925 - protein, 207 aa, Unknown
  Bacterial polypetide isolated from the Sargasso Sea
FRGAQGTALDLDHGTYPFVTSSNTTAGSAATGSGIGPTQITDVIGIVKAYTTRVGEGPLPSSMAPQMDEHVRMLGGEFGATTGRPRRCGWFDSVLTRFASQVNGLTGIAVTKLDVLDTLDEVKIATAYKTADGRTREFFPADTWSLAEVEPVYETMPGWHSSTCDVRRIEDLPRNARAYLDRIEELTNAPVCFVSVGTKRSQIITVD

SEQ ID NO: 196926 - protein, 430 aa, Unknown
  Bacterial polypetide isolated from the Sargasso Sea
MKNIVVVGSQWGDEGKGKIVDWLSEQADVVVRFQGGHNAGHTLVIKGVTYKLRLLPSGIVRKNKISIIGNGVVVDPWALLDEIQEIRSKGVDVNVDNFIISEAANLILPFHIEMDEIREDIAGKGKIGTTRRGIGPAYEDKVGRRSIRVMDLRSENNLDQRLESVLDHHNAIRKGLGKNLVKKDQLKSELLKIAPKILQFSQPVWLKIDEFKKQKKKILFEGAQGILLDVDHGTYPYVTSSNTVASSAATGSGCGPNSINYVLGITKAYTTRVGEGPFPTELTDNVGELLGTRGKEFGTVTSRKRRCGWFDGVLVRQTIKISGIDGIALTKLDVLDELDEIKMCVEYELDGKRLDYLPAAVEDQLKIKPIYKTFPGWKTSTNGIKNMDLLPENAKKYIFAVEKFIGAKVSSVSTSPERDDTILVENPFNI

SEQ ID NO: 196927 - protein, 373 aa, Unknown
  Bacterial polypetide isolated from the Sargasso Sea
LVIDGITYKLRLLPSGIVRKNKISVIGNGVVVDPWALLDEIKEIQSKGIVVNPSNFIISEAANLILPFHREMDEIREDAAGKGKIGTTRRGIGPAYEDKVGRRSIRIMDLRSEKNLNQRLESVLLHHNAIRKGLGKKIFKKEKLKKDLLKIAPEILKFSQPVWLKLDEFKRQRKRILFEGAQGILLDVDHGTYPFVTSSNTVASSASTGTGCGPNSINYVLGITKAYTTRVGEGPFPTELKDSIGELLGTRGKEFGTVTSRKRRCGWFDGVLVRQTIKISGIDGIALTKLDVLDEFDEIKMCIHYELDGKKINHLPASVEDQLKIKPIYKTFPGWKVSTKGIKNMEELPDNAKNYIYAVEDFIETKISSISTS

SEQ ID NO: 196928 - protein, 432 aa, Unknown
  Bacterial polypetide isolated from the Sargasso Sea
MPAYAVIGAQWGDEGKGKIVDLLAENMDFVVRYAGGNNAGHTVKNPTGDFQLHLIPSGICSPGVVSIIGNGVVIDPDALFKELESLDELGLINNNLFLSDRAHVIMPYHILIDLLEERARGDASIGTTGRGVGPAYMDKIGRSGVQIGDLVRLSSTNDPEMIKRLKDIFKSKNDVITKIYGKEKLDVQQLVEQSVHWGQKLEPFVRHTEQMIHEALKNNQRILLEGAQGTLLDVDHGSYPYVTSSSPSIGGTCTGLGINTNEIQEIVGIYKAYCTRVGSGPMPTEMDKATAHELREIAGEYGVTTGRPRRIGWFDGVAGRYSQSINGFTSMVVTRLDILDKFPVIKYCVGYEVDGERVDYFVPNASYLNKVTPIYEEIKGWDQVTYGTTKLEDLPKQARMYLDKIEELVDCKISAVSTGPRREETILLDQIN

SEQ ID NO: 196929 - protein, 421 aa, Unknown
  Bacterial polypetide isolated from the Sargasso Sea
GDEGKGKIVDLLTDRASVVVRFQGGHNAGHTLVVNGEKTVLHLLPSGILRESVCCVIGNGVVVDLHALTKEIDELSEKGIEVSERLSISNACPLILPSHIALDQHREMLKGDKKIGTTGRGIGPAYEDKVARRGIRLGEIFDSSVFSDKLRELLDYHNFWLTEYFSASAVDYKKTLDDCYKLFDSVSPMVTDTIEVLHSYRAAGKNILFEGAQGSLLDIDHGTYPFVTSSNTTAGSSSAGSGYGPLFLDYVLGITKAYTTRVGSGPFPTELFDEVGQHLATIGAEKGATTGRDRRCGWFDANAVKLAVRINSVSGICLTKLDVLDGLDRIKVCTGYQGIGTHETVGFAKADQLEKVEPIYVEMPGWKQSTVGITSLKELPREALNYIRFLEDQIEAPVDIISTGPDRLETLILRNPFDTEI

SEQ ID NO: 196930 - protein, 227 aa, Unknown
  Bacterial polypetide isolated from the Sargasso Sea
VWLKIDQFKKQKKKILFEGAQGILLDVDHGTYPFVTSSNTVASSAATGTGCGPNSINYVLGITKAYTTRVGEGPFPTELIDEVGELLGTRGKEFGTVTSRKRRCGWFDGVLVRQTIKVSGIDGIALTKLDVLDELDEIKMCVAYELDGEKLDYLPAAVEDQIKIKPIYKSFPGWKVLTSGIKNIDSLPDNAKKYIFAVEDFIGAKISSVSTSPERDDTILIENPFET

SEQ ID NO: 196931 - protein, 434 aa, Unknown
  Bacterial polypetide isolated from the Sargasso Sea
MSNVVVVGAQWGDEGKGRIVDWLAEKADIVARYNGGHNAGHTLVVDGQTYKLALLPSGIVRGKPGLIGNGVALDPEALLAEIDRMAALGIRVTPEVLQIAETATLVLPLHRAIDAAQERLRARPIGTTLRGIGPAYEDKVGRRGLRVCDLAEPELFAEKLDALLEHHNAWFRGLGLEPFQRDPMLSDLLAMAPRILPFMGRVWETLDHAHASGKRTLFEGSQAVMLDVDWGSYPYVTSSSTVAAGAASGTGIAPSHLGQVLGVSKVYATRVGEGPFTSEVDGTLGEVLRQRGGEYGVNTGRPRRCGWLDTVQLRHSCKVAGISLLALTKLDVLDGFDSIYVCVGYELDGKRIDYMPSTNAGQQRLQPVLRRFEGWDGSTRGIRSYGDLPRQAASLIEAIQQEVGIPVSVVTTGPERDDAIVLRSPFAETDGMAI

SEQ ID NO: 196932 - protein, 434 aa, Unknown
  Bacterial polypetide isolated from the Sargasso Sea
MIGKYVNNIVVVGSQWGDEGKGKIVDYLSENADVIVRFQGGHNAGHTLVINGKTYKLSILPSGIVRQDKISVIGNGVVIDPWALLDEIEVIKKTGIKISSENLKISNSAPLILPIHSQIDKAREIQRGDSKIGTTGRGIGPAYEDKVARRAIRVSDLKDKSLLKEKVNKLLNHHNIWLKAQNFETLDPEDIIANILDISQYILEFADETWVTLYNYNLKGKRILFEGAQGTMLDVDHGTYPFVTSSSTVSGNAASGSGFGLLNISKVLGITKAYTTRVGSGPFPTEQKNEIGNKLGELGHEFGTVTGRKRRCGWFDAVMVKQAIKISGISSIALTKLDVLDKFDELKVCTSYKIGGKDINFFPSCQIDQNKIEPNYETIEGWNMKTEGISDFDKLPGNAIKYIKRLESLIECKINIISTSPRREDTIILENIFN

SEQ ID NO: 196933 - protein, 418 aa, Unknown
  Bacterial polypetide isolated from the Sargasso Sea
MTGVVIVGSQWGDEGKGKIVDWLSSQADIVIRFQGGHNAGHTLVINNETFKLNILPSGILRKGKISIIGNGVVLDLAAFQKEVAGLKERGVDITPSNLYISDRATIILPLHQSLDELRENNNLIKIGTTKRGIGPAYEDKVGRRAIRLCDLFDKEKLNKKIEILLNHHNAIMRGFGLDEYNLEEVVSEIYKLGEYAKPFAKTINDITNVINSGKEKILFEGAQGFLLDIDHGTYPFVTSSNVHASYASIGSGLNPKVINHILAITKAYTTRVGNGPFPTEQDNEIGNKLGEIGHEFGTVTNRKRRCGWFDSVLVRQALTQSGATGIALTKIDVLDHFDEIKMCVGYNLNGKEIDYYPSSEQDQETIEPIYETFQGWMSTTNGISSFDELPENAKKYVKRISELTKTKIDLISTSPRRE

SEQ ID NO: 196934 - protein, 216 aa, Unknown
  Bacterial polypetide isolated from the Sargasso Sea
GKKILFEGAQGILLDVDHGTYPFVTSSNTVAAAAATGSGCGPGSINYVLGITKAYTTRVGEGPFPTELKDEIGEKLGSIGKEFGTVTSRKRRCGWFDGVLVRQTIKIAGINGIALTKLDVLDHLDEIKMCIAYEVDGKKMDYLPASLDNQLKAKPIYKNFKGWNCSTKGIKKFDDLPDNAKNYIKELEKFIETKVASISTSPERKDTILLDNPFSV

SEQ ID NO: 196935 - protein, 213 aa, Unknown
  Bacterial polypetide isolated from the Sargasso Sea
MFEGAQGSLLDIDFGTYPYVTSSNTSSGQIFAGTGFGLKQNNKVFGITKAYTTRVGAGPFPTELNNKIGDYLGKKGKEFGTVTLRKRRCGWFDANLVKQSVIISGVENIVLTKLDVLDELDELKICIGYRIDGKKFDYLPFGENLQSKAKPIYTKIPGWKKSTYGLTKWSDLPVAAKNYIKTIETIIGVDIAIISTGPERSQTIDRKKILGNF

SEQ ID NO: 196936 - protein, 192 aa, Unknown
  Bacterial polypetide isolated from the Sargasso Sea
MANVVVVGSQWGDEGKGKVVDWLSERADVVVRFQGGHNAGHTLVINDKTYKLSLLPSGIVRKKKLSIIGNGVVVDPWALKSEIEILKNNGVDISTKNLMIAENVSLILPLHQNLDKYREEALGSAKIGTTGRGIGPAYEDKVGRRSIRLGDLSDKTLLEERVERLLMHHNTLLKGFGFPKLEKKKILHQLMK

SEQ ID NO: 196937 - protein, 387 aa, Unknown
  Bacterial polypetide isolated from the Sargasso Sea
MKNSLILVGTQWGDEGKGKIVDYFSEKFSAVCRFQGGHNAGHTIYNDEKKFVLHLIPSGIFYDHVSCFIGQGVILSLDSLLEEIETIESKGINLDGKLRISRYCSLLLPIHAKIDQLREDNKNKIGTTRRGIGPAYEDKTARRSIKAFDLEDDSLLEDKLKNLLDYYNFQIENIHKAEKFNYQEVFDNLKETYSKTSKFFGDVTDSLEEIYEKGNHILYEGAQGTLLDVDYGTYPYVTSSNTLATSVGVGSGFPKSIYADVLGIVKAYTTRVGEGPFPTELHDEYGEKIANIGNEFGATTGRPRRCGWLDLVALKYSAKLNNLTSLCVTKLDVLDSFSEIKVCDEYEIDNEIVQYKSRQLHKVKPKYKIFKGLGTISQSVPKLFRVT

SEQ ID NO: 196938 - protein, 431 aa, Unknown
  Bacterial polypetide isolated from the Sargasso Sea
MGKNVVVLGTQWGDEGKGKIVDLLTEQAKYVVRYQGGHNAGHTLVINGDKTVLHLIPSGILRDNVKCIIGNGVVLAPDALMKEIKMLKERGIPVEERLLISEACPLILPFHCALDIAREKARGNKAIGTTGRGIGPAYEDKISRRGLRVGDLFNAELFAEKLKEVMAYHNFMLTEYYKVDAVDYEQTLSDALALADYLKSMCVDVTELLDNARKAGEPILFEGAQGTLLDIDHGTYPFVTSSNTTAGGVATGSGFGPRHLDYVLGIMKAYTTRVGAGPFPTELLCEVGDHLGTKGHEFGATTGRKRRPGWLDAVAMRRAVQINSVSGFCLTKLDVLDGLKEVKICVGYQHPDGTISKVTPLAAEGYEQVTPVYETMPGWSESTFGATSLEQLPQAAINYIKRIEELLETPIDIISTGPDRNETMILVSPFN

SEQ ID NO: 196939 - protein, 187 aa, Unknown
  Bacterial polypetide isolated from the Sargasso Sea
MKNVVVVGSQWGDEGKGKIVDWLSSEADVVIRFQGGHNAGHTLVIDGITYKLRLLPSGIVRKNKISVIGNGVVVDPWALLNEIEEIKSKGIEISEKNLILSESANLILPFHKEMDEIREDAAGKAKIGTTRRGIGPAYEDKVGRRSIRVMDLISEDNLDHRLETVLLHHNAIRKGLGKELFKKDELK

SEQ ID NO: 196940 - protein, 431 aa, Unknown
  Bacterial polypetide isolated from the Sargasso Sea
MANVVVVGSQWGDEGKGKIVDWLSSRADVVVRFQGGHNAGHTLVIDGKTYKLSLFPSGIVREEKVSIIGNGVVVDPWAFSEELETLINQDVKISSENLKIAENASLILPVHRNLDILREHRSSNDSKIGTTKRGIGPAYEDKVGRRSIRVGDLTDLKALRSKVDNLVDHHNIILRGMNEEEINSDVIYEELVEVSETIKPFITRTQEFLIKARKDRKRILYEGAQGALLDIDHGTYPYVTSSNTIASAAATGSGQGVNTINYVLGITKAYTTRVGEGPFPSEQDNDIGNELGEKGHEFGTVTGRKRRCGWFDAVLVKHAIEVSGIDGMALTKLDVLDGFKKINICIAYELDGKRIDYFPSSAEQQSRIKPIFEEFDGWDGTTFGARQWNDLPAEAVKYVKRIEELTSTPVALLSTSPEREDTILVKDPFED

SEQ ID NO: 196941 - protein, 430 aa, Unknown
  Bacterial polypetide isolated from the Sargasso Sea
MKNIVVVGSQWGDEGKGKIVDWLSEQADVVVRFQGGHNAGHTLVINGVTYKLRLLPSGIVRKNKISIIGNGVVVDPWALLDEIEEIKSKGVRVDTDNFIISDSANLILPFHREMDEIREDSAGKGKIGTTRRGIGPAYEDKVGRRSIRVMDLRSEKNLDQRLESVLLHHNAIRKGLGKKIYEKDQLKKDLLKIAPKILKYSKPVWLKLDEFKKQKKRILFEGAQGILLDVDHGTYPFVTSSNTVASSAATGTGCGLNTINYVLGITKAYTTRVGEGPFPTELKDDIGELLGTRGKEFGTVTSRKRRCGWFDGVLVRQTIKVSGIDGIALTKLDVLDELDEIKMCVKYELDGKKINYLPAAVEDQLKIKPIYKTFDGWKKSTSGIKNIDDLPENAKNYIKEVENFIETKISSISTSPERDDTILIENPFEI

SEQ ID NO: 196942 - protein, 396 aa, Unknown
  Bacterial polypetide isolated from the Sargasso Sea
GGHNAGHTLVIDGVTYKLRLLPSGIVRKNKVSIIGNGVVVDPWALLDEIKEIGEKGVNVNSENFMISEAANLILPFHREMDEIREDAAGKSKIGTTRRGIGPAYEDKVGRRSIRVMDLRSEKNLNQRLETVLLHHNAIRKGLGKKIFEKNQLKDDLLKIAPEILKYSAPVWLKIDQFKKQKKKILFEGAQGILLDVDHGTYPFVTSSNTVASSAATGTGCGPNSIHYVLGITKAYTTRVGEGPFPTELVDKIGELLGTRGKEFGTVTSRKRRCGWFDGVLVRQTIKISGIDGIALTKLDVLDELDEIKMCVEYDLNGKKIDYLPAAVEDQLKIKPIYKTFDGWKTSTNGVKNINDLPENAKKYLFAIEDFIGAKISSISTSPERDDTILVENPFEI

SEQ ID NO: 196943 - protein, 228 aa, Unknown
  Bacterial polypetide isolated from the Sargasso Sea
PYVGNVIQEVRDLQDADKKILFEGAQGALLDISLGTYPYVTSSNSSVGGIASGIGIRPTNIDFSLGIAKAYTTRVGEGPFPTELFDDMGTYLAEKGGEVGATTGRPRRCGWLDAFLLSHTVQLNGIDGLCITKIDVLDGLESIKVCTDYSSNLSKAEILETLTLEGIEPIYTEFKGWEEPTAGKQSFEELNDMAKEFILNIEDLCKVPVIMISTGPKREDTIIREYPL

SEQ ID NO: 196944 - protein, 232 aa, Unknown
  Bacterial polypetide isolated from the Sargasso Sea
FVTETPVLVHSLVKQGLRLLFEGAQGTFLDIDHGTYPFVTSSNTVSGNACAGGGIGPRHISDVVGIVKAYTTRVGSGPFPTELLDQNGEFLRSEGQEFGATTGRPRRCGWFDAVLVRYAVRLNGITSLALTKLDVLDKIETLKLCVGYRVKDGSIQTDFPFEGHDEVEPVYEELPGWNTKTAGITEYDQLPKNLLDYLARIEELVEAPASIISTGPKREDTIVLQPDRFWKS

SEQ ID NO: 196945 - protein, 283 aa, Unknown
  Bacterial polypetide isolated from the Sargasso Sea
RLCDLNDLKNLKLKIQNLYNFHKPRLDQFKKIADYEKTFNDLVEISEQILIFSSPVWKIINDAGKQNKFILFEGAQGSLLDIDFGTYPYVTSSNTSSGQIFSGTGFGIKENHNILGITKAYTTRVGSGPFTTELNDEIGNHFVEKGQEYGTVTKRRRRCGWFDSVLVKQSIAINGITNIVLTKLDVLDDLKEIKVCIGYDDGNKKYNYLPFDEKIQKKLFPIYETLPGWQSSTYGLTGWNDLPKNAQNYINFLEETIEKNISIISTGPDRIHTIDRNNLLSNS

SEQ ID NO: 196946 - protein, 264 aa, Unknown
  Bacterial polypetide isolated from the Sargasso Sea
YHNFLLEELYKSDGTDLEDTYKEWMGYFSKIKDLVVDSSKELNNLKLKQSNILFEGAQGSMLDIDQGTYPFVTSSSTLSGASSLGSGIGPLDIDGVLGITKAYATRVGSGPFPTEIDDDYGKHMAKVGVEFGATTGRPRRCGWLDLVALRKAVNINSISQLCITKIDVLDGLDKILVAEEYEIDKKIYDTLPAMSQNRFERISPIYKEYKGWSGITSGLKSFDQLPTEAKTLIKGIEGSIGVPVSLISTGPDRNDMIVIDQIFS

SEQ ID NO: 196947 - protein, 170 aa, Unknown
  Bacterial polypetide isolated from the Sargasso Sea
IWISKSIYSDVLGVTKAYTTRVGSGPFPTELFCEEGEKLAELGHEFGATTGRPRRCGWLDLVALKYSAKLNNLTELCITKLDVLDSFETIRVCHSYKIDGVDTSFKSRLLHKVEPVYENLKGWNTSLNNCKDFDSLPEETKAFISYVEDYVGVKVTLISNGPNRSDLIHR

SEQ ID NO: 196948 - protein, 266 aa, Unknown
  Bacterial polypetide isolated from the Sargasso Sea
VLVHHNAIRKGLGKKIFEKDQLKSDLLKIAPKILEFSQPVWLKIDQFKKQKKRILFEGAQGILLDVDHGTYPFVTSSNTVASSAATGTGCGPNSINYVLGITKAYTTRVGEGPFPTELTDDVGELLGTRGKEFGTVTSRKRRCGWFDGVLVRQTIKVSGIDGIALTKLDVLDELDEIKMCVAYELDGKRLDYLPAAVEDQIKIKPIYETFPGWKVSTNGVKNLDSLPENAKKYIFAVEDFIGAKVSSISTSPERDDTILIENPFEV

SEQ ID NO: 196949 - protein, 396 aa, Unknown
  Bacterial polypetide isolated from the Sargasso Sea
LQWGDEGKGKIVDNLSENVDVVCRFQGGHNAGHTIKVNGEKTVLHLIPSGILHNNSKCLIGNGVVLALDALDKEINELKSRDINFKDRFFVSSACSLILPSHISIDQTRDKKESIGTTGRGIGPAYEDKIGRRAIRFGDIANQDKLREKVELLINYHNRLLKDLYKKEPHKPDDVFNEIMKYKHLHEEFCVDSQDLMYEWVKNKKTILFEGAQGTLLDIDHGTYPYVTSSSTTAGGVSTGLGIGPRYINKIIGISKAYTTRVGEGPFPTELFDKDGELLAKKGNEFGATTGRPRRCGWLDLVALKKAIFTNSVTDLCITKLDVLDETELIKVCIEYDNDKPIYKVFDGWLSSTEGITEYSELPEKAKEYIEFIEDFAECSASIISTGPSRDQTISK

SEQ ID NO: 196950 - protein, 319 aa, Unknown
  Bacterial polypetide isolated from the Sargasso Sea
LNSGASKSIVGNLVNSFVERYAFPAIRANALYLDKYPLSTALARPLIAENLVNIAREINADAVAHGCTGKGNDQVRFDLAINALGPDLKIITPAREWNMSREEAIVYGEKFGIPAPVSKKSPYSVDVNLLGRSIEAGILEDPMEEAPEDIFSMTSSVDNSPDFHQDIEIVFKNGFPVGINDEFLTPVEIIQKANDLAGNHGFGRIDMIEDRVVGIKSREIYETPGLLLLIKAHKELESITLNPDVIDFKGIVEKKWGQLVYQGFWFGPLKESLDAFISSTQTSVNGRVKIRLYKGNAIVIGRMSENNSLYREDLATYSK

SEQ ID NO: 196951 - protein, 259 aa, Unknown
  Bacterial polypetide isolated from the Sargasso Sea
IIAPWREWNLNSRTKLLNYAKQNKIDFPSSKKNEPPYSMDANLLHISYEGKILEDPWKSPPENMWTWVNSVQKAPNKPTDIIIEFQKGDPIKINSKKYSPATILEKLNNLGAKNGVGRIDIVENRYIGMKSRGCYETPGGTIILMARRALEGITVDKELLHMKQELMPKYAKLIYNGYWWSPERNALQGLINESQNKVSGHVKLRLIKGNVIILGRKSENSIYNADLSTFEDDMGEYNQKDAEGFIKLNALRLKSLAKK

SEQ ID NO: 196952 - protein, 269 aa, Unknown
  Bacterial polypetide isolated from the Sargasso Sea
MRSRKVVLAYSGGLDTSVIAKWLMEEHDLEVVTFTADIGQGEETRDARVKAKKLGIKKIYIEDLREDFVKNYVYPMFRANAIYEGEYFLGTSIARPLISKRLIEIAKKEKADYICHGATGKGNDQVRFELAAYALNPKIKVIAPWREWDFVSRSDLMRYAKKHQIAVDFDHGKKSPYSMDANILHTSYEGGILEDPWRKPEESMWLRTKSLENSKSKPQRLDLTFTKGDISAVNGKKMSPSNVLHHLNIMAGNHGIGRDDIVENRYVGI

SEQ ID NO: 196953 - protein, 219 aa, Unknown
  Bacterial polypetide isolated from the Sargasso Sea
ASSEGKILEDPWIEAEEFIYSRTIAPEDAPDKPTYIEIGFDKGDATSINGTALSPANLLSQLNQFGTENGIGRLDLVENRFVGMKNRGLYETPGGTILHAAHRAIESLTLDRGMAHLKDELMPRYAELIYNGFWYSPEREMLQSAIDFSQRNVNGTVRLKLYKGNTIVVGRKSEKSLYSADYVTFEQGAADYNHADAHGFIRLNALRLRLNKMMLDDEK

SEQ ID NO: 196954 - protein, 303 aa, Unknown
  Bacterial polypetide isolated from the Sargasso Sea
ENLVNIAREVSADAVAHGCTGKGNDQVRFDLAINALGPDLKIITPAREWNMSREEAIVYGEKFGIPAPVSKKSPYSIDVNLLGRSIEAGILEDPMKEAPEDIFAMTSSIENSPDSPQEVEIIFKNGFPVGINDESLTPVEIIKKANVLAGEHGFGRIDMIEDRVVGIKSREIYETPGLLLLIKAHKELESITLNPDVVDFKGIVEKKWGQLVYQGFWFGPLKDSLDSFISSTQTTVNGRVKIRLHKGNAIIIGRMSENNSLYREDLATYSKDDVFNHSLAEGFIYMWGMSNKIWAELNSKTKD

SEQ ID NO: 196955 - protein, 309 aa, Unknown
  Bacterial polypetide isolated from the Sargasso Sea
MLQKKLVANLMKSKKKIILAYSGGLDTSIILKWLQENYNADVICYTADIGQKIDKKKIITNAKKFGVKNIIIKDLKNKFVKDYVYPMIRGHAIYEGVYLLGTSIARPLIAKDQIRVAKKFKAYAVSHGSTGKGNDQVRFELGYHYFGPKIKIIAPWRIWKLKSRTDLINYAKKHHIPIPKDKKGAPPFSVDDNLFHTSTEGKVLENPKNSAPEYIFQRTISPERAPNKASFITINFKNSDPIGVNGKKLAPSKLLQKLNQIAGKNGIGRIDLVENRFIGIKSRGVYETPGGTLLMQAHRAIESVTLDKE

SEQ ID NO: 196956 - protein, 251 aa, Unknown
  Bacterial polypetide isolated from the Sargasso Sea
MKDIKKVVLAYSGGLDTSIILKWLQEIYDCEVVTFTADLGQGEELEPARSKAQSMDVKEIYIEDLREEFVSEYVFPMFRANAIYEGEYLLGTSIARPLIAKRLVEIAEETGADAISHGATGKGNDQVRFELGAYALNPNIKIIAPWREWDLGSRKSLLDYAAKHGIPVEMKRGNESPYSMDANLLHISYEGGPLEDPWNEPSSEMWRWTVNPELAPNEATYVDLEFENGDPVGIDDSKMSPSELLTELNRL

SEQ ID NO: 196957 - protein, 278 aa, Unknown
  Bacterial polypetide isolated from the Sargasso Sea
SHGSTGKGNDQVRFELGYHYFGPKIKVIAPWRIWKLKSRTDLINYAKKHGIPIPKDKKGAPPFSVDDNLFHTSTEGKLLENPKNSAPEFIFQRTTSPEKAPNKSSFISIGFKNGDPININGKKLSPSKLLEKLNSIAGKNGIGRVDLVENRFIGIKSRGVYETPGGTLLINAHRAIESVTLDKETMHKKDEIMPKYAELIYNGYWYSKARLKLQKIVDQKRNKVNGSVKLKLFKGNITIVSRQTKSNAYSMKKVSFEENKTFNKSNVERFINFHKKKL

SEQ ID NO: 196958 - protein, 191 aa, Unknown
  Bacterial polypetide isolated from the Sargasso Sea
MNFKKKIVLAYSGGLDTSIILKWLQKNYKAEVITYTADIGQKVNKKKIINNAKKLGVKKIIINDLKNVFVKEYIFPMIRGHAIYEGVYLLGTSIARPLIAKDQIQIAKKYKAYAVSHGSTGKGNDQVRFELGYHYFGPKIKIIAPWRLWKLKSRSDLIKYAKKHKIIIPKDKKGETPFSVDDNLFHTSTEG

SEQ ID NO: 196959 - protein, 262 aa, Unknown
  Bacterial polypetide isolated from the Sargasso Sea
PWREWDLNSRERLVAYAKEHGIPVETRKDGGADYSMDANMLHISYEGGELEDPWVAPDEAMWRWTVSPQEAPNAPESIELTFARGDPVAVNGELLSPAQMLEALNQLGARHGIGRIDLVENRYVGMKNRGCYETPGGTILLKAHRAIESITLDREVAHLKDELMPRYASLIYNGYWFAPERQMLQRMIDESQRAVNGVVRLELYKGGVMVAGRSSATDSLFDESVVTFEDDQGAYDQADADGFIKLNALRLRIAGRKGRTQT

SEQ ID NO: 196960 - protein, 170 aa, Unknown
  Bacterial polypetide isolated from the Sargasso Sea
MDKVNKVVLAYSGGLDTSVILRWLKETYSCEVVTFTANLGQDEDYDLVEKKATQQGVKEIFIEDLKEEFVRDYVFPMFRANPLYEGYYLLGTSIARPLIAQKQIEIANKVGADAVSHGATGKGNDQIRFELGYYYHKPDIKIISPWREWDLTSRTSLVEYADQHGMKCKR

SEQ ID NO: 196961 - protein, 169 aa, Unknown
  Bacterial polypetide isolated from the Sargasso Sea
TLSPADVLTKLNKLGGDNGIGRLDIVENRYVGMKSRGCYETPGGTIMLPAHRAIESLTLDRESAHLKDSVMPKYAELLYNGYWWSPERLALQKLIDATQEHVNGEVRLKLYKGSVTVVGRRSDNDSLFDASIATFEDDAGAYDQKDAEGFIKLNALRLRIAAKTGRKLS

SEQ ID NO: 196962 - protein, 155 aa, Unknown
  Bacterial polypetide isolated from the Sargasso Sea
MKRKKKIILAYSGGLDTSVILKWLQDHHGYEVVTFTADIGQGEELSPAKEKAVNLGVKKIYIKDLREEFVRDFVFPMFRANTVYEGEYLLGTSIARPLIAKHLVEIAKKEKTDIISHGATGKGNDQVRFEIGAYSLFPRVQIVAPWREWNLTSRE

SEQ ID NO: 196963 - protein, 264 aa, Unknown
  Bacterial polypetide isolated from the Sargasso Sea
GGLDTSIILKWLQENYDAEVICYTADVGQEIDRKKIISNAKKFGVTKIIIKDLKDVFVKDYVYPMIRGNAIYEGVYLLGTSIARPLIAKDQIRVAKKFKAYAVSHGATGKGNDQVRFELGYHYFGPKIKIIAPWRIWKLKSRTDLINYAKKNNINIPKDKKGAPPFSVDDNLFHTSTEGKLLENPKNSAPEFIFQRTVAPEKAPNKASLVSINFKNGDPYGVNGKKISPAKLLEKLNQLAGKNGIGRVDLVENRFIGIKSMRGL

SEQ ID NO: 196964 - protein, 126 aa, Unknown
  Bacterial polypetide isolated from the Sargasso Sea
IEIAKITGADAVSHGATGKGNDQVRFELSYYALNPDIKVIAPWRIWDLSSRSKLIDFAEKNQIYISKDKRGEAPYSVDSNILHTSSEGKVLEDPSIEPEEYVFSRTLSPETAPNEPIYTELIFEKV

SEQ ID NO: 196965 - protein, 201 aa, Unknown
  Bacterial polypetide isolated from the Sargasso Sea
PPEHIFSRTKSIQDTPNKAEIITIGFENGDPIYLDENKLKPHEILKRLNSIAGSHGVGRIDIVENRFVGMKSRGIYETPGGTILLHARRAIESITLDKGEAHLKDEIMPKYSEIIYNGLWFSSERIAMQSLIDSSQNKVNGEVKVKIFKGNVITIGRRSQNSLYDSSLVSFDEKGDYDQKDAEGFIKINSIRLKKAKLDQS

SEQ ID NO: 196966 - protein, 187 aa, Unknown
  Bacterial polypetide isolated from the Sargasso Sea
MKSNKRIILAYSGGLDTSIILKWLQENYKAEVIAYTADIGQEINRKKIINNAKKLGVKKIVIKDLKNTFVKDYVYPMIRGHAVYEGVYLLGTSIARPLIAKDQIRVAKKFKAYAVSHGSTGKGNDQVRFELGYHYFGPKIKIIAPWRIWKLKSRTDLINYAKKYGIAIPKDKKGAPPFSVDDNLFHT

SEQ ID NO: 196967 - protein, 134 aa, Unknown
  Bacterial polypetide isolated from the Sargasso Sea
MKSKKRIVLAYSGGLDTSIILKWLQENYNAEVICYTANIGQEINKKKIISNAKKFGVKNIIINDLKDIFVKDYVYPMIRGHAIYEGVYLLGTSIARPLIAKDQIKVAKKYKAYAVSHGATGKGNDQVRFELGYH

SEQ ID NO: 196968 - protein, 303 aa, Unknown
  Bacterial polypetide isolated from the Sargasso Sea
FVKDYVYPMIRGHALYEGTYLLGTSIARPLIAKRQIAIAKKFKAFAVSHGATGKGNDQVRFELGYYYFGPKIKVIAPWRIWKLKSRTDLIKYAKKHKIPVPKDKRGAPPFSVDDNLYHTSTEGKVLEDPRRQAPEYIFQRTVSPEKAPNKSSYVTIGFKKGDPVSVNNKKLSPAKLLQKLNIIAGKNGVGRVDLVENRFIGIKSRGVYETPGGTLLMTAHRAIESVTLDKNTMHKKDEIMPKYAELIYNGFWYSKARFKLQKIVDIKKNQVNGFVKLKLYKGNVTILSRQSKSKAYSVKKSFF

SEQ ID NO: 196969 - protein, 104 aa, Unknown
  Bacterial polypetide isolated from the Sargasso Sea
MGRANKVVLAYSGGVDTSVCIPYLKQEWGVEEVITFAADLGQGDELEPIRQKALDAGASQSLVGDLIQPFIEEFAFPAIRANALYEGRYPLSTALARPLIARRL

SEQ ID NO: 196970 - protein, 297 aa, Unknown
  Bacterial polypetide isolated from the Sargasso Sea
ASYVSHGATGKGNDQVRFELSYYALKPDIQVITPWKIPEFYKKYPGRSELLDYAKKFGIPVKATKESPWSSDENLMHISFESGMLEDPWQAPIQEMFELSNSPQKAPSNSQEVIIEFKNGNATAVDGNEYSPAKLLKHLNEIAGKHGIGRVDMVESRFVGMKNRGVYETPGGTILHISHRAIESITLNRGVINLKDSLMPRFAQLTYDGFWFSPEMEILLDMVKKTQEPVNGTVRLELYKGNCIVTGRKSPNSLYVEDMATMEADHGAYDPKDAIGFIKLHALPLRIHAGLKANSEK

SEQ ID NO: 196971 - protein, 211 aa, Unknown
  Bacterial polypetide isolated from the Sargasso Sea
MKKIVLAYSGGLDTSIILKWLQENYKAEVIAYTSDIGQEMNTKKIIKNAKKLGVKKIIIENLKNIFVKDYVFPMVRAHAVYEGVYLLGTSIARPLIAKRQIAIAKKFKAFAVSHGATGKGNDQVRFELGYAFFGGKKIKVIAPWREWKLQSRTDLINYAKKNNIPIPKDKKGAPPFSVDDNLFHTSTEGKVLENPKNSAPEYIYQRTTSPE

SEQ ID NO: 196972 - protein, 133 aa, Unknown
  Bacterial polypetide isolated from the Sargasso Sea
MQQVKKVVLAYSGGVDTSVCIPYLKNEYGISEVVAYVADLGQGEDLELIRQKALNSGASHSIVGNLVNSFVERYAFSAIRANALYLDKYPLSTALARPLIAENLVNIAREFSADAVAHGCTGKGNDQVRFDLA

SEQ ID NO: 196973 - protein, 251 aa, Unknown
  Bacterial polypetide isolated from the Sargasso Sea
MKLKKKIVLAYSGGLDTSIILKWLQKNYNAEIIAYTADIGQKINKKKIIKNAKKLGVKKVIIKNLKDIFVRDYVYPIIRGHAIYEGVYLLGTSIARPLIAKDQIRIAKKFKAYAVSHGSTGKGNDQIRFELGYHYFGSKIKIIAPWRIWKLKSRTDLINYAKKHGITIPKDKKGASPFSVDDNLFHTSTEGKILENPKNSAPEFIFQRTTAPEKAPNKPSFITIGFKNSDPITINSKKLSPSKLLSKLNFI

SEQ ID NO: 196974 - protein, 249 aa, Unknown
  Bacterial polypetide isolated from the Sargasso Sea
MNNKINKVVLAYSGGLDTSVIIKWLQEKYDCEIVTFTADLGQGAELEEAENKAKSLGINEIFTEDLKEEFVSEYVFPMFRANTLYEGQYLLGTAIARPLIAKRQIEIAKLTGADAVSHGATGKGNDQIRFELSYYSLNPDIKVIAPWRTWNLTSRSKLIDFAEKHQIFIAKDKRGEAPFSIDSNILHTSSEGKVLEDPSLEPEEYIYSRTISPEKAPDKATVTELIFEKGDLISVDGLNSSPAVLLETL

SEQ ID NO: 196975 - protein, 279 aa, Unknown
  Bacterial polypetide isolated from the Sargasso Sea
KKNKIVLAYSGGLDTSIILKWLQENFNSEIIAYTADIGQEINKNKIIKNAKKLGVKNIVIEDLKNTFVKDYVYPMIRGHALYEGVYLLGTSIARPLIAKRQIAIAKKFNAFAVSHGATGKGNDQVRFELGYYYFGPKIKVIAPWRIWKLKSRRDLIKYAKKHNIPIPKDKKGAPPFSVDDNLFHTSTEGKILEDPRKQAPEYIFQRTISPEKAPNKPSYITIVFKKGDPVAINNKKLSPAKLLQKLNLVAGKNGIGRVDLVENRFIGIKSRGVYETPGG

SEQ ID NO: 196976 - protein, 145 aa, Unknown
  Bacterial polypetide isolated from the Sargasso Sea
MKKIVLAYSGGLDTSIILKWLQINYKAEVIAYTSNIGQDLNKEKIIQNAKRLGVKKIIIEDLKNIFVKDYVFPMIRAHAVYEGVYLLGTSIARPLIAKRQIEIAKKFKAFAVSHGATGKGNDQVRFELGYSFFGKRIKVIAPWRE

SEQ ID NO: 196977 - protein, 212 aa, Unknown
  Bacterial polypetide isolated from the Sargasso Sea
MKGKFLEDPWKSPDESMFMRTISYEKAPNKATVIEIEFKKGDPIALNGKKLSPSSLLSKLNTIGGTNAVGRIDIVENRFIGMKSRGVYETPGGTILQIAHRAIESITLDKGASHLKDEIMPRYAELIYNGFWFSPEREMLQSLIDKSQINVNGIVRLKIYKGNVIVLGRKSNSSIYSSKMATFERDDIYNQKDAEGFIKLNALRLKLLKKGT

SEQ ID NO: 196978 - protein, 204 aa, Unknown
  Bacterial polypetide isolated from the Sargasso Sea
PSEQVWMWTKSPEQAPDHAAYVELSFVKGELTQINGNAIAPVAAIELLNEIGSEHGVGRIDIVENRLVGMKSRGCYETPGGTILMAALKGLEALVYDRTSLKYREEVGLEFAQLVYDGRWFTPLKDALLAAATSLAEQLTGDVVIKLYKGNVTVAKRRSPNSLYSEAFATFEGDEVYNQKDAAGFIRLYSLASRIRALHQQQKD

SEQ ID NO: 196979 - protein, 312 aa, Unknown
  Bacterial polypetide isolated from the Sargasso Sea
ILKWLQLKFDCSIAAYTADIGQNDDFNQIRIKAENLGVKEICIDNLKEEFVKDYIFPMFRANAVYEGVYLLGTAIARPLIAKKQVEYANKIGADAVAHGSTGKGNDQVRFEIGYYATNPNIEIIAPWRLWDFKSREDLINFANKYQISVPKDKIGEPPFSVDENILHTSAEGKVLEDPWISPPNYVFSRTKSIEDSSSTSDEIIISFDYGDPVKINDENYSPYEILKKLNELGNKHGIGRVDIVENRFIGMKSRGIYETPGGTILFHAHRAIESITLDAETAHKKDSIISEYAELVYNGFWFSKKEKTYRKL

SEQ ID NO: 196980 - protein, 178 aa, Unknown
  Bacterial polypetide isolated from the Sargasso Sea
MKKIVLAYSGGLDTSIILKWLQENYKAEVIAYTSDIGQKMNKQKIIRNAKRLGVKKIIIENLKNTFVKDYVFPMVRAHAVYEGVYLLGTSIARPLIAKRQIAIAKKFKAFAVSHGSTGKGNDQVRFELGYAFFGGKKIKVIAPWREWKLQSRTDLINYAKKNNIPVPKDKKGAPPFSV

SEQ ID NO: 196981 - protein, 208 aa, Unknown
  Bacterial polypetide isolated from the Sargasso Sea
MSKNVKVNKVVLAYSGGLDTSVILKWLKETYQCEIITFTADIGQGEEIEPVRKKASDLGIKNIFIEDLKEEFVKDYVFPMFRANTLYEGVYLLGTSIARPLIAKKQIEIACEMNAEAVSHGATGKGNDQVRFELSYLSLNPRIIIIAPWREWDLSSRTKLIQYAEKNQIAIPKDKKGEAPFSVDANLLHISAEGKILEDPWIEPNELV

SEQ ID NO: 196982 - protein, 292 aa, Unknown
  Bacterial polypetide isolated from the Sargasso Sea
IRVAKKFKAYAVSHGSTGKGNDQVRFELAYHYFGPKIKIIAPWRIWKLKSRTDLINYAKKHRISIPKDKKGAPPFSVDDNLFHTSTEGKVLENPKNSAPEFIFQRTTSPEKAPNKPSFVTIGFKNGDPISINGKKLSPSKLLDKLNFIAGKNGIGRVDLVENRFIGIKSRGVYETPGGTLLINAHRAIESVTLDKKTMHKKDEIMPKYAELIYNGYWYSKERFKLQKIVDLKRNKVNGSVKLKLYKGNITIVSRQTKSNAYSMKKVSFEENKTFNKSNIERFINFHKKKLNK

SEQ ID NO: 196983 - protein, 282 aa, Unknown
  Bacterial polypetide isolated from the Sargasso Sea
AVSHGSTGKGNDQVRFELGYHYFGPRIKVIAPWRIWKLKSRTDLINYAKKNDIPIPKDKRGAPPFSVDDNIFHTSTEGKVLEDPKNSAPEFIFQKITSPEKAPNKPSFITINFKNSDPIGLNGKKLSPSKLLSNLNDLAGKNGIGRVDLVENRFIGIKSRGVYETPGGTILISAHRAMESVTLDKTTMHRKDQVMPRYAELIYNGYWYSKERFKLQKIVDQNKNKVNGSVKLKLYKGNITIQSRITKSKAYSLKKVSFEENKTFNKSNVEKFINFHKKKLRK

SEQ ID NO: 196984 - protein, 124 aa, Unknown
  Bacterial polypetide isolated from the Sargasso Sea
MKKIVLAYSGGLDTSIILKWLQINYKAEVIAYTSNIGQDLNKKEIIQNAKRLGVKKIIIEDLKNIFVKDYVFPMVRAHAVYEGIYLLGTSIARPLIAKRQIEIAKKFKAFAVSHGATGKGNDQV

SEQ ID NO: 196985 - protein, 239 aa, Unknown
  Bacterial polypetide isolated from the Sargasso Sea
MKKQKKIVLAYSGGLDTSIILKWLQEKYNAEVISYTADIGQKINRKKILKNAKKLGVKKIVIENLKDLFVKEYIYPMTRGHALYEGFYLLGTSIARPLIAKRQIAIAKKFNAYAVSHGSTGKGNDQVRFELGYHYFGPKIKVIAPWRIWKLNSRTDLIKYAKKNKIPIPSDKKGAPPFSVDDNLFHTSTEGKVLENPKNAAPEFIFQRTISPEKATNKASYVTIEFKNGDPITVNGKKL

SEQ ID NO: 196986 - protein, 221 aa, Unknown
  Bacterial polypetide isolated from the Sargasso Sea
GRSIEAGILEDPMQEAPEEIFAMTSSVDNSPDSHQDIEIIFKNGFPVGINDEFLTPVEIIQKANDLAGNHGFGRIDMIEDRVVGIKSREIYETPGLLLLIKAHKELESITLNPDVIDFKAIVEKKWGQLVYQGFWFGPLKESLDAFISSTQTAVNGRVKIRLYKGNAIVIGRMSENNSLYREDLATYSKDDVFNHSLAEGFIYMWGMSNKIWAELNSKTKD

SEQ ID NO: 196987 - protein, 157 aa, Unknown
  Bacterial polypetide isolated from the Sargasso Sea
MDKINKVVLAYSGGLDTSVILRWLKETYQCEVATFTANLGQDEDYDLVKAKAEKQGTKEIFIEDLKEEFVSDYVFPMFRANPLYEGYYLLGTSIARPLIAKKQIEIANQINADAVSHGATGKGNDQIRFELGYYYHKTDIKIISPWREWDLSSRTSL

SEQ ID NO: 196988 - protein, 233 aa, Unknown
  Bacterial polypetide isolated from the Sargasso Sea
KDKRGEQPYSMDANLLHISYEGKALEDPWVEPEEDMFRWTISPQQAPNEPEYITIGFSKGDPISINDQKLSAGNIMQKLNELGVKHGIGRLDIVENRYVGMKSRGVYETPGGTILLQARRAIESITIDREVAHLKDELMPKYAELVYNGYWFTPEREVLQTAIDATQYNVNGVTRLKLYKGNTIITGRQSPSSLYSNEHVTFEEDSVYNQLDAEGFIKLNALRLKIGKHYINK

SEQ ID NO: 196989 - protein, 126 aa, Unknown
  Bacterial polypetide isolated from the Sargasso Sea
MGRANKVVLAYSGGVDTSVCIPYLKQEWGVEEVITFAADLGQGDELEPIRQKALDAGASQSLVGDLIQPFIEEFAFPAIRANALYEGRYPLSTALARPLIARRLVEVAREMGADAVAHGCTGRGND

SEQ ID NO: 196990 - protein, 240 aa, Unknown
  Bacterial polypetide isolated from the Sargasso Sea
MPKKIVLAYSGGLDTSVILKWLQNKYECPVVTFTADLGQGEELSPVRKKAESLGVKEIFVEDLKEEFVKNYVFPMFRANAIYEGSYYLGTAIARPLIAKRQIEIAEEVGADTVAHGATGKGNDQVRFELGYYANNSKINVVSPWREWDLNSRKDLINFAEKNQISIPKDKRGEAPFSTDANLLHTSSEGKILEDPWIEAPEYVYSRTKSIDNSKNSPDEIILSFKGGDVVAINKKELKPH

SEQ ID NO: 196991 - protein, 122 aa, Unknown
  Bacterial polypetide isolated from the Sargasso Sea
PGGEILLSARRAIESITLDKESAHLKDELMPKYAELIYNGFWFSPEREMLQKLIDQSQKLVSGFVKLKIYKGNVIILGRKSNQTLYSPEMATFEEDLVYNQSDADGFIKLNALRLKLLKNRG

SEQ ID NO: 196992 - protein, 275 aa, Unknown
  Bacterial polypetide isolated from the Sargasso Sea
AKGNDQVRFELGYHYFDQKIKIIAPWRIWKLKSRTDLINYAKKNRIPIPKDKKGASPFSVDDNLFHTSTEGKVLENPKSSAPEFIFQRTISPEKAPNKAAFVTINFKNSNPVGINNKKLPPSKLLEKLNQLAGKNGIGRVDLVENRFIGIKSRGVYETPGGTLLINAHRAIESVTLDKKTMHKKDKIMPKYAELIYNGYWYSKARFKLQKIVDLKRSKVNGSVKLKLYKGNITIVSRQTKSNAYSMKKVSFEENKTFNKSNIEKFINFHKKKLNK

SEQ ID NO: 196993 - protein, 228 aa, Unknown
  Bacterial polypetide isolated from the Sargasso Sea
EAPFSIDANLLHISAEGKILEDPWIEPSELVFSRTKSPIDAKDEISEIQLRFNQGDPVELNGKSLSAAEMLHQLNILGGENGIGRIDIVENRFVGMKSRGIYETPGGTILFHMRRAIESITLDRGASHLKDELMPKYAELIYNGFWFSPERQMLQKAIDESQKNVNGVVRAKLYKGNIIITGRKSPNSLYDEDLVTFEEGSFNYNHHDAEGFIKLNALRLMMNNIKQK

SEQ ID NO: 196994 - protein, 262 aa, Unknown
  Bacterial polypetide isolated from the Sargasso Sea
AEIIAYTADIGQEMDRKKIISNAKKLGVKKIIIEDLKNTFVKDYVYPMIRGHALYEGVYLLGTSIARPLIAKDQIRVAKKFNAYAVSHGSTGKGNDQVRFELGYHYFGPKIKIIAPWRIWKLKSRTDLINYAKKHGIPIPKDKKGAPPFSVDDNLFHTSTEGKVLENPKNSAPEFIFQRTTSPEKAPNKPSFITINYKNGDPVGLNGKKLSPAKVLDKLNQLAGKNGIGRVDLVENRFIGIKSRGVYETPGGTLLLIAHRAI

SEQ ID NO: 196995 - protein, 290 aa, Unknown
  Bacterial polypetide isolated from the Sargasso Sea
KAQVEIARKVGADALSHGCTGKGNDQVRFESCFAALAPDLKVIAPWREWDLSSRESLLDYLAERDIPCSASATKIYSRDANAWHISHEGGELEDPWCEPSDQVWTWTNSPEQAPDKAELVTLKVVEGEVVAVNGEELKPYDCLVKLNDIASPHGVGRVDIVENRLVGMKSRGCYETPGGTVIMAALQAIDELVLDKSSRKWKEVLGGEFSHLVYDGRWFTPLKDSILAGAEALSTLATGEVVLKLYKGQVTAVQKKSPNSLYSEDFATFGEDDVYDQSHAEGFIRLFSLS

SEQ ID NO: 196996 - protein, 134 aa, Unknown
  Bacterial polypetide isolated from the Sargasso Sea
MKKVVLAYSGGLDTSVILKWIKETYQCEVATFTADLGQDEDFDAVKKKAEAQNVTEIFIEDLKDEFVKDYVFPMLRANPLYEGYYLLGTSIARPLIAKKQIEIANQVNADAVAHGATGKGNDQIRFELGYYYHN

SEQ ID NO: 196997 - protein, 286 aa, Unknown
  Bacterial polypetide isolated from the Sargasso Sea
ATGKGNDQVRFELGYYANNSQIKVISPWREWKLNSRNELIKFAEQYQIPISKDKRGEAPFSTDANLLHTSSEGKILEDPWIEAPDYVYSRTKSIQDSKPNPDEIIISFEKGDATAINNKKLEPHLLLTKLNEYGNQHGIGREDIVENRFLGMKSRGIYETPGGTILSKAHRAIESITLDRGEAHLKDEIMPKYAETIYNGFWFSSERNAMQKMIDETQLNVTGDVRLKLFKGNVIILGRRSPKSKYNLSLVSFDEKGDYNQRDAEGFIKINSLRLRNISNKNNKKN

SEQ ID NO: 196998 - protein, 215 aa, Unknown
  Bacterial polypetide isolated from the Sargasso Sea
ANLLHTSSEGKILEDPWQEAPEYVFSRTKSIENSKNKLDEIIISFERGDAVAINEKKMKPYEVLSKLNDYGYEHGIGREDIVENRFVGMKSRGVYETPGGTILSKAHRAIESITLDRGEAHLKDDIMPKYAETIYNGLWFSSERKAMQSMIDETQKNVSGEVKLKLFKGNVIVTGRRSPYSKYKLSLVSFDEEGDYNQKDAEGFIKIMSLRSKSN

SEQ ID NO: 196999 - protein, 200 aa, Unknown
  Bacterial polypetide isolated from the Sargasso Sea
MDQVKKVVLAYSGGVDTSVCIPYLKNEYGISEVVTFVADLGQGEDLEFIKQKALNSGASKSIIGNLVNSFVERYAFPAIRANALYLDKYPLSTALARPLIAENLVNIAREINADAVAHGCTGKGNDQVRFDLAINALGPDLKIITPAREWNMSREEAISYGEKFGIPAPVSKKSPYSIDVNLLGRSIEARYIRRPNARST

SEQ ID NO: 197000 - protein, 291 aa, Unknown
  Bacterial polypetide isolated from the Sargasso Sea
MFRANTLYEGNYLLGTAIARPLIAKRQVEIAKEVGADAVAHGATGKGNDQVRFELGYYSNNPNIKVIAPWRDWDLVSRKDLVEFAKKNQISVPKDKLGEPPFSTDSNILHTSSEGKILEDPWIEPPDHVFTRTNDLNHTPDQPDIINIEFVNGDPTKIDGKKLKPHELLSFLNIIAGKHGVGRIDIVENRFVGMKSRGVYETPGGTILIHARRAIESITLDRGEAHIKDEIMPKYAEIIYNGLWFSSERLAIQSLIDSTQSKVNGEVKVKIYKGNVIILGRRSSNSLYDTS

SEQ ID NO: 197001 - protein, 224 aa, Unknown
  Bacterial polypetide isolated from the Sargasso Sea
MKSKKRIVLAYSGGLDTSIILKWLQENYNAEIICYTADIGQKIDKKKIIFNAKKFGVKKIVINDLKNIFIKDYIFPMIRGHAIYEGNYLLGTSIARPLIAKDQIRIAKKYKAYAVSHGATGKGNDQVRFELGYHYFGPKIKVIAPWRIWKLKSRTDLINYAKKYKIEIPKDKKGAPPFSVDDNLFHTSTEGKVLENPKNSAPEFIFQRTSSPEKAPNKPSFITI

SEQ ID NO: 197002 - protein, 285 aa, Unknown
  Bacterial polypetide isolated from the Sargasso Sea
NAFAVSHGATGKGNDQVRFELGYYYFGPKIKVIAPWRIWKLKSRTDLIKYAKKHGIQIPKDKKGAPPFSIDDNLFHTSTEGKILEDPTKQAPEYIFQRTVSPEKAPNRPSYLKIGFRKGDPVSINNKRLQPAKLLKKLNFIAGKNGVGRVDLVENRFIGIKSRGVYETPGGTLLMTAHRAIESVTLDKKTMHLKDEIMPKYAELIYNGFWFSKNRYKLQKIVDLKKNKVNGFVKLKVYKGNVTILSRVSKSKAYSIKKVSFEENKSFKKSKVKRFIMGAARKLRT

SEQ ID NO: 197003 - protein, 197 aa, Unknown
  Bacterial polypetide isolated from the Sargasso Sea
GCGLKSPEQAPDKAEHIQLSFEKGELTKLNGEAVAPVKAIEVLNAIGSEHGVGRIDIVENRLVGMKSRGCYETPGGTILVAALRALESLVYDRTSLKYREEVGLEFAQLVYDGRWFTPLKDALLAAATSLADQLTGDIVVKLYKGNVTVTQRRSPNSLYSEAFATFEGDEVYNQKDAAGFIRLYSLASRIRALHSKG

SEQ ID NO: 197004 - protein, 308 aa, Unknown
  Bacterial polypetide isolated from the Sargasso Sea
SYLLGTSIARPLIAKRQIAIAKKFNAFAVSHGATGKGNDQVRFELGYYYFGPKIKVIAPWRIWKLKSRTDLIKYAKKNKISIPKDKKGAPPFSVDDNLYHTSTEGKVLEDPSKDAPEYIFQRTISPEKAPNKPSYVTIGFKKGDPVTINGKKLLPAKLLQKLNNVAGKNGIGRVDLVENRFIGIKSRGVYETPGGSLLMKAHRAMESITLDKNTMHKKDEIMPRYAELIYNGFWFSKARFKLQKIVDTKKNQVNGSIKLKLYKGNISILSRQSKNKAYSIKKVSFEENKSFKKSKVEKFISGAARKLR

SEQ ID NO: 197005 - protein, 264 aa, Unknown
  Bacterial polypetide isolated from the Sargasso Sea
MELKKKIVLAYSGGLDTSVILKWLQENYNSEVICYTADIGQQIDRKKIIKNAKKLGVKKIIIKNLKDTFVKNYVYPMIRGHAIYEGFYLLGTSIARPLIAKDQIRVAKKYKAYAVSHGSTGKGNDQLRFELGYHYFGRKIKIIAPWRIWKLKSRTDLINFAKKHQIPIPKDKKGAPPFSVDDNLFHTSTEGKILENPKNSAPEFIFQRTISPEKAPNKATFVTINFNKSDPVGINGKKLSPFKLLEKLNQLAGKNGIGRVDLVE

SEQ ID NO: 197006 - protein, 278 aa, Unknown
  Bacterial polypetide isolated from the Sargasso Sea
MDKVNKVVLAYSGGLDTSVILRWLKETYSCEVVTFTANLGQDEDYHLVEKKAAQQGVKEIFIEDLKEEFVRDYVFPMFRANPLYEGYYLLGTSIARPLIAKKQIEIVNKVGADAVSHGATGKGNDQIRFELGYYYHKPDIKIISPWREWDLTSRTSLVEYADQHGIEISKDKRGEQPFSIDENILHSSAEGKVLEDPWKEAPDYVYTRSVSPENAPDTPEEITIEFKQGDACALNGESMTPFELLKALNEMGGKHGIGRVDLVENRYIGMKSRGIYET

SEQ ID NO: 197007 - protein, 219 aa, Unknown
  Bacterial polypetide isolated from the Sargasso Sea
MKKIVLAYSGGLDTSVILKWLQNTYNCPVVTFTADIGQGEELKPVEKKAQSLGVEEIYIENLQEEFVRDYVFPMFRANTIYEGNYLLGTAIARPLIAKRQIEIAKEVGADAVAHGATGKGNDQVRFELGYYANNPKIKVISPWRDWEFETRNDLIKFAELNQIPVTKDKLGEPPFSTDANILHTSSEGKILEDPWIEPPGYVFTRVKDLLETPDEPETI

SEQ ID NO: 197008 - protein, 268 aa, Unknown
  Bacterial polypetide isolated from the Sargasso Sea
IGQEMDKTKIIKNAKKLGVKNIIIENLQNTFVKEYVFPMIRGHALYEGVYLLGTSIARPLIAKRQIAIAKKFKAFAVSHGSTGKGNDQVRFELGYYYFGPKIKVIAPWRIWKLKSRTDLIKYAKKHNIPIPKDKKGAPPFSVDDNLYHTSTEGKILEDPKKQAPEYIFQRTFSPEKAPNKPSYVTIGFKRGDPTSINNKKLSPAKLLQKLNIIAGNNGIGRVDLVENRYIGIKSRGVYETPGGTLLMIAHRAIESVTLDKKLCIKKMR

SEQ ID NO: 197009 - protein, 227 aa, Unknown
  Bacterial polypetide isolated from the Sargasso Sea
KKESPYSVDANVLHRSAEGKILEDPWKRPPENVFGISKSPLSAPNKETLITIQFKNGDPIAINGKKLSPFNLLEKLNKLGAVNGIGRIDIVENRYVGIKSRGVYETPGGTILLKAHRAMESITLDREEVFTKDELMPKYARLVYNGYWFAPERVMMQKAIDATQKRVNGEVRLALYKGNVIVIGRQSPNSLYDEDLATFETSNYDQRDSEGFIKLNALRLKKNKIKF

SEQ ID NO: 197010 - protein, 261 aa, Unknown
  Bacterial polypetide isolated from the Sargasso Sea
IGQDHDPEQVKERANAIGASKILIEDLKEEFTKNYIFPMIKANTLYEGEYLLGTSIARPLISKRLIEIAEEEGADAIAHGATGKGNDQIRFEIGSYSLNPDIQVIAPWRTWDYSSRADLVDYCKEHQIEIEASPDDPLYSTDENLLHTSYEGEILEDPSIKAPEEIWQRTSSLKDAPDEEETISIEFRSGEPISINNVIGSSSEILSELNHLAGKHGIGRLDLVENRYTGMKSRGCYETPGGTILLKAHRAIESITLDAEA

SEQ ID NO: 197011 - protein, 128 aa, Unknown
  Bacterial polypetide isolated from the Sargasso Sea
MKSRGVYETPGGTILYHAHRAIESITLDKEASHMKESISSKYAELVYNGYWFSPEREMMQALIDQSQKNVEGKVRLKLYKGNVLITGRESPLSLYNPDLATFESDEVYSQKDAEGFIKLNALRLREKK

SEQ ID NO: 197012 - protein, 166 aa, Unknown
  Bacterial polypetide isolated from the Sargasso Sea
DGKQFSPNLILEKLNQLGGRHGVGRIDLVENRFVGMKSRGIYETPGGTILLNARRAIESITLDKGESHLKDEIMPKYAESIYNGFWFSSERFAMQKLIDSTQHKVNGQVKIKLYKGNVVILGRKSENSLYDANMVSFDVKGDYHQKDAEGFIKINSIRLKKNINNN

SEQ ID NO: 197013 - protein, 237 aa, Unknown
  Bacterial polypetide isolated from the Sargasso Sea
MPKKIVLAYSGGLDTSVILKWLQVKYECTVVTFTADLGQGEELSPVKGKAQSLGVEEIFIEDLREEFVRDYVYPMFRANAIYEGTYFLGTAIARPLIAKRQIEIANIVGADAVAHGATGKGNDQVRFELGYYANKHDIKVISPWREWDLNSRNELINFAEKYQIPIAKDKRGEAPFSTDANILHTSSEGKALEDPWVEAPEHVYSRTKSLENSKEEPEEIIVSFKNGDAVAINNNNL

SEQ ID NO: 197014 - protein, 285 aa, Unknown
  Bacterial polypetide isolated from the Sargasso Sea
YLKWLQKNYDSEVIAYTADIGQEIDRKKIFRNAKKLGVKNVIIKNLKDTFVKDYVYPMIRGHSLYEGVYLLGTSIARPLIAKEQIAVAKKFKAYAVSHGSTGKGNDQIRFELGYHYFAPKIKIIAPWRIWKLNSRSDLIKYAKKYNIPIPQDKKGAPPFSVDDNLFHTSTEGKVLENPKNPAPEFVFQRTNSPEKAPNKPSFVTIGFKKGDPITVNGKKLTPSKLLENLNFIAGKNGIGRVDLVENRFIGIKSRGIYETPGGTLLINAHRAIESVTLDKETMHKK

SEQ ID NO: 197015 - protein, 265 aa, Unknown
  Bacterial polypetide isolated from the Sargasso Sea
YPMIRGHAIYEGVYLLGTSIARPLISKRQIALAKKFKAYAVSHGSTGKGNDQVRFELGYHYFGPKIKIIAPWRIWKLNSRTDLIKYAKKNKIPIPKDKKGKPPFSVDDNLFHTSTEGKVLENPRNAAPEFIFQRTISPEKAPNKPTYLSIEFKNGDPIKVNGKKLSPGNLLQKLNILAGKNGIGRVDLVENRFIGIKSRGVYETPGGTLLITAHRAVESVTLDKATMHKKDEIMPRYAELIYNGYWFSKARFKLQRIVDLKRNKV

SEQ ID NO: 197016 - protein, 263 aa, Unknown
  Bacterial polypetide isolated from the Sargasso Sea
EIAELTGADAVAHGATGKGNDQVRFELCYYALNPHIKIIAPWREWDFEGRQDLIEYAESRQIPIAKDKRGEAPFSVDANLLHASSEGKILEDPWVEGEEFIYSRTTAPEEAPDKPTYIEIGFTKGDATSIDGIAMSPATLLTRLNELGKENGIGRLDLVENRFVGMKNRGLYETPGGTILHVAHRAMESLTLDRGMAHLKDELMPRYAELIYNGFWYSPEREMLQAAIDYSQSNVSGTVRLKLYKGNTIVVGRKSEKSLYSAD

SEQ ID NO: 197017 - protein, 191 aa, Unknown
  Bacterial polypetide isolated from the Sargasso Sea
TRSVSPEEAPDKAEEITIEFKKGDACALNGKALTPFKILKSLNELGGKHGIGRVDLVENRYIGMKSRGIYETPGGTILYHAHRAIESITLDKEAAHMKDELAPKYAELIYNGYWFSPEREMMQSMIDKSQEKVEGKVRLKLFKGNTIITGRESSMSLYNPNLATFESDQVYSQKDAEGFIKLNALRLREKK

SEQ ID NO: 197018 - protein, 297 aa, Unknown
  Bacterial polypetide isolated from the Sargasso Sea
MFRANPLYEGEYLLGTSIARPLISKRMVEIARETGADAIAHGATGKGNDQVRFELGAYALSPSVKVIAPWREWDLTSRDRLLKYCAEHNIPVEKKRGKKSPYSMDANLLHISYEGDVLENPANEPEEDMWQWTVSPESAPDEATYIDLEYDRGDPVSVNGENLSPADLLYVLNKTAGAQGIGRVDIVENRYVGMKSRGCYETPGGTILLKAHRAIESITLDRELAHLKDDLMPRYVSLIYNGYWWSPEREAIQALIDQSQKFVCGRVRLKLYKGNVIVVGRESDNSLFDEDIATFEE

SEQ ID NO: 197019 - protein, 288 aa, Unknown
  Bacterial polypetide isolated from the Sargasso Sea
ARPLIAKRQIEIAKIVGADAVAHGATGKGNDQVRFELGYYANNPKIEVIAPWRDWEFESRNDLIEYAEKNQITVPKDKMGEPPFSTDSNLLHTSSEGKLLEDPWVEPPEHVFSRTNSIEKTPDAPEILTIGFSNGDPVSINQENLKPHEILAKLNLIASTHGVGRIDIVENRFVGMKSRGVYETPGGTILLIARRAMESITLDKGESHLKDELMPKYAECIYNGYWFSSERISMQKMIDAMQNRVNGYVKVKIFKGNTIILGRKSNNSLYNTSLVSFDEVGEYNQKDA

SEQ ID NO: 197020 - protein, 247 aa, Unknown
  Bacterial polypetide isolated from the Sargasso Sea
MIRGHALYEGAYLLGTSIARPLIAKRQIAIAKKFKAFAVSHGSTGKGNDQVRFELGYYYFGPKIKVIAPWRIWKLKSRTDLIRYAKKNKITIPKDKKGAPPFSVDDNLYHTSTEGKILEDPKKSAPEYIFQRTVAPEKAPNKASFVTIGFKKGDPVSINNKKFSPAKLLEKLNFIAGKNGIGRVDLVENRFIGIKSRGVYETPGGTLLMIAHRAMESVTLDKKTMHQKDEIMPRYAELIYNGFWFSK

SEQ ID NO: 197021 - protein, 138 aa, Unknown
  Bacterial polypetide isolated from the Sargasso Sea
MKKIVLAYSGGLDTSIILRWLQENYEAEVIAYTSDIGQEINRKKIITNAKRLGVKNIIIEDLKKIFVKDYVFPMIRAHAVYEGVYLLGTSIARPLIAKRQIAIAKKFKAYAVSHGATGKGNDQVRFELGYAFFGGKKI

SEQ ID NO: 197022 - protein, 244 aa, Unknown
  Bacterial polypetide isolated from the Sargasso Sea
MSEIKKVVLAYSGGLDTSVIARWLQQVYQCEVVTFTADIGQGEEVEPARKKAEAMGIKEIYIEDLKEEFVRDFVFPMFRSNPLYEGEYLLGTSIARPLIAKRMVEIVKETGADAIAHGATGKGNDQVRFELGAYALSPSIKVIAPWREWDLTSRDRLLKYCAEHDIPVEKKRGAKSPYSMDANLLHISYEGDVLENPANEPEEDMWQWTISPENAPDKPTYIDLAYEKGDPISINDQALSPAGF

SEQ ID NO: 197023 - protein, 319 aa, Unknown
  Bacterial polypetide isolated from the Sargasso Sea
FRANTLYEGGYLLGTAIARPLIAKRQIEIANEVGADAVAHGATGKGNDQVRFELGYYANNSNIKVIAPWRDWDFESRKDLIEFAKKNQIEVTKDKMGDPPFSTDANLLHTSSEGKILEDPWVEPPEYVYTRTNNIKETPDDPEIITIEFKKGDPVSLNKINQKPHEILTNLNLIAGKHGVGRIDIVENRFVGMKSRGVYETPGGTILINAHRAIESITLDRGEAHLKDEIMPKYAEAIYNGLWFSSERIAMQKLIDSSQVNVNGFVKLKIFKGNVIVVGRKSENSLYDNTLVSFDEKGDYDQKDAEGFIKINSLRLKNK

SEQ ID NO: 197024 - protein, 291 aa, Unknown
  Bacterial polypetide isolated from the Sargasso Sea
MVPKNKSKIVLAYSGGLDTSIILKWLQENYNSEVIAYTADIGQEIDKKKIIKNAKRLGVKNIIIEDLKNNFVKDYVFPMVRGHALYEGTYLLGTSIARPLIAKRQIAVAKKFKAFAVSHGATGKGNDQVRFELGYYYFGPKIKVIAPWRIWKLKSRTDLIRYAKKHKIPIPKDKKGAPPFSVDDNLYHTSTEGKVLEDPKKQAPEYIFQRTVSPEKAPKKPSYVTIGFKKGDPVSVNNKKLAPAKLLQKLNLVAGKNGIGRVDLVENRFIGIKSRGVYETPGGTLLMTAHR

SEQ ID NO: 197025 - protein, 158 aa, Unknown
  Bacterial polypetide isolated from the Sargasso Sea
MNKIILAYSGGLDTTVILKWLQENYDAEVITYTADLGQNDLRDDVEDKASQAGASHSIVEDIKDDFVKNFVFPMFRGNAIYEGEYLLGTSIARPLIAKRLVEIAKEEGAQFISHGATGKGNDQIRFELGVYGLAPELKIISPWREWDLVSRKDLVKYC

SEQ ID NO: 197026 - protein, 125 aa, Unknown
  Bacterial polypetide isolated from the Sargasso Sea
KSRGVYETPGGTILAKAHRAIESITLDRGEAHLKDEIMPKYAETIYNGLWFSSERLSMQSLIDSTQKTVTGDVRLQLFKGNVIVKGRRSPFSKYNLSLVSFDEAGDYNQRDAEGFIKINSLRLKH

SEQ ID NO: 197027 - protein, 207 aa, Unknown
  Bacterial polypetide isolated from the Sargasso Sea
MSKEKVVLAYSGGLDTSVIVHWLASQGYDVIALCLDLGQKVENLDEIRQKGLKAGAVDVLIEDVRKEFVEDYVFRAIEWNAVYEGTYLLGTSLARPLISKKQIEAAERFGASTVSHGATGKGNDQVRFELGYYALNPDIKIIAPWKVPEFYQRYPGRAQLIEYAQQNGIPVKATAEQPWSTDENLMHISFESGMLEDPWQEPKEEMF

SEQ ID NO: 197028 - protein, 175 aa, Unknown
  Bacterial polypetide isolated from the Sargasso Sea
MNLNKRIVLAYSGGLDTSIILKWLQENYKAEVIAYTADIGQEIDRKKIIKNAKKLGVKKIIINDLKDTFVKNYVYPMIRGHAIYEGVYLLGTSIARPLIAKDQIRIAKKYKAYAVSHGSTGKGNDQVRFELGYHYFSPKIKIIAPWRIWKLKSRTDLINYAKKHGIEIPKDKKGA

SEQ ID NO: 197029 - protein, 264 aa, Unknown
  Bacterial polypetide isolated from the Sargasso Sea
WLFLFGPKIKVIAPWRIWKLKSRSDLIKYAKKHNIPIPKDKKGAPPFSVDDNLYHTSTEGKVLEDPKKQAPEYIFQRTVSPEKAPNKPSYVTIGFKRGDPVSVNNKKLPPAKLLKKLNILGGKNGIGRVDLVENRFIGIKSRGVYETPGGTLLMTAHRAIESITLDKKTMHQKDAIMSKYAELIYNGFWFSKARFKLQKIVDLKKNKVNGSVRLKIYKGNITILSRQSKSNAYSLEKVSFEENKSFKKSKVERFISGAARKLRA

SEQ ID NO: 197030 - protein, 172 aa, Unknown
  Bacterial polypetide isolated from the Sargasso Sea
MKSKKRIVLAYSGGLDTSIILKWLQENYSAEVICYTADIGQEINKKKIISNAKKFGVKKIIIKDLKNEFVKNYVFPMLRGHAVYEGVYLLGTSIARPLIAKDQIRVAKKYKAYAVSHGSTGKGNDQVRFELGYHYFGPSIKIIAPWRIWKLKSRTDLINYAKQNGISIPRDK

SEQ ID NO: 197031 - protein, 176 aa, Unknown
  Bacterial polypetide isolated from the Sargasso Sea
DVVAIDGHRLSPAEVLAKLNERGGANGIGRADIVENRYVGMKSRGCYETPGGSILLRAHRAIESITLDREVAHLKDELMPRYAKLIYNGYWWSPERHALQAAIDQTQSVVNGDVRVALYKGNVTVTGRRSADSLFDEHIATFEADGGAYDQADAEGFIKLNALRLRIAANKGRQHH

SEQ ID NO: 197032 - protein, 267 aa, Unknown
  Bacterial polypetide isolated from the Sargasso Sea
MQKDLGVKKVIIENLKNVFVKDYVFPMIRAHALYEGVYLLGTSIARPLIAKRQIEIAKKFKAFAVSHGATGKGNDQVRFELGYAFFGKKIKVIAPWREWKLQSRTDLIKYAKKYKIPIPKDKKGAPPFSVDDNLFHVSTEGKVLENPKNSPPEFIFQKTISPEKAKNKSTRVKIGFKNSDPVSINGKKYKPELLLEKLNKIGGANGVGRVDLVENRFIGIKSRGVYETPGGTILYCAHRAMESVTLDKATMHTKERIMPLYAELVYN

SEQ ID NO: 197033 - protein, 312 aa, Unknown
  Bacterial polypetide isolated from the Sargasso Sea
IYYFKWLQENYDSEVIAYTADIGQEMDRKKIVKNAKKLGVKKIIINNLKNTFVKEYVFPMIRGHAIYEGVYLLGTSIARPLIAKDQIKVAKKFKAFAVSHGSTGKGNDQVRFELGYHYFGPKIKVIAPWRIWKLKSRTDLINYAKKHNIPIPKDKKGAPPFSVDDNLFHTSTEGKVLENPKNSAPEFIFQRTTSPEKAPNKPTYVSIGFKNSDPVSINGKKLNPEKLLEKLNQIGGKNGVGRVDLVENRFIGIKSRGVYETPGGTLLLIAHRAMESVTLDKDTMHKKDSIMPRYAELIYNGYWFSKERFKLQ

SEQ ID NO: 197034 - protein, 299 aa, Unknown
  Bacterial polypetide isolated from the Sargasso Sea
YVFPMVRAHAVYEGIYLLGTSIARPLIGKRQIQIAKKFKAFAVSHGATGKGNDQVRFELAYAYFGKKIKVIAPWREWKLKSRTDLINYAKKNKIPIPKDKKGAPPFSVDDNIFHTSTEGKILENPKNSAPEFIFQRTKSLEKTPNKATIVKIDFKNGDPISINGKKLSPEKLLHKLNQIGGNNGVGRVDLVENRFIGIKSRGVYETPGGTILYIAHRAIESVTLDKETMHEKERIMPVYAELVYNGYWFSKKRTKLQKIIDKKRNLVAGQVVLKIFKGNVIIISRKTENKAYSMKKFLL

SEQ ID NO: 197035 - protein, 306 aa, Unknown
  Bacterial polypetide isolated from the Sargasso Sea
ALYEGTYMLGTSLARPLIAKKQIKIAEMEGASVVSHGATGKGNDQVRFELSYYALKPDIRVIAPWKIPDFYKKYPGRSELLEYAKKFGIPVKATKENPWSSDENLMHISFESGMLEDPWQAPIPEMFELSNSPQKGPPDPQEIIIKFKNGNPIEINEKKYSPAKLLRKLNELGGKHGIGRADVVESRFVGMKNRGVYETPGGTILHIAHRAIESITLSRGVINLKDSLMPRFAQLTYDGFWFSPEMEILLDMVKKTQEPVNGTVRLELFKGNCIVTGRKSPNSLYVEDIATMEADNGAYDPEEMLL

SEQ ID NO: 197036 - protein, 246 aa, Unknown
  Bacterial polypetide isolated from the Sargasso Sea
MENVSVSEINKVVLAYSGGLDTSVIVKWLQQEYQCEVVTFTADIGQGEELEPARKKAEAMGIKQIFIEDLREEFVRDYVFPMFRANPLYEGEYLLGTSIARPLISKRMVEIAQETGADAIAHGATGKGNDQVRFELGAYALSPSMKVIAPWREWDLTSRDRLLKYCAEHNIPVEKKRGKKSPYSMDANLLHISYEGDVLENPANEPEEDMWQWTVSPESAPDRAIYIDLEYDKGDPVSVNGESLSP

SEQ ID NO: 197037 - protein, 188 aa, Unknown
  Bacterial polypetide isolated from the Sargasso Sea
EKPTYEELTYKKGDIVAVDGQEMKPHVVLETLNKLAGENGIGRLDIVENRYVGMKSRGCYETPGGTIMLRAHRAIESITLDREVAHLKDSLMPRYAEVIYNGYWWSPEREALQALIDQTQNYVNGTVRLKLYKGNVDVVGRKSDDSLFDEKIATFEEDQGAYDQKDAEGFIKLNALRLRIAAGKGRKL

SEQ ID NO: 197038 - protein, 178 aa, Unknown
  Bacterial polypetide isolated from the Sargasso Sea
ICYTADIGQELNKKKIVNNAKNLGVKNIIIEDLQDEFVKEYVFPMIRGHAVYEGVYLLGTSIARPLIAKAQIKVAKKLKAYAVSHGSTGKGNDQVRFELGYHFFSPKMKVIAPWRIWKLSSRTDLIKYAKKNKIPIPKDKKGEPPFSIDDNLFHTSTEGKVLENPKNQAPEFIFQRTT

SEQ ID NO: 197039 - protein, 138 aa, Unknown
  Bacterial polypetide isolated from the Sargasso Sea
MKSKKKIVLAYSGGLDTSIILKWLQENYDADVICYTADVGQEIDRKKIITNAKKFGVKNIIIKDLKDIFIKDYVYPMIRGHAIYEGVYLLGTSIARPLIAKDQIRVAKKFKAYAVSHGATGKGNDQVRFELGYHYFGL

SEQ ID NO: 197040 - protein, 172 aa, Unknown
  Bacterial polypetide isolated from the Sargasso Sea
MKKKKIVLAYSGGLDTSVILHWLKAEYNADVIAYIADLGQGEDLKLAAKRAKQVGATKVYVEDLKKEFINDFIYPMIQSSAIYEGTYLLGTSIARPLIAKRQIEIANKEKAFAVSHGSTGKGNDQVRFELAFHALNPKIEIISPWRVWNYKSREDCIEYAKKNKIPITGQSK

SEQ ID NO: 197041 - protein, 260 aa, Unknown
  Bacterial polypetide isolated from the Sargasso Sea
MSKEKVVLAYSGGLDTSVIVHWLASQGYDVIALCLDLGQKVENLDEIRQKGLKAGAVDVLIEDVRKEFVEDYVLRAIEWNAVYEGTYLLGTSLARPLISKKQIEVAERFGASTVSHGATGKGNDQVRFELGYYALNPDIKIIAPWKVPEFYQRYPGRAQLIEYAQQNGIPVKATAEQPWSTDENLMHISFESGMLEDPWQEPKEEMFELSQSLKNAPDQEQVLTIDFEEGLPVRLDRHQFEPVELLTELNEIGGRHGIGR

SEQ ID NO: 197042 - protein, 287 aa, Unknown
  Bacterial polypetide isolated from the Sargasso Sea
DVGQEIDRKKIITNAKKLGVKNIIIKDLKDIFVKDYVYPMIRGHAIYEGVYLLGTSIARPLIAKDQIRVARKFKAYAVSHGATGKGNDQVRFELGYHYFGPKIKIIAPWRIWKLKSRTDLINYAKKHGIAIPKDKKGAPPFSVDDNLFHTSTEGKVLENPKNSAPEFIFQRTVAPEKAPNKPSFITINFKNGDPFGVNGKKISPAKLLTKLNDLAGKNGIGRVDLVENRFLGIKSRGVYETPGGTLLIHAHRAIESVTLDKETMHKKNQIMSRYAELIYNGYWYQKK

SEQ ID NO: 197043 - protein, 232 aa, Unknown
  Bacterial polypetide isolated from the Sargasso Sea
MKSKKRIVLAYSGGLDTSIILKWLQENYNAEVICYTADIGQEIDKKKIILNAKKLGVKNIIIKDLKNIFIKDYVFPMLRGHAVYEGVYLLGTSIARPLIAKDQIRVAKKYKAYAVSHGSTGKGNDQIRFELGYHYFGPKIKIIAPWRIWKLKSRTDLINYAKKKGIPIPKDKKGAPPFSVDDNLFHTSTEGKVLENPKNSPPEFIFQRTTSPEKAPNKPTFISINFRNGDPM

SEQ ID NO: 197044 - protein, 219 aa, Unknown
  Bacterial polypetide isolated from the Sargasso Sea
MHISYEGNALEDPWVEYSEDMFTRSVSPENAPDAPTYIEVDFEKGDPVAIDGVRYSPADMLAKLNELGGANGIGRLDIVESRFVGMKSRGVYETPGGTILLAVRRALETVCLDRGEMHYKDEMMPQYAELVYNGFWFSPEREMMQAAIDKCSESVTGTVRAKLYKGNVIVVGRKADNTLYDDRLSTFEEDGGAYDQKDAAGFIKLQALRLRTLKAAREK

SEQ ID NO: 197045 - protein, 157 aa, Unknown
  Bacterial polypetide isolated from the Sargasso Sea
MKKIVLAYSGGLDTSIILRWLQENYKAEVIAYTSDIGQEIDKKKIIRNAKRLGVKKIIIEDLKNIFVKDYVFPMVRAHAVYEGVYLLGTSIARPLIAKRQIKIAKKFKAYAVSHGATGKGNDQVRFELGYAFFGGKKIKTIAPWREWKLQSRADLIK

SEQ ID NO: 197046 - protein, 305 aa, Unknown
  Bacterial polypetide isolated from the Sargasso Sea
MKKQKKIVLAYSGGLDTSIILKWLQENYDSEVIAYTADVGQEMDKKKIIKNAKKLGVKKIIIQDLKNIFVKDYVYPMIRGHALYEGVYLLGTSIARPLIAKDQIRVAKKFNAYAVSHGSTGKGNDQVRFELGYHYFGPKIKIIAPWRIWKLKSRTDLINYAKKHGIPIPKDKKGAPPFSVDDNLFHTSTEGKVLENPKNSAPEFIFQRTTSPEKAPNKPSFITINYKNGDPIGLNGKKLSPAKVLDKLNQLAGKNGIGRVDLVENRFIGIKSRGVYETPGGTLLLIAHRAIESVTLDKDTMHKKD

SEQ ID NO: 197047 - protein, 309 aa, Unknown
  Bacterial polypetide isolated from the Sargasso Sea
SIILKWLQENYKAEVICYTADVGQAIDKKKIFKNAKKFGVKNIIIQDLKDTFVKDYVYPMIRGHAIYEGVYLLGTSIARPLIAKDQIRVAKKFKANAVSHGATGKGNDQVRFELGYHYFGPKIKIIAPWRIWKLKSRTDLINYAKKHGIPIPKDKKGAPPFSVDDNLFHTSTEGKVLENPKNSAPEFIYQRTISPEKAPNKPSFVNIHFKNGDPFGINGKKMSPAKLLTKLNDLAGKNGIGRVDLVENRFLGIKSRGVYETPGGTLLINAHRAIESVTLDKETMHKKDQVMSRYAELIYNGLWVFKGKI

SEQ ID NO: 197048 - protein, 136 aa, Unknown
  Bacterial polypetide isolated from the Sargasso Sea
MKKIILAYSGGLDTTVILKWLQENYDAEVITYTADLGQNDLRDDVEDRASQAGASHSIVEDLRDDFVKNYVFPMFRGNAIYEGEYLLGTSIARPLIAKRLVEIAREEGAQFISHGATGKGNDQIRFELGVYGLAPE

SEQ ID NO: 197049 - protein, 170 aa, Unknown
  Bacterial polypetide isolated from the Sargasso Sea
QFNGEAVAPVKAIELLNAIGSEHGVGRIDIVENRLVGMKSRGCYETPGGTILVAALRALESLVYDRTSLKYREEVGLEFAQLVYDGRWFTPLKDALLAAATSLADQLTGDIVVKLYKGNVTVTQRRSPNSLYSEAFATFEGDEVYNQKDAAGFIRLYSLASRIRALHSKG

SEQ ID NO: 197050 - protein, 292 aa, Unknown
  Bacterial polypetide isolated from the Sargasso Sea
NFIFPMFRANTLYEGNYLLGTAIARPLIAQKQIEIAKKYNASYVSHGATGKGNDQIRFELGYYYHNSRIRVIAPWREWELNSRAKLISYAHKNNIPVPGSKKKEPPYSMDANLLHISYEGKILEDPWKQPDKKMFRITKDPEKCNKEGETILISFNKGDVVKINNKKVSPYETLNILNNIGGRNGIGRKDLVENRTIGMKSRGVYETPGGTILLDAHRAIESLTLDGPTINLKDEIMPKYARLIYDGLWFSPEREMLQALINKSQERVSGDVKVFVRQGNLVIKGRKSKYSL

SEQ ID NO: 197051 - protein, 135 aa, Unknown
  Bacterial polypetide isolated from the Sargasso Sea
MNKKKKIVLAFSGGLDTSIILKWLQNEMDAEVVTFTADIGQGIEIEEAKKKAKLLGVKKIFIEDLKEEFVKNYVFPMFRANAIYEGFYLLGTSIARPLIAKRQIEIAKKVNANFVAHGATGKGNDQIRFELGYYA

SEQ ID NO: 197052 - protein, 236 aa, Unknown
  Bacterial polypetide isolated from the Sargasso Sea
MPKKIVLAYSGGLDTSVILKWLQEKFECPVVTFTADLGQGEELSPIKNKAESLGVKEIFIEDLKEEFVQNYVFPMFRANALYEGMYFLGTAIARPLIAKKQIEIAKEVGADSVAHGSTGKGNDQVRFELGYYANNPKINVISPWREWELSSRKDLISFAEKHQINIPKDKRGDAPFSTDANLLHTSSEGKILEDPWVGAPEYIYSRTKSLEDANSKPDEIIISFEKGDPVSINEKK

SEQ ID NO: 197053 - protein, 140 aa, Unknown
  Bacterial polypetide isolated from the Sargasso Sea
MVCGRVDLVENRFLGIKSRGVYETPGGTLLMIAHRAIESITLDKSTMHLKENIMFKYAELIYNGFWFSKERFKLQKIIDKKKNKVNGSVKLKLYKGNITIISRISKSKAYSVKNVSFEENKSFNKKNVEKFINFHKKKLM

SEQ ID NO: 197054 - protein, 207 aa, Unknown
  Bacterial polypetide isolated from the Sargasso Sea
MKKIVLAYSGGLDTSIILRWLQKNYNAEIIAYTSNIGQVLDKKKIIKNAKRLGVKKIIIENLKNIFVKDYVFPMIRAHAVYEGVYLLGTSIARPLIAKRQVEIAKKFKAFAVSHGATGKGNDQVRFELGYSYFGKNKIKTIAPWREWKLQSRADLIRYAKKNNIPIPKDKKGAPPFSVDDNIFHTLTEGKVLEDPKNSAPEFIFIKT

SEQ ID NO: 197055 - protein, 304 aa, Unknown
  Bacterial polypetide isolated from the Sargasso Sea
VKKIIINNLKNTFVKEYVFPMIRGHAIYEGVYLLGTSIARPLIAKDQIKVAKKFKAFAVSHGSTGKGNDQVRFELGYHYFGPKIKVIAPWRIWKIKSRTDLINYAKKHNIPIPKDKKGAPPFSVDDNLFHTSTEGKVLENPKNSAPEFIFQRTTSPEKAPNKPTYISIGFKNSDPVSINGKKLNPEKLLEKLNQIGGKNGVGRVDLVENRFIGIKSRGVYETPGGTLLLIAHRAIESVTLDKDTMHKKDSIMPRYAELIYNGYWFSKERFKLQKIVDLKRSKVNGSVKLKLYKGNVTINREYKK

SEQ ID NO: 197056 - protein, 255 aa, Unknown
  Bacterial polypetide isolated from the Sargasso Sea
APWREWNLNSRSKLIEYALEHQIPVPKDKEGEAPYSTDANLLHISYEGKALEDPWAEPPSNIFTRTSSPEDAPQTAEVIDIGFNKGDATSIDGEKLSPASLLTKLNSLGGKHGIGRIDIVENRFVGMKSRGVYETPGGTILLAARRAIESLTLDKGASHLKDELMPRYAELVYNGFWFSPERKMLQAAIDSCQENVTGDVRIKLYKGNVIILGRKSPNSLYDLDTVTFEEDEVYDQKDAEGFIKLNALRLRLSKN

SEQ ID NO: 197057 - protein, 259 aa, Unknown
  Bacterial polypetide isolated from the Sargasso Sea
MKSKKRIVLAYSGGLDTSIILKWLQENYKAEVICYTADIGQEIDKKKIISNARKLGVKNIIIKDLKNIFIKDYVFPMLRGHAVYEGVYLLGTSIARPLIAKDQIKVAKKYKAYAVSHGSTGKGNDQVRFELGYHYFGPKIKIIAPWRIWKLKSRTDLINYAKKNKISIPKDKKGAPPFSVDDNLFHTSTEGKVLENPKNSAPELIFQRTVSPEKAPNKPTFVSINFRNGDPMGVNGKKLTPAKLLEKLNQLAGKNESRE

SEQ ID NO: 197058 - protein, 136 aa, Unknown
  Bacterial polypetide isolated from the Sargasso Sea
MVENRFVGMKSRGVYETPGGTILLNARRAIESITLDKGEAHLKDELMPKYAEVIYNGFWFSPERISMQKLIDSMSHKVNGDVKIKVFKGNVIILGRKSSNSLYDNSLVSFDEVGEYNQKDAEGFIKINSIRLRKNK

SEQ ID NO: 197059 - protein, 216 aa, Unknown
  Bacterial polypetide isolated from the Sargasso Sea
GQGEEVEPARKKAELLGVKEIFIDDLKEEFVKDFVFPMFRANALYEGIYLLGTSIARPLIAKRQIEIANLTNADAVSHGATGKGNDQVRFEIGYYSLKPDIKVISPWREWDLSSRTELISYAEKNQIQVPKDKRGEAPFSVDANLLHVSAEGKILEDPWIEPEEFIYSRTKSPFEAPNKLTEIILEFKDGDPISLNGKDLSPAKMLHELNVLGGNN

SEQ ID NO: 197060 - protein, 163 aa, Unknown
  Bacterial polypetide isolated from the Sargasso Sea
MSKKIVLAYSGGLDTSIILKWLQENYNAEVIAYTSDIGQELDKKKIIRNAKKLGVKKIIINDLKNIFVKDYVFPMIRGHAIYEGVYLLGTSIARPLIAKDQIKVAKKYKAYAVSHGSTGKGNDQVRFELGYHYFGPKIKVIAPWRIWKLKSRTDLINYAKKHG

SEQ ID NO: 197061 - protein, 250 aa, Unknown
  Bacterial polypetide isolated from the Sargasso Sea
RGHAIYEGVYLLGTSIARPLIAKDQIRVAKKFKAYAVSHGATGKGNDQVRFELGYHYFGPKIKIIAPWRIWKLKSRTDLIDYAKKHSIAIPKDKKGAPPFSVDDNLFHTSTEGKVLENPKNYAPEFIFQRTVSPEKAPNKPSFVTINFKNGDPFGINGKKLSPAKLLTKLNDLAGKNGIGRVDLVENRFLGIKSRGVYETPGGTLLINAHRAIESVTLDKETMHKKDQIMSRYAELIYNGYWYSKERFKL

SEQ ID NO: 197062 - protein, 313 aa, Unknown
  Bacterial polypetide isolated from the Sargasso Sea
MPKKIVLAYSGGLDTSVILKWLQQKYKCPIAAYTADVGQNDDFNEINSKAKNLGVEEICIDDLKEEFVKDYVFPMFRANALYEGVYLLGTAIARPLIAKKQIEYAIKIGADAVAHGSTGKGNDQVRFEIGYFATNPKIQIIAPWRIWDFKSREDLIVFAQKHQISVPKDKIGEPPFSVDENVLHTSAEGKVLEDPWNSPPDYIFSRTKSIEEASSLSDEITIFFENGDPKMINDEKHSPFDILSKLNDFGFKHGIGRVDIVENRFIGMKSRGIYETPGGTILLQAHRAIESITLDRETAHKKDSIVSEYADLI

SEQ ID NO: 197063 - protein, 280 aa, Unknown
  Bacterial polypetide isolated from the Sargasso Sea
YEEEYPLATALGRPLIAKCLVDVAKAEGAYAIAHGCTGKGNDQVRIEVSAAALMPGIKLIAPIRDWGMSRADEIDYANERNLPINVKDSRFSVDENLWGRSAEAGELEDPGLEPPEEAFTWTISPDKSSQDKEYIEIRFVEGIPVSINNKDMDGVELIVELNRIAGNHGIGRIDHVENRLVGIKSREIYESPAGIVLHSAHKALEDLTLSRDQARFKHNVSREYSEIVYNGLWFSRHRLNLDRYIEDTQKYVSGTVQMSLYKGKCTVTGRQSNHGLYSKT

SEQ ID NO: 197064 - protein, 284 aa, Unknown
  Bacterial polypetide isolated from the Sargasso Sea
LLGKGNDQVRFELGYYSLNPKIRVIAPWREWDLNSRKKLIEYAENNQISIQKDKSGEDPYSVDANLLHISAEGKILEDPWVEPNELVYSRTKSPMDAPNSVTEITLRFYRGDPVELNNEKMSPANLLDKLNKLGGDNGIGRIDIVENRFVGMKSRGIYETPGGTILFHMRKAIESITIDKGASHLKDELMPKYAELIYNGFWFAPEREMLQKAIDLSQINVNGIVRAKLYKGNVIISGRKSPNSLYDEDLVTFEKGSIDYNHHDAEGFIKLNALRLMMNKIKQD

SEQ ID NO: 197065 - protein, 145 aa, Unknown
  Bacterial polypetide isolated from the Sargasso Sea
DLVENRYVGMKSRGIYETPGGTILMTARRGMESITLDRGAAHLKDELMPRYAELVYNGFWFSPEREMIQAAVDESQKFVAGTVRLKLYKGLVSVVGRKSLNSLYSESHVTFEADTVYNQRDAQGFIKLNALRLKLLQAAQKRFTT

SEQ ID NO: 197066 - protein, 138 aa, Unknown
  Bacterial polypetide isolated from the Sargasso Sea
MGRANKVVLAYSGGVDTSVCIPYLKQEWGVEEVITFAADLGQGDELEPIRQKALDAGASQSLVGDLIQPFIEEFAFPAIRANALYEGRYPLSTALARPLIARRLVEVAREVGADAVAHGCTGKGNDQVRFDVAIAALA

SEQ ID NO: 197067 - protein, 259 aa, Unknown
  Bacterial polypetide isolated from the Sargasso Sea
MKKIVLAYSGGLDTSIILRWLQKNYNAEIIAYTSDIGQVLDKKKIFKNAKRLGVKKIIIENLKNIFVKDYVFPMMRAHAVYEGVYLLGTSIARPLIAKRQIEIAKKFKAFAVSHGATGKGNDQVRFELGYAYFGKNKIKTIAPWREWKLQSRADLIKYAKKNKIPIPKDKKGAPPFSVDDNIFHTSTEGKVLEDPKNPAPEFIYQRTVSPQKAPNKPTKVKITFKNSDPIAVNGKKLNPEKLLSKLNILAGKNGIGRVD

SEQ ID NO: 197068 - protein, 286 aa, Unknown
  Bacterial polypetide isolated from the Sargasso Sea
LPSQGYDVIALCLDLGQKVENLDEIRQKGLKAGAVDVLIEDVRKEFVEDYVFRAIEWNAVYEGTYLLGTSLARPLISKKQIEAAERFGASTVSHGATGKGNDQVRFELGYYALNPDIKIIAPWKVPEFYQRYPGRAQLIEYAQQNGIPVKATAEQPWSTDENLMHISFESGMLEDPWQEPKEEMFELSQSPKNAPDQEQVLTIDFEEGLSVRLDGQEFAPVDLLTELNEIGGRHGIGRVDLVESRFVGMKSRGVYETPGGTILNIAHRAMESLTLDRGVIHLKDSL

SEQ ID NO: 197069 - protein, 313 aa, Unknown
  Bacterial polypetide isolated from the Sargasso Sea
MAQKKYYIENLKEEFVRDYVFPMFRCNTIYEGEYLLGTSIARPLIAKRQIEIAKKEKANAVSHGATGKGNDQVRFEFSYYALEPKIKVIAPWREWNLSSRTKLLEFAAKNNIPIMKHNKKESPYSVDANVLHRSAEGKILEDPWKRPPENVFGISKSPQSAPNKETVITIQFKNGDPIAINGKKLSPFNLLEKLNKLGAANGIGRVDIVENRYVGIKSRGVYETPGGTILLKAHRAMESITLDREEVFTKDELMPKYARLVYNGYWFAPERVMMQKAIDATQKRVNGQVRLALYKGNVIVIGRQSPNSLYDED

SEQ ID NO: 197070 - protein, 264 aa, Unknown
  Bacterial polypetide isolated from the Sargasso Sea
YYHKPDIKIISPWREWDLSSRTSLVEYADKHGIEIAKDKRGEQPFSIDENILHSSAEGKVLEDPWVEAPDYVYTRSVSPEEAPDNAEEITIEFKKGDACALNGKALTPFEILKSLNELGGKHGIGRVDLVENRYIGMKSRGIYETPGGTILYHAHRAIESITLDKEAAHMKDELAPKYAELVYNGYWFSPEREMMQSMIDKSQEKVDGKVRLKLFKGNTMITGRESSLSLYNPNLATFESDQVYSQKDAEGFIKLNALRLREKK

SEQ ID NO: 197071 - protein, 310 aa, Unknown
  Bacterial polypetide isolated from the Sargasso Sea
ENTFVKDYVFPMFRCNTIYEGMYLLGTSIARPLIAKRQIEIAKFEGADAVAHGATGKGNDQVRFELSYLAQDPDIKIIAPWREWELSSRTKLIEYAEKHQITISKDKRGEAPFSVDANLLHVSAEGKILEDPWIEPEEYIYSRTVNPMEAPDKPTEITIEFSKGDPIALNHKKLEPAQILKKLNEFGGKNGIGRIDIVENRFVGMKSRGVYETPGGTILLYARRAMESITLDREEAHLKDEIMPKFAKLIYNGFWFSPEREMMQALIDKASMNVNGVVRLKLYKGNIIITGRKSEYSLYDESLVTLKTAT

SEQ ID NO: 197072 - protein, 252 aa, Unknown
  Bacterial polypetide isolated from the Sargasso Sea
MKKIRKIVLAYSGGLDTSIILKWLQETYKAEVIAFTADIGQKINRKKIINNAKKLGVKKIIIENLKNTFVKDYIFPMIRGHAIYEGVYLLGTSIARPLIAKRQIAVAKKFNAYAVSHGSTGKGNDQIRFELGYHYFGPKIKIIAPWRIWKLNSRTDLIKYAKKNRIPIPKDKKGAPPFSVDDNLYHTSTEGKLLENPKNAAPEFIFQRTNSPEKSPKKVSFVTIEFKNGDPIKVNGKKLSPGILLQKLNILA

SEQ ID NO: 197073 - protein, 177 aa, Unknown
  Bacterial polypetide isolated from the Sargasso Sea
MSAIKKIVLSYSGGLDTTAILKWLQQTYECEVVTFTADLGDGDDYSHVREKALETGAVDAYVDDVREEFVRDFVYPMFRCNTIYEGVYLLGTSIARPLITKRLVEIAEETGADAIAHGATGKGNDQVRFELGAYALKPNIQVVAPWREWDLTSRESLMQFCEKHQIPVDRKHEGEKS

SEQ ID NO: 197074 - protein, 181 aa, Unknown
  Bacterial polypetide isolated from the Sargasso Sea
MKKIVLAYSGGLDTSVILKWLQNTYKCSVVTFTADIGQGEELSPVERKAKNLGVKEIFIENLQEEFVKDYVFPMFRANTIYEGTYLLGTAIARPLIAKRQIEIAKLVGADTVAHGATGKGNDQVRFELGYYANNPNIKVIAPWREWDFESRNDLIDYARKNQIEVAKDKIGEPPFSTDANL

SEQ ID NO: 197075 - protein, 113 aa, Unknown
  Bacterial polypetide isolated from the Sargasso Sea
MDKMKIVLAYSGGLDTSVICRWLQETYDAEVVTFTADIGQGGEVEPARAKAQQMGVKEIYIEDLTEQFVSEYVFPMLRANTVYEGEYLLGTSIARPLIAKRLVEIAEETGAQA

SEQ ID NO: 197076 - protein, 240 aa, Unknown
  Bacterial polypetide isolated from the Sargasso Sea
MSDINKVVLAYSGGLDTSVIAKWLQTTYQCEVVTFTADIGQGEEVEPARAKAMAMGIEVIYIEDLREEFVSDYVFPMFRANAIYEGEYLLGTSIARPLIAKRLVEIARETGADAISHGATGKGNDQVRFELGAYALSPDIQIIAPWREWDLNSREKLLAYCETHAIPVEKKRGGKSPYSMDANLLHISYEGDVLEDPAAEPEETMWLWSVAPEAAPDQPVYLDLTYQRGDIVAINGETLS

SEQ ID NO: 197077 - protein, 254 aa, Unknown
  Bacterial polypetide isolated from the Sargasso Sea
MQQVNKVVLAYSGGVDTSICIPYLKNEYGISEVVTFVADLGQGEDLELIRQKALNSGASKSIVGNLVNNFVESYAFPAIRANALYLDKYPLSTALARPLIAENLVNIAREFNADAVAHGCTGKGNDQVRFDLAINALGPDLKIITPAREWNMSREEAIVYGEKFGIPAPVSKKSPYSIDVNLLGRSIEAGILEDPMKEAPEDIFAMTSSIENSPDSPQEVEIIFKNGFPVGINDESLTPVEIIKKANVLAGEHG

SEQ ID NO: 197078 - protein, 175 aa, Unknown
  Bacterial polypetide isolated from the Sargasso Sea
VNTAREFSADAVAHGCTGKGNDQVRFDLAINALGPDLKIITPAREWNMSREEAIVYGEKFGIPAPVSKKSPYSIDVNLLGRSIEAGILEDPMKEAPEDIFAMTSSIENSPDSPQEVEIIFKNGFPVGINDESLTPVEIIKKANVFAGEHGFGRIDMIEDRVVEIKSREIYETPGL

SEQ ID NO: 197079 - protein, 229 aa, Unknown
  Bacterial polypetide isolated from the Sargasso Sea
QVKERANAIGASKILIEDLKEEFTKNYIFPMIKANTLYEGEYLLGTSIARPLISKRLIEIAEEEGADAIAHGATGKGNDQIRFEIGSYSLNPDIQVIAPWRTWDYSSRADLVDYCKEHQIEIDASPDDPLYSTDENLLHTSYEGEILEDPSIKAPEEIWQRTSSLKDAPDEEETISIEFRSGEPISINNVISSSSEILSELNHLAGKHGIGRLDLVENEIYGHEVKRML

SEQ ID NO: 197080 - protein, 92 aa, Unknown
  Bacterial polypetide isolated from the Sargasso Sea
MPKNIKNHNIKKVVLAYSGGLDTSVILRWLQDEYKCEVVTFTADIGQGEEIEPARAKAEAMGIKEIYIEDLREEFVRDYVFPMFRSNAVYEG

SEQ ID NO: 197081 - protein, 187 aa, Unknown
  Bacterial polypetide isolated from the Sargasso Sea
TVSPEKAPNKPSYITIGFRKGDPVSVNDKKLSPSKLLQKLNIVAGKNGIGRVDLVENRFIGIKSRGVYETPGGTLLMIAHRAIESVTLDKKTMHEKDEIMPKYAELIYNGFWFSKARFKLQKIVDLKRNQVNGSIKLKLYKGNVTILSRQSKSKAYSVKKVSFEENKSFKKSKVERFISGAARKLRT

SEQ ID NO: 197082 - protein, 176 aa, Unknown
  Bacterial polypetide isolated from the Sargasso Sea
GDPVNLNGKDLSPAKMLHQLNILGGENGIGRIDLVENRFVGMKSRGVYETPGGTILFHMRKAIESITLDRGAAHLKDELMPKYASLIYNGFWFSPEREMLQSAIDKSQNNVSGTVRAKLYKGNVIITGRKSPFSLYNESLVTFEEGTADYNHSDAEGFIKLNALRLRVKKMIENSK

SEQ ID NO: 197083 - protein, 262 aa, Unknown
  Bacterial polypetide isolated from the Sargasso Sea
PWREWDLSSRTKLLDFAEKNQIPIAKDKRGEAPFSVDANLLHTSSEGKVLEDPAEMAPDYVYQRTVHPEDAPNEPQIIEIGFEKGDAVSIDGEALSPANLLTKLNELGGKHGIGRLDLVEGRFVGMKSRGIYETPGGTILLEAHRGIEQITLDRGAAHLKDELMPRYAELIYNGFWYSPEREMLQAAIDASQHHVTGTVKLKLYKGSARTVARWSDHSLYSEAHVTFEDDAGAYDQKDAAGFIQLNALRLKLLAARERRLKG

SEQ ID NO: 197084 - protein, 205 aa, Unknown
  Bacterial polypetide isolated from the Sargasso Sea
MSIKKVVLAYSGGLDTSAIVPWLKDNYDCEVIAFVANVGQGDEELAGVEEKAIKSGASSCYVVDLREELIKEVIYPTLKTGAVYEGQYLLGTSMARPVIARAQVELALKLGADALCHGCTGKGNDQVRFEGAFAALAPQLKVIAPWREWQFNSRQSLLNYLAEKNVPTTASATKIYSRDANLWHISHEGGEIENPWNEPSRSIWM

SEQ ID NO: 197085 - protein, 189 aa, Unknown
  Bacterial polypetide isolated from the Sargasso Sea
MKSKKKIVLAYSGGLDTSIILKWLQENFNAEVITYTADIGQEIDRKKIYKNAKRLGVKKIVIKDLKDTFVKDYVYPMIRGHAIYEGVYLLGTSIARPLIAKDQIKVAKKYKAYAVSHGSTGKGNDQVRFELGYHYFGPKIKVIAPWRIWKLKSRTDLINYAKKYKIVIPKDKKGAPPFSVDDNLFHTST

SEQ ID NO: 197086 - protein, 135 aa, Unknown
  Bacterial polypetide isolated from the Sargasso Sea
NRFVGMKSRGIYETPGGIILAKAHRAIESITLDRGEAHLKDELMPKYAETIYNGLWFSSERAALQNLINSTQLNVSGDVKLKLYKGNVIVTGRRSPNSRYDLSMVSFDEKGDYDQRDAEGFIKINSLRLKNFNKK

SEQ ID NO: 197087 - protein, 289 aa, Unknown
  Bacterial polypetide isolated from the Sargasso Sea
EYANKIGADAVAHGSTGKGNDQVRFEIGYHATNPNIEIIAPWRIWDFKSREDLINFAKKYQISVPKDKIGEPPFSVDENILHTSAEGKVLEDPWTSPPDYVFSRTKSIEDASFTSDEIIISFDYGDPVKINNENYSPYEILKKLNELGNKHGIGRVDIVENRFIGMKSRGVYETPGGTILFHAHRAIESITLDAETTHKKDSIISEYAELIYNGFWFSKKRKELQEIVDINRKNISGEVRLKLFKGNVIVLGRKSKNSLYDISKVSFENNELKDQKFADQFIQSPVLKN

SEQ ID NO: 197088 - protein, 162 aa, Unknown
  Bacterial polypetide isolated from the Sargasso Sea
VNNKKLSPAKLLQKLNLIAGKNGIGRVDLVENRFIGIKSRGVYETPGGTLLMVAHRAIESVTLDKKTMHYKDEIMPRYAELIYNGFWFSKSRIKLQKKIDFKRNQVNGNIKLKLYKGNITILSRQSNSKAYSIDKVSFEENKSFKKSKVERFISGAARKLRA

SEQ ID NO: 197089 - protein, 170 aa, Unknown
  Bacterial polypetide isolated from the Sargasso Sea
KGDLVSVNGQRKRPHELLHFLNLLGNKHGVGRLDLVENRFVGLKSRGCYETPGGTILLKAHRALESITLDRELSHLKDELMPKYAKMIYNGFWWSPERLALQELINYSQKAVSGDITLKLFKGNIILVSRTSKKSLYDKNVSTFEDDSGVFNQKDSEGFIKLNALRLKNR

SEQ ID NO: 197090 - protein, 249 aa, Unknown
  Bacterial polypetide isolated from the Sargasso Sea
MSKNDIKKVVLAYSGGLDTSVILRWLQDHYRAEVITFTADIGQGEDIEPARAKAEMLGIKNIYIEDLREEFVRDYVFPMLRANPLYEGAYLLGTSIARPLIAKRQIEIARDVGAEAVSHGATGKGNDQVRFELAYYAQQPEIQVIAPWREWDLGSRTKLIAYAEANQIPIPKDKRGEAPFSVDANLLHISAEGKVLEDPWVAPEEYVFSRSVSPEQAPDKPTEIEIIFKSGDPVAIDGKALSPANLLTE

SEQ ID NO: 197091 - protein, 173 aa, Unknown
  Bacterial polypetide isolated from the Sargasso Sea
MKKIVLAYSGGLDTSIILRWLQENYKAEIIAYTSDIGQVLNKKKIIKNAKRLGVKKIIIENLKNIFVKDYVFPMIRAHAVYEGVYLLGTSIARPLIAKRQVEIAKKFKAFAVSHGATGKGNDQVRFELGYAYFGNNKIKTIAPWREWKLQSRADLIKYAKKNNIPFQKIKKVP

SEQ ID NO: 197092 - protein, 240 aa, Unknown
  Bacterial polypetide isolated from the Sargasso Sea
MKSHKRIVLAYSGGLDTSIILKWLQENYKAEIIAYTADIGQEINKKKIIKNAKKLGVKKIIIKDLKNNFVKDYVFPMIRGHAIYEGVYLLGTSIARPLIAKDQIRVAKKFKAYAVSHGSTGKGNDQVRFELGYHYFGPKIKIIAPWRIWKLKSRTDLINYAKKHGITIPKDKKGASPFSVDDNLFHTSTEGKILENPKNSAPEFIFQRTTSPEKAPNKASFVTVGFKNGDAVTVNGKKLT

SEQ ID NO: 197093 - protein, 191 aa, Unknown
  Bacterial polypetide isolated from the Sargasso Sea
MPCARPTASAVRVPSLARARAVAPSARSNASSKSRASARARAGPSGDVKKVVLAYSGGLDTSIILKWLQDTYGCEVVTFTADLGQGEELEPARAKAAQFGVKEIFVDDLREEFVRDYVFPMFRANAVYEGTYLLGTSIARPLIAKRQIEIAKQVGADAVCHGATGKGNDQVRFELGYYGLKPDVKVIAPVE

SEQ ID NO: 197094 - protein, 172 aa, Unknown
  Bacterial polypetide isolated from the Sargasso Sea
FKKGDACALNGKALTPFEILKSLNELGGKHGIGRVDLVENRYIGMKSRGIYETPGGTILYHAHRAIESITLDKEATHMKDELAPKYAELIYNGYWFSPEREMMQSMIDKSQEKVEGKVRIKLFKGNTMITGRESSMSLYNPNLATFESDQVYSQKDAEGFIKLNALRLREKK

SEQ ID NO: 197095 - protein, 236 aa, Unknown
  Bacterial polypetide isolated from the Sargasso Sea
MKSKKKIVLAYSGGLDTSIILKWLQENYNADVICYTADVGQEIDRKKITSNARKFGVKNIIIKDLKDVFVKQYVYPMIRGHAIYEGVYLLGTSIARPLIAKDQIRVAKKFKAYAVSHGATGKGNDQVRFELGYYYFGPKIKVIAPWRIWKLKSRTDLINYAKKHGIAIPRDKKGAPPFSVDDNLFHTSTEGKILENPKNFAPELIYKRTVSPEKAPNKPSFVTINFKSGDPFGIKE

SEQ ID NO: 197096 - protein, 269 aa, Unknown
  Bacterial polypetide isolated from the Sargasso Sea
FVRDYVFPMFRANSMYEGNYLLGTAIARPLIAKRQIEIAKEVGADAVAHGATGKGNDQVRFELGYYANDSSIEVIAPWRDWEFESRKDLIDFAEKNQIQVTKDKLGEPPFSTDANLLHTSSEGKILEDPWVEAPEYVYTRTKNLNDTPNEPETFVIEFEKGDPVAVNDEKLKSHEILTKLNKLAGEHGVGRIDIVENRFVGMKSRGVYETPGGTILIHAHRAIESITLDRGESHLKDEIMPKYAEAIYNGLWFSSERLAMQELIDSTQK

SEQ ID NO: 197097 - protein, 195 aa, Unknown
  Bacterial polypetide isolated from the Sargasso Sea
NYLTIASVPKKIVLAYSGGLDTSVILKWLQLKYDCPVVTFTADIGQGKEVDSIRAKAESLGVKEIFIEDLKEEFVKEYAFPMFRANTLYEGVYLLGTAIARPLIAKRQIEIAERVGADAVAHGATGKGNDQVRFELGYYSNNPSIEVIAPWRDWDLTSRKELIAFAEKYQIPVPRDKRGEIPFSTDATLLHTSSE

SEQ ID NO: 197098 - protein, 275 aa, Unknown
  Bacterial polypetide isolated from the Sargasso Sea
IVKNAKKLGVKKIIINNLKNTFVKEYVFPMIRGHAIYEGVYLLGTSIARPLIAKDQIKVAKKFKAFAVSHGSTGKGNDQVRFELGYHYFGPKIKVIAPWRIWKLKSRTDLINYAKKHNIPIPKDKKGAPPFSVDDNLFHTSTEGKVLENPKNSAPEFIFQRTTSPEKAPNKPTYVSIGFKNSDPVSINGKKLTPEKFLEKLNQIGGKNGVGRVDLVENRFIGIKSRGVYETPGGTLLLIAHRAMESVTLDKGYMHKKDSIMPRYAELIYNGLWFS

SEQ ID NO: 197099 - protein, 144 aa, Unknown
  Bacterial polypetide isolated from the Sargasso Sea
ENRFVGMKSRGIYETPGGEILLEAHRGIEQITLDSGAGHLKDSLMPKYSELIYNGFWYSPEREMLQAAIDLSQKFVSGTVRLNLFKGSVRTIGRWSQNSLYSEAHVTFEDDAGAYDQKDAAGFIQLNALRLKLLSARNARCDEG

SEQ ID NO: 197100 - protein, 283 aa, Unknown
  Bacterial polypetide isolated from the Sargasso Sea
MDKINKVVLAYSGGLDTSVILRWLKETYQCEVATFTANLGQDEDYDLVKAKAEKQGTKEIFIEDLKEEFVSDYVFPMFRANPLYEGYYLLGTSIARPLIAKKQIEIANNINADAVSHGATGKGNDQIRFELGYYYHKPDIKIISPWREWDLSSRTSLVEYADKHGIEIAKDKRGEQPFSIDENILHSSAEGKVLEDPWAEAPDYVYTRSVSPEQAPNKAEEITIEFKRGDACALNGKALTPFEILKSLNEVGGKHGIGRVDLVENRYIGMKSRGIYETPGGTI

SEQ ID NO: 197101 - protein, 204 aa, Unknown
  Bacterial polypetide isolated from the Sargasso Sea
YVFQRTVNPEDAPDEPEIIEVEFEKGDPVAINGNKMSPATVLSSLNEYGHKHGIGRLDFVENRFVGMKSRGIYETPGGEILLEAHRGIEQITLDSGSGHLKDSLMPKYSELIYNGFWYSPEREMLQAAIDFSQEFVSGTVRLKLFKGSVRTIGRWSQNSLYSEAHVTFEDDAGAYDQKDAAGFIQLNALRLKLLSARNARCNKG

SEQ ID NO: 197102 - protein, 99 aa, Unknown
  Bacterial polypetide isolated from the Sargasso Sea
MKDIKKVVLAYSGGLDTSIILKWLQETYDCEVVTFTADLGQGEELEPARSKAQSMNVKEIYIEDLRDEFVSEYVFPMFRANAIYEGEYLLGTSIARPLI

SEQ ID NO: 197103 - protein, 119 aa, Unknown
  Bacterial polypetide isolated from the Sargasso Sea
MLNKNSKIKKIVLAYSGGLDTSVILKWLQDNYQCEVVTFTADIGQGKEVESARKKAELLGVKEIFIDDLKEEFVKDFVFPMFRANALYEGIYLLGTSIARPLIAKRQIEIANITGSDAV

SEQ ID NO: 197104 - protein, 284 aa, Unknown
  Bacterial polypetide isolated from the Sargasso Sea
LVAAMKEDGVDIWGDGSTYKGNDIERFYRYGLMVNPDLRIYKPWLDPQFVDELGGRTGMSEFLIARDLPYRDSVEKAYSTDANIWGATHEAKALEELNRGMEIVAPIMGVAHWDSDVEIVEEDVALTFEQGWPVAINGATFPDQVALVEAANAIGGRHGLGMSDQIENRIIEAKSRGIYEGPALALLHIGYERLLTAIHNENTIENYRTMGRRLGRLLYEGRWFDPQSLMLREPLLRWVGSAVSGTVTIRLRRGDDYSIMDTDGSNLTYEPDRLSMERVEDQAF

SEQ ID NO: 197105 - protein, 110 aa, Unknown
  Bacterial polypetide isolated from the Sargasso Sea
MPKKIVLAYSGGLDTSVILKWLQNKYQCEVVTFTADIGQGDELSPVRKKAESLGVKEIFVEDLKEEFVKNYVFPMFRANAVYEGSYYLGTAIARPLIAKRQIEIANEVGA

SEQ ID NO: 197106 - protein, 105 aa, Unknown
  Bacterial polypetide isolated from the Sargasso Sea
LASGASECHIVDLKEEFVKDYIYPTMATGAIYEGTYLLGTSMARPIIAKAQVEVARKVGADALCHGCTGKGNDQVRFEGCFAALAPDLKVIAPWREWTMVQSRHG

SEQ ID NO: 197107 - protein, 224 aa, Unknown
  Bacterial polypetide isolated from the Sargasso Sea
MKKIVLAYSGGLDTSIILRWLQENYNAEVIAYTSDIGQVLDKKKIIKNAKRLGVKKIIIENLKNIFVKDYVFPMIRAHAAYEGVYLLGTSIARPLIAKRQVEIAKRFKAFAVSHGATGKGNDQVRFELGYSYFGKNKIKTIAPWREWKLQSRADLIRYAKKNNIPIPKDKKGAPPFSVDDNIFHTSTEGKILEDPKNSAPEFIYQRTVSPQKDPNRPTKVKITF

SEQ ID NO: 197108 - protein, 282 aa, Unknown
  Bacterial polypetide isolated from the Sargasso Sea
QEQGYEVIAYVADVGQQEDFDDVSERAKATGASKVFVEDLKQDFVTEFIFPAIAGNAVYENRYLLGTSLARPVIARRQVEIALSEGAGAVSHGATGKGNDQVRFELAFAALAPDLQVIAPWKDPEFLGRFQGRSDLLAFAKRHEIPVEATVEKPYSSDENLMHRSYEAGMLEDPEAIPPDDMFKLTRSLEDTPDRPSDLIIRYKNAMPVHLVCDDEGVDLSHPVELFSYLNYKGGEHGIGRVDMVENRFVGIKSRGVYETPGGTILHHAIRDLEGIAMDREV

SEQ ID NO: 197109 - protein, 263 aa, Unknown
  Bacterial polypetide isolated from the Sargasso Sea
DTSVILKWLQNKYQCPVVTFTADLGQGEELSPVRKKAESLGVKEIFIEDLREEFVKNYVFPMFRANAIYEGTYYLGTAIARPLIAKRQIEIAKEVGADTVSHGATGKGNDQIRFELGYYANNSKINVISPWRDWDLNSRKDLIDFAEKNQISISKDKRGESPFSTDANLLHTSSEGKILEDPWEEAPEYVYSRTKSIENSKSSADEIILSFEKGDAVAINQKKLKPHEVLIELNKYGYEHGIGRDDIVENRFIGMKSRGIYET

SEQ ID NO: 197110 - protein, 268 aa, Unknown
  Bacterial polypetide isolated from the Sargasso Sea
SHGATGKGNDQVRFELSAYALDPNIKVIAPWREWDLGSRTKLIAFAEEHQIPIAKDKKGEAPFSVDANLLHTSSEGKVLEDPAKIAPEYVFQRTVNPEDAPDEPEIIEIEFDKGDPVAINGNKMSPATILSSLNDYGHKHGIGRLDFVENRFVGMKSRGIYETPGGEILLEAHRGIEQITLDSGSGHLKDSLMPKYSELIYNGFWYSPEREMLQAAIDLSQEFVSGTVQLKLFKGSVRTIGRWSQNSLYSEAHVTFEDDAGAYDQKDA

SEQ ID NO: 197111 - protein, 125 aa, Unknown
  Bacterial polypetide isolated from the Sargasso Sea
MGRANKVVLAYSGGVDTSVCIPYLKQEWGVEEVITFAADLGQGDELEPIRQKALDAGASQSLVGDLIQPFIEEFAFPAIRANALYEGRYPLSTALARPLIARRLVEVAREVGADAVAHGCTGKGN

SEQ ID NO: 197112 - protein, 281 aa, Unknown
  Bacterial polypetide isolated from the Sargasso Sea
VEKKAAQQGVKEIFIEDLKEEFVRDYVFPMFRANPLYEGYYLLGTSIARPLIAQKQIEIANKVGADAVSHGATGKGNDQIRFELGYYYHKPDIKIISPWREWDLTSRTSLVEYADQHGIEIAKDKRGEQPFSIDENILHSSAEGKVLEDPWEEAPDYVYTRSVSPENAPSTPEEITIEFKKGDACALNGQSMTPFELLKALNEMGGKHGIGRVDLVENRYIGMKSRGIYETPGGTILYHAHRAIESITLDKEAAHMKDELSPKYAELVYNGYWFSPEREMM

SEQ ID NO: 197113 - protein, 264 aa, Unknown
  Bacterial polypetide isolated from the Sargasso Sea
IARPLIAKRQIEIANEVGADAVAHGATGKGNDQVRFELGYYANDANIKVIAPWRDWEFESRNDLVDFALKNQIEVTKDKIGEPPFSTDANLLHTSSEGKILEDPWVEAPEYVYTRTENLHETPNEPDIINIGFKNGDPVSLNQKELKPHEILKSLNEVAGKHGVGRIDIVENRFLGIKSRGIYETPGGTILITAHRAIESITLDRGEAHLKDEIMPKYAELIYNGLWFSSERYALQRLIDSTQIKVNGEVRIKLFKGQCNCYGP

SEQ ID NO: 197114 - protein, 242 aa, Unknown
  Bacterial polypetide isolated from the Sargasso Sea
MNTKKINKIVLAYSGGLDTTVILHWLKETYDAEVVTFTADIGQNHNPDLVIQRANDIGSTKVIIEDLKEEFVRDYVFPMFRANTLYEGEYLLGTSIARPLISKRLIEIAEEEGADAIAHGATGKGNDQIRFEIGAYSLNPTITVIAPWRTWDFVSRADLVEYCKKNQINMDVSSDEPLYSTDENILHTSYEGEILEDPSIPAPESIWQRTSSLNDAPDIEEEVTINFENGDPIGINGESLSA

SEQ ID NO: 197115 - protein, 309 aa, Unknown
  Bacterial polypetide isolated from the Sargasso Sea
IFVKDYVYPMIRGHALYEGVYLLGTSIARPLIAKDQIRVAKKFNAYAVSHGSTGKGNDQVRFELGYHYFGPKIKIIAPWRIWKLKSRTDLINYAKKHGIPIPKDKKGAPPFSVDDNLFHTSTEGKVLENPKNSAPEFIFQRTTSPEKAPNKPSFITINYKNGDPIGLNGKNLPPAKVLDKLNQLAGKNGIGRVDLVENRFIGIKSRGVYETPGGTLLLVAHRAIESVTLDKNTMHKKDEVMPRYAELVYNGYWYSKERFKLQKIVDLKRNKVNGSVKLKLYKGNITIQSRQTSSNAYSMKKVSFEENKT

SEQ ID NO: 197116 - protein, 286 aa, Unknown
  Bacterial polypetide isolated from the Sargasso Sea
RPLIAKRQIEIANEVGADAVSHGATGKGNDQVRFELAYYALQPDIKVIAPWREWDLGSRTKLISFAEQNQIPIPKDKRGEAPFSVDANLLHISAEGKVLEDPWMAPEEYVFSRTVSPEDAPDKPTEIAIRFEAGDPVAINDKTMSPARLLEELNRLGGANGIGRLDLVENRFVGMKSRGIYETPGGTILLTARRAMESITLDRGAQHTKDEMMPRYAELVYNGFWFSPEREMLQAAIDSCRDAVNGVVRVKLYKGNVIVTGRQSPNSLYNADLVTLKKVLLTMITA

SEQ ID NO: 197117 - protein, 147 aa, Unknown
  Bacterial polypetide isolated from the Sargasso Sea
MDKINKVVLAYSGGLDTSVILRWLKETYQCEVATFTANLGQDEDYNLVKAKAEKQGTTEIFIEDLRDEFVSDYVFPMFRANPLYEGYYLLGTSIARPLIAKKQIEIANKINADAVSHGATGKRNDQIRFELGYYYHKPDIKNISPWR

SEQ ID NO: 197118 - protein, 287 aa, Unknown
  Bacterial polypetide isolated from the Sargasso Sea
SHGATGKGNDQVRFELSAYALNPDIKIIAPWREWNLTSRTKLLQFAEKNQIPITSNKAGEAPFSVDANLLHTSSEGLILEDPSKEAPEYIFQRTENPENAPDNSDVITLTFKNGDPIALNKKNYSPGKLFEKLNEIGSKHGIGRLDLVENRFVGMKSRGVYETPGGTILLEAHRGIESITLDSGSSHLKDEIMPKYAELIYNGLWFSPERKMLQALIDESQIFVEGEVTLKLYRGSAVVIARQSSKSLYSERLVTFEDDHGLYNQKDAEGFIKLKALRLRELAKRDS

SEQ ID NO: 197119 - protein, 129 aa, Unknown
  Bacterial polypetide isolated from the Sargasso Sea
MATAKKVVLAYSGGLDTSVIVRWLQETYQCEVVTFTADIGQGEEVEPARAKAQALGVEEIYIEDLRESFVRDFVFPMFRANTVYEGEYLLGTSIARPLIAQRLVEIANKTGADAIAHGATGKGNDQVRF

SEQ ID NO: 197120 - protein, 233 aa, Unknown
  Bacterial polypetide isolated from the Sargasso Sea
MKSKKKIVLAFSGGLDTSIILKWLQEEYNSEIIAYTADIGQEIDKKKIIFNAKKLGVKKIIINDLKDIFVKNYVYPMMRGHAIYEGVYLLGTSIARPLIAKDQIRVAKKFNAYAVSHGSTGKGNDQVRFELGYHYFGPKIKVIAPWRIWKLKSRSDLIKYAKKHNISIPKDKKGSSPFSVDDNLFHTSTEGKILENPKNPAPEFIFQRTTSPEKAPNKPTFVIIGFKKSDPIT

SEQ ID NO: 197121 - protein, 224 aa, Unknown
  Bacterial polypetide isolated from the Sargasso Sea
MSKKNINKVVLAYSGGLDTSVILAWLKDTYDCEIVTFTADIGQGEEIETARTKAENMGIKEIYIEDLTEEYVQDFVFPMFRGNTIYEGSYLLGTSIARPLIAKRLVEIANKTGADAISHGATGKGNDQVRFELGAYALDPNIRVIAPWREWDLNSREKLLAYAENKKIPIEGKKKTGSPYSMDANLLHISYEGGQLEDPWCAPDEAMWLWTVAPEDAPNSGQSI

SEQ ID NO: 197122 - protein, 192 aa, Unknown
  Bacterial polypetide isolated from the Sargasso Sea
LLGTSIARPLIAKRQIEIAEIEGADAVAHGATGKGNDQVRFELSYYSQNPKIQVIAPWREWDLTSRSKLIEYAEKHQISIAKDKIGEAPFSVDANLLHVSAEGKVLEDPWEEPKEYIYTRTVSPINAPDKPTEITIDFLEGDPIRIDNEKLKPSKIMKKLNSLGGKNGIGRIDIVENRFVGMKSRGVYETPG

SEQ ID NO: 197123 - protein, 253 aa, Unknown
  Bacterial polypetide isolated from the Sargasso Sea
MKAKKKIVLAYSGGLDTSIILKWLQENYNAEVICYTADIGQEIDRKKIFKNAKKFGVKKIIIQNLKDTFVKDYIYPMIRGHAIYEGVYLLGTSIARPLIAKDQIRVAKKFNAYAVSHGATGKGNDQVRFELGYHYFGQKIKIIAPWRIWKHKSRTDLINYAKKHNIAIPKDKKGAPPFSVDDNLFHTSTEGKVLENPKNPAPEFIFQRTISPEKAPNKPTYVTINFKNSDPIGINGKKLSPFKLLVKLNQLAG

SEQ ID NO: 197124 - protein, 292 aa, Unknown
  Bacterial polypetide isolated from the Sargasso Sea
MTERKLSKTQKNFGVKKIIINNLKNTFVKEYVFPMIRGHAIYEGVYLLGTSIARPLIAKDQIKVAKKFKAFAVSHGSTGKGNDQVRFELGYHYFGPKIKVIAPWRVWKLKSRTDLISYAKKHNIPIPKDKKGAPPFSVDDNLFHTSTEGKVLENPKNSAPEFIFQRTTSPEKAPNKPTYVSIGFKNSDPVSINGKKLIPEKLLEKLNQLGGKNGVGRVDLVENRFIGIKSRGVYETPGGTLLLIAHRAMESVTLDKDTMHKKDSIMPRYAELIYNGYWFSKERFKLQKNSGS

SEQ ID NO: 197125 - protein, 152 aa, Unknown
  Bacterial polypetide isolated from the Sargasso Sea
KRLVEIAAETGADAIAHGATGKGNDQVRFELSAYALDPNIKVIAPWREWDLTSRTKLLAFAEENQIPIAKDKRGEAPFSVDANLLHTSSEGKVLEDPLEMAPEYVFQRTINPEDAPEQAEIIEVEFENGDPVAINGNKMSPAGILTSLNEYG

SEQ ID NO: 197126 - protein, 232 aa, Unknown
  Bacterial polypetide isolated from the Sargasso Sea
MQQVKKVVLAYSGGVDTSVCIPYLKNEYGISEVVTFVADLGQGEDLELIRQKALNSGASQSIIGNLVNSFVERYAFPAIRANALYLDKYPLSTALARPLIAENLVNIAREINADAVAHGCTGKGNDQVRFDLAINALGPDLKIITPAREWNMSREEAIVYGEKFGIPAPVSKKSPYSIDVNLLGRSVEAGILEDPMQEAPEDIFAMTSSIDNSPDSPQDIEIVFQKWISSWD

SEQ ID NO: 197127 - protein, 234 aa, Unknown
  Bacterial polypetide isolated from the Sargasso Sea
MKSKKKIVLAYSGGLDTSIILKWLQENYQAEVIAYTADIGQEINKKKIVKNAKKLGVKKIIIKDLKDTFVKNYVYPMIRGHAIYEGVYLLGTSIARPLIAKDQIRIAKKFKAYAVSHGATGKGNDQVRFELGYHYFGPKIKIIAPWRLWKLNSRSDLIKYAKKHNISVPKDKKGAPPFSIDDNLFHTSTEGKVLENPKNSAPEFVFQRTTSPEKAPNKASFVSIGFRNGDPNNC

SEQ ID NO: 197128 - protein, 241 aa, Unknown
  Bacterial polypetide isolated from the Sargasso Sea
MYKPKKVVLAYSGGLDTSIILKWLQTEYACEVVTFTADLGQGEELEPARKKAELLGIKPSNIFIEDLREEFVSDFVFPMFRCNALYEGLYLLGTSIARPLISKRLVEIAQETGADAIAHGATGKGNDQVRFELSAYALNPDIKVIAPWREWNLTSRSRLIKFAEDNQIPIAKDKRGEAPFSVDANLLHTSSEGKILEDPSTAAPEYVYQRTVNPEVAPELPEFIEVEFRNGDAVAINDYRM

SEQ ID NO: 197129 - protein, 198 aa, Unknown
  Bacterial polypetide isolated from the Sargasso Sea
PPEYVFSRTRSIENSSNESEILTISFKKGDPVAINNVNLKPHEILETLNSIAGKHGVGRIDLVENRFVGMKSRGIYETPGGTILLNARRAIESITLDKGEAHLKDEIMPKYAEIVYNGLWFSSERYAMQRLIDSTQEKVNGEVRLKIYKGNVITLGRKSSNSLYDNSLVSFDEAGDYNQKDAEGFIKINSIRLKKNNK

SEQ ID NO: 197130 - protein, 95 aa, Unknown
  Bacterial polypetide isolated from the Sargasso Sea
KYASLIYNGFWFSPEREMLQSAIDKSQKNVSGTVRAKLYKGNVIITGRKSAFSLYNESLVTFEEGTADYNHSDAEGFIKLNALRLRVKKMIENSK

SEQ ID NO: 197131 - protein, 286 aa, Unknown
  Bacterial polypetide isolated from the Sargasso Sea
GVEEIFIEDLREEFVKDYVFPMFRANALYEGIYFLGTAIARPLIAKKQVEIANEVGAISVAHGATGKGNDQVRFELGYYANNPKIEVISPWREWELNSRNDLINFAEKYQINIPKDKRGEAPFSTDANLLHTSSEGKILEDPWTDAPEYVFSRTKSIEDANSTPEEIIISFEKGDPVSINQQKMKAHELLSKLNEYGLNHGIGREDIVENRFVGIKSRGVYETPGGTILAKAHRAIESITLDRGEAHLKDEIMPKYAETIYNGLWFSSERISMQSLIDSTQKTVTG

SEQ ID NO: 197132 - protein, 130 aa, Unknown
  Bacterial polypetide isolated from the Sargasso Sea
MKFKKKIVLAYSGGLDTSIILKWLQVNFKAEVIAYTADIGQEIDKKKILKNAKRLGVKKIIIKNLKDTFVKDYIYPMIRGHAIYEGVYLLGTSIARPLIAKDQIRIAKKFKAYAVSHGSTGKGNDQVRFE

SEQ ID NO: 197133 - protein, 208 aa, Unknown
  Bacterial polypetide isolated from the Sargasso Sea
MDKINKVVLAYSGGLDTSVILRWLKESYKCEVATFTANLGQDEDYDLVKAKAEKQGTKEIFIEDLKEEFVSDYVFPMFRANPLYEGYYLLGTSIARPLIAKKQIEIANQIKADAVSHGATGKGNDQIRFELGYYYHKPDIKIISPWREWDLSSRTSLVEYADKYGIEIAKDKRGEQPFSIDENILHSSAEGKVLEEPWVEAPDYVYTR

SEQ ID NO: 197134 - protein, 143 aa, Unknown
  Bacterial polypetide isolated from the Sargasso Sea
MKSKKRIVLAYSGGLDTSIILKWLQENYKAEVICYTADIGQEINKKKIISNAKKFGVKKIIINDLKDIFVKDYIYPMIRGHAIYEGVYLLGTSIARPLIAKDQIKVAKKYKAYAVSHGATGKGNDQIRFELGYHYFGPKIKII

SEQ ID NO: 197135 - protein, 290 aa, Unknown
  Bacterial polypetide isolated from the Sargasso Sea
MLNENSKIQKIVLAYSGGLDTSVILKWLQDNYQCEVVTFTADIGQGEEVEPARKKAELLGVKEIFIDDLKEEFVKDFVFPMFRANALYEGIYLLGTSIARPLIAKRQIEIANLTGSDAVSHGATGKGNDQVRFELGYYSLQPNIKVISPWREWNLSSRTNLIKYAEENQIKVPKDKRGEAPFSVDANLLHISAEGKILEDPWVEPEEFIYSRTKSPFDAPNKPTEITLEFLNGNPVSLNGKDLSPAKMLHQLNILGGENGIGRVDLVENRFVGMKSRGVYETPGGYNSLP

SEQ ID NO: 197136 - protein, 298 aa, Unknown
  Bacterial polypetide isolated from the Sargasso Sea
LIAKRQIAIAKKFKAFAVSHGSTGKGNDQVRFELGYYYFGPKIKVIAPWRIWKLKSRTDLIKYAKKHKIPIPKDKKGAPPFSVDDNLFHTSTEGKILEDPKKTAPEYIFQRTVSPEKAPNKPSYVTIGFKKSDPVSVNNKKLSPTKLLQKLNFLAGKNGIGRVDLVENRFIGIKSRGVYETPGGSLLIVAHRAIESITLDKKTMHQKDEVMPKYAELIYNGFWFSKARYKLQKIIDLKKNLVNGSVKLKLYKGNVTIESRQSKSKAYSVKKVSFEENKSFKKSKVERFISGAARKLRA

SEQ ID NO: 197137 - protein, 320 aa, Unknown
  Bacterial polypetide isolated from the Sargasso Sea
NEYGISEVVTFVADLGQGEDLEFIRQKALNSGASKSIVGNLVNSFVERYAFPAIRANALYLDKYPLSTALARPLIAENLVNIAREINADAVAHGCTGKGNDQVRFDLAINALGPDLKIITPAREWNMSREEAIVYGEKFGIPAPVSKKSPYSIDVNLLGRSIEAGILEDPMQEAPEDIFSMTSSVDNSPDSHQDIEIVFKNGFPVGINDEFLTPVEIIQKANDLAGNHGFGRIDMIEDRVVGIKSREIYETPGLLLLIKAHKELESITLNPDVIDFKGIVEKKWGQLVYQGFWFGPLKESLDAFISSTQTSVNGRVKIRL

SEQ ID NO: 197138 - protein, 221 aa, Unknown
  Bacterial polypetide isolated from the Sargasso Sea
MTNKIKKVVLAYSGGLDTSIILKWLQSTYDCEVVTFTADLGQGDEIEPARKKAEMLGVKEIYIEDLREDFVSNYIFPMFRANTLYEGQYLLGTAIARPLIAKRQIEIANETGADAVCHGATGKGNDQVRFELGYYALKPNIKVISPWRDWDLKSRTKLIEFAEENQIPIPKDKKGEAPFSIDANILHTSSEGKLIENPENEPPEYIYQRTLSIDDSNDITH

SEQ ID NO: 197139 - protein, 243 aa, Unknown
  Bacterial polypetide isolated from the Sargasso Sea
GERCGIPAPLSKKSLYSIDLNLLGRSIEAGPLEDLMVAPPEEVFAMTSPVSETPDAAEEIEIAFEAGNPVAINGQVLDPVAMIREANRLAGSHGIGRLDMIENRVVGIKSREIYETPGLLLLIQAHQELESLTLAADVLRSKRQLEMQWADLVYQGLWFGPLKDALDGFMDRTQQHVNGVVRLRLHKGNATVIGRGSTQSSLYVPAMASYGSEDAFDHRAAEGFIYVWGLPTRLWAASQRTSG

SEQ ID NO: 197140 - protein, 314 aa, Unknown
  Bacterial polypetide isolated from the Sargasso Sea
SRSYCLYQLNIGQEIDKKKIIKSAKNLGVKKIIIKDLKDVFVKDYVYPMIRGHAIYEGVYLLGTSIARPLIAKDQIRVAKKFKAYAVSHGSTGKGNDQVRFELGYHYFGPKIKIIAPWRIWKLKSRTDLINYAKKHGITIPKDKKGAPPFSVDDNLFHTSTEGKVLENPKRPAPEFIFQRTVSPEKAPNKASYVTIGFKNGDPITINGKKLSPSKLLERLNQLAGKNGIGRVDLVENRFIGIKSRGVYETPGGTLLINAHRAIESVTLDKETMHKKDEIMPKYAELIYNGYWYSKARFKLQKIVDQKETNQWIC

SEQ ID NO: 197141 - protein, 309 aa, Unknown
  Bacterial polypetide isolated from the Sargasso Sea
LKETYQCEVATFFANLGQDEDYAIIKTKAEKQGTKDIFIEDLKDEFVSDYVFPMFRANPLYEGYYLLGTSIARPLIAKKQIEIANQINADAVSHGATGKGNDQIRFELGYYYHKPDIKIISPWREWDLSSRSSLVDYADKHGIEIAKDKRGEQPFSIDENILHSSAEGKVLEDPWVEAPDYVYTRSVPPEEAPDKAEELAIEFKKGDACALNGKAMKPFEILKSLNELGGKHGIGRVDLVENRYIGMKSRGIYETPGGTILYHAHRAIESITLDKEAAHMKDDLAPKYAELIYNGLLVLSRKRNDAVND

SEQ ID NO: 197142 - protein, 258 aa, Unknown
  Bacterial polypetide isolated from the Sargasso Sea
LAYSGGLDTSIILKWLQENYKAEVIAYTSDIGQEMNKQKIISNAKRLGVKKIIIEDLKNIFVKDYVFPMIRAHAVYEGVYLLGTSIARPLIAKRQIAIAKKFKAFAVSHGATGKGNDQVRFELGYAFFGGKKIKVIAPWREWKLQSRTDLINYAKKNNIPIPKDKKGAPPFSVDDNIFHTSTEGKVLENPKNSAPEFIYQRTISPEKAPNKKTKLKITFKNGDPTAVNGVKLKPEKLLEKLNLLAGKNGIGRVGFSRE

SEQ ID NO: 197143 - protein, 325 aa, Unknown
  Bacterial polypetide isolated from the Sargasso Sea
IIVNEIKKEIVLAYSGGLDTSIILKWLQEKYNSEVITYTADIGQKINKNKIIKNAKKFGVKKIIIKNLKDTFVKDYIYPMIRGNAIYEGVYLLGTSIARPLIAKEQIRVAKKFNAYAVSHGSTGKGNDQVRFELGYHYFAPKIKIISPWRIWKLKSRSDLIKYAKKNNILIPKDRRGAPPFSIDDNLFHTSTEGKVLENPKNAAPEFIFQRTTSPEKAPNKITFVTIGFKNSNPISINGKKYSPSKLLEKLNNFAGKNGIGRVDLVENRFIGIKSRGVYETPGGTLLITAHRAIESVTLDKKTMHKKDNIMPRYAELIYNGYWYS

SEQ ID NO: 197144 - protein, 255 aa, Unknown
  Bacterial polypetide isolated from the Sargasso Sea
EVEPAREKAEALGVREIFIDDLREEFVRDFVFPMFRANTIYEGQYLLGTSIARPLIAKRLIDLAEQTGADAISHGATGKGNDQVRFELGAYALNPDIRVIAPWRQWDLDSREALMKYCKQHDIVVDYAQVGEKSPYSMDANLLHISYEGGVLEDPWEAPDESMWRWTVSPKSAPDVPTFVELEYVNGDIVALNGDKLSCSELLTRLNVLGGKNGVGRDDIVENRYVGMKSRGCYETPGGTIMLKAHRAIESLTLD

SEQ ID NO: 197145 - protein, 196 aa, Unknown
  Bacterial polypetide isolated from the Sargasso Sea
MFETVRPLSKSLNKPSKIILSFKDGIPIRFNGKRIDGVNLFRQLNKLAGKHGIGVVDIVENRFVGMKSRGVYETPGGTVLNIAHRAVESLTMDREVMHIRDSLVPKISQLIYNGFWFSPEMRVLLSFIKESQKNVTGDVRLMLYKGNVRVLGRKSNYSLYNSDLATFEEDDLYDQSDATGFIKLNSLRLILNKLKK

SEQ ID NO: 197146 - protein, 163 aa, Unknown
  Bacterial polypetide isolated from the Sargasso Sea
MKKNKKIVLAYSGGLDTSIILKWLQENYDSEVIAYTADIGQEMNRKKIVKNAKKLGVKKIIINNLKNTFVKEYVFPMIRGHAIYEGVYLLGTSIARPLIAKDQIKVAKKFKAFAVSHGSTGKGNDQVRFELGYHYFGPKIKVIAPWRIWKLKSRTDLINYAKK

SEQ ID NO: 197147 - protein, 276 aa, Unknown
  Bacterial polypetide isolated from the Sargasso Sea
IGTSIARPLIAKDQIRVAKKFKAYAVSHGSTGKGNDQLRFELGYHYFAPKIKIIAPWRIWKLKSRTDLINYAKKHKIQIPKDKKGAPPFSVDDNLFHTSTEGKALENPKNSAPEFIFQRTNSPEKAPNKAYFVNIGFKNGDPITVNGKKLSPSKLLERLNELAGKNGIGRVDLVENRFIGIKSRGVYETPGGTLLINAHRAIESVTLDKETMHKKDEIMPKYAELIYHGYWYSKARFKLQKTVDLKRNKVNGSVKLKLYKGNIIICSRKQKAMLIL

SEQ ID NO: 197148 - protein, 217 aa, Unknown
  Bacterial polypetide isolated from the Sargasso Sea
MLNKNSKIKKIVLAYSGGLDTSVILKWLQDNYQCEVVTFTADIGQGEEVEPARKKAELLGVKEIFIEDLKEEFVKDFVFPMFRANALYEGIYLLGTSIARPLIAKRQIEIANLTDSDAVSHGATGKGNDQVRFELGYYSLQPNIKVISPWREWNLSSRTNLIKYAEDNQIKVPKDKRGEAPFSVDANLLHVSAEGKILEDPWVEPEEFIFFQNKVTL

SEQ ID NO: 197149 - protein, 149 aa, Unknown
  Bacterial polypetide isolated from the Sargasso Sea
IGRADMSRNRYVGMKSRGCYETPGGSIWLRAHRAIESITLDREVAHLKDELMPRYAKLIYNGYWWSPERHALQAAIDQTQAVVNGDVRMSLYKGNITVTGRRSSDSLFDESIATFEEDGGAYDQADAEGFIKLNALRLRIAATKGRQNQ

SEQ ID NO: 197150 - protein, 274 aa, Unknown
  Bacterial polypetide isolated from the Sargasso Sea
MKLKKKIVLAYSGGLDTSIILKWLQENYNAEVICYTADIGQEIDRKKIFKNAKKFGVKKIIIQNLKDTFVKDYIYPMIRGHAIYEGVYLLGTSIARPLIAKDQIRVAKKFNAYAVSHGATGKGNDQVRFELGYHYFGQKIKIIAPWRIWKHKSRTDLINYAKKHNIPIPKDKKGAPPFSVDDNLFHTSTEGKVLENPKNPAPEFIFQRTISPEKAPNKPTYVTINFKNSDPIGINGKKLSPFKLLDKLNQLAGKNGIGRVDLVENRFIGIKSRG

SEQ ID NO: 197151 - protein, 225 aa, Unknown
  Bacterial polypetide isolated from the Sargasso Sea
LYSKDENILHTSYEGEVLEDPSVRAPSNIWERTTDPLKAPDEEEIINIEFKNGDPVKVNGKSLNPDQLLQELNLLAGKNGIGRLDLVENRFTGMKSRGCYETPGGTILLKAHRAIESITLDAEQAHLKDEIMAKYSELIYKGFWWSPERKSMQALIDSTQTHVTGSVTLSLYKGNVSVVSRDSDYSLYDPKIVTFEDDENTFDQADATGFIKINSIRLKTNSKRK

SEQ ID NO: 197152 - protein, 191 aa, Unknown
  Bacterial polypetide isolated from the Sargasso Sea
MKKIVLAYSGGLDTSIILRWLQENYKAEIIAYTSDIGQVLDKKKIIKNAKRLGVKKIIIENLKNIFVKDYVFPIIRAHAVYEGVYLLGTSIARPLIAKRQIEIAKKFKAFAVSHGATGKGNDQVRFELGYAYFGKNKIKTIAPWREWKLQSRADLIKYAKKNNIPIPRKKKGAPPFSVDDNIFHTSTEGKV

SEQ ID NO: 197153 - protein, 297 aa, Unknown
  Bacterial polypetide isolated from the Sargasso Sea
MLRGNAIYEGVYLLGTSIARPLIAKDQIRIAKKFKAFAVSHGATGKGNDQVRFELGYHYFGPKIKVVAPWRIWKLKSRSDLINYAKKHGIPIPKDKKGAPPFSVDDNLFHTSTEGKILENPKNSAPEFIFQRTVSPEKAPNKPTYILINFKNGDPIGINGKKLNPEKILTKLNFIAGKNGVGRVDLVENRFLGIKSRGVYETPGGTLLIHAHRAIESVTLDKDTMHKKDSIMPRYAELIYNGYWYSKERFKLQKIIDQKRNKVNGSVKLKLYKGNITIQSRITKSNAYSVKKVSFEE

SEQ ID NO: 197154 - protein, 175 aa, Unknown
  Bacterial polypetide isolated from the Sargasso Sea
TYVTISFKNSDPVSINGKKLNPEKLLEKLNQIGGKNGVGRVDLVENRFIGIKSRGVYETPGGTLLLIAHRAIESVTLDKDTMHKKDSIMPRYAELIYNGYWFSKERFKLQKIVDLKKSKVNGSVKLKLYKGNVTIQSRITKSSAYSMKKVSFEENKTFNKSNVERFINFHKKKLK

SEQ ID NO: 197155 - protein, 219 aa, Unknown
  Bacterial polypetide isolated from the Sargasso Sea
STDANLLHTSSEGKVLEDPWSEAPEYIYNRTTSLFDAPDKHEEINIIFKNGDPIAVNNKKMKAHEILASLNNIAGKHGVGRIDIVENRLVGMKSRGVYETPGGTILLHAHRAIESITLDRGEAHLKDEIMPKYAEIIYNGLWFSSERESMQKIIDKTQVNVSGEVRLKIYKGNVIVTGRKSSNSLYDTSLVSFDEEGQYNQKDAEGFIKILSLRLKKRK

SEQ ID NO: 197156 - protein, 140 aa, Unknown
  Bacterial polypetide isolated from the Sargasso Sea
MQHIKKVVLAYSGGVDTSVCIPYLKNEYGITEVVTYVADLGQGEDLELIRQKALNSGASQSIVGDLVNSFVERYAFPAIRANALYLDKYPLSTALARPLIAENLVNTAREINADAVAHGCTGKGNDQVRFDLAINALGPD

SEQ ID NO: 197157 - protein, 285 aa, Unknown
  Bacterial polypetide isolated from the Sargasso Sea
MKKKRKIVLAYSGGLDTSIILKWLQENYNAEVIAYTADIGQKINKKKIINNAKKLGVKIIIIENLKDIFVKDYIFPMVRGHAVYEGVYLLGTSIARPLIAKKQIIVAKKFNAFAVSHGSTGKGNDQVRFELGYHFFGPKIKVIAPWRIWKLKSRTDLIKYAKKNGIPIPKDKKGAAPFSVDDNFFHTSTEGKILENPKNQAPEFIFQRTTSPEKAPDKASYITIGFKNGDPISVNGKKTSPGNLLNKLNIIAGKNGIGRVDLVENRFIGIKSRGIYETPGGTLLL

SEQ ID NO: 197158 - protein, 145 aa, Unknown
  Bacterial polypetide isolated from the Sargasso Sea
MKKIVLAYSGGLDTSIILRWLQENYNAEVIAYTSDIGQEIDRKKILRNAKLLGVKKIIIEDLKNIFVKDYVFPMIRAHAVYEGIYLLGTSIARPLIAKRQIAIAKKFKAYAVSHGATGKGNDQVRFELGYAFFGRGKIKTIAPWR

SEQ ID NO: 197159 - protein, 171 aa, Unknown
  Bacterial polypetide isolated from the Sargasso Sea
MKSKKRIVLAYSGGLDTSVILKWLQENYKAEVICYTANIGQEINPKKIISNAKKFGVKNIIIKDLKDIFVKDYVFPMIRGHALYEGVYLLGTSIARPLIAKDQIRIAKKYKAFAVSHGATGKGNDQVRFELGYHYFGPKIKIIAPWRIWKLKSRKDLINYARKYKILIPKR

SEQ ID NO: 197160 - protein, 142 aa, Unknown
  Bacterial polypetide isolated from the Sargasso Sea
MQQVKKVVLAYSGGVDTSVCIPYLKNEYGISEVVTFVADLGQSEDLELIRQKALNSGASQSIVGNLVNSFVERYAFPAIRANALYLDKYPLSTALARPLIAENLVNIAREFSADAVAHGCTGKGNDQVRFDLAINALSPDFK

SEQ ID NO: 197161 - protein, 235 aa, Unknown
  Bacterial polypetide isolated from the Sargasso Sea
MKSKKRIVLAYSGGLDTSIILKWLQENYNAEVICYTADIGQEIDKKKIILNAKKLGVKSIIIKDLKDIFIKDYVFPMLRGHAIYEGVYLLGTSIARPLIAKDQIRVAKKYKAYAVSHGSTGKGNDQVRFELGYHYFDPKIKIIAPWRIWKLKSRTDLINYAKKNKISIPKDKKGAPPFSVDDNLFHTSTEGKVLENPKNSAPELIFQRTISPEKAPNKPTFVSIKFRNGDPIEVN

SEQ ID NO: 197162 - protein, 162 aa, Unknown
  Bacterial polypetide isolated from the Sargasso Sea
PANLLSELNMIAGAHGIGRADIVENRYVGMKSRGCYETPGGTVLLKAHRAIESITLDRELSHLKDDLMPRYVSLIYNGYWWSPEREAIQALIDQSQRFVSGCVRLKLYKGNVIVVSRDSSNSLFDEEIATFEDDAGSYDQRDAEGFIKLNALRMRIAAKKNR

SEQ ID NO: 197163 - protein, 172 aa, Unknown
  Bacterial polypetide isolated from the Sargasso Sea
ALDGERLSPAAMLTALNKLGGDNGIGRLDIVESRFVGMKSRGVYETPGGTVLIQARRAVESVCLDRGESHQKDELMPRYAELIYNGFWFSPEREMLQAAIDKCSANVNGTVRVKLYKGNVIVVGRKAANSLYNATLSTFEDDGGAYDQKDAAGFIKIQALRLRTLGTQRGPP

SEQ ID NO: 197164 - protein, 200 aa, Unknown
  Bacterial polypetide isolated from the Sargasso Sea
IQKISAPEFIYQRTVSPERAPNKPSFITINFKNGDPFAINGKKMSPSKLLEKLNNVAGKNGIGRVDLVENRFIGIKSRGVYETPGGTLLIHAHRAIESVTLDKETMHKKDQIMPRYAELIYNGYWYSKERFKLQKIVDLKRNKVNGSVKLKLYKGNVIIESRITNSSAYSVKKVSFEENKTFNKSNVERFINFHKKKLRS

SEQ ID NO: 197165 - protein, 281 aa, Unknown
  Bacterial polypetide isolated from the Sargasso Sea
KNVILAYSGGLDTSIMISWLKENYGCNVIAMCANLGQADELDGLEEKALASGASKVYIEDCREEFIRDYIFPTLQAGAMYEREYLLGTSFGRPLIAKKMVEIAHKEGADAVSHGATGKGNDQVRFELTFMALDPSLKIIAPWKDPLWTLHSREDCIAYAEQRGIEITQSKKRIYSEDRNIWHISHEGGDLEDPMNEPADDVFTQSKPLADAADEAEYITLSFNKGIPVKLNGQSLDPIALLTELNAYGARHAIGQLDMVENRLVGMKSRGVYETPGGSILY

SEQ ID NO: 197166 - protein, 253 aa, Unknown
  Bacterial polypetide isolated from the Sargasso Sea
WREWNLNSRSKLIEYALEHQIPVPKDKEGEAPYSTDANLLHISYEGKALEDPWAEPPSNMFTRTSSPEDAPQTAEVIDIGFNKGDATSIDGKKLSPASLLTKLNSLGGKHGIGRIDIVENRFVGMKSRGVYETPGGTILLAARRAIESLTLDKGASHLKDELMPRYAELVYNGFWFSPERKMLQAAIDSCQENVTGDVRIKLYKGNVIILGRKSPNSLYDLDTVTFEEDEVYDQKDAEGFIKLNALRLRLSKN

SEQ ID NO: 197167 - protein, 283 aa, Unknown
  Bacterial polypetide isolated from the Sargasso Sea
PLIAKKQVEFAKKIGANAVAHGSTGKGNDQVRFEIGYYASDPNIKIIAPWRIWDLKSRDDLINFALKYQIDIPKDKLGEPPFSVDENVLHTSAEGKVLEDPWKSPPDYVYSRTKNIEETPDSPDEIIITFENGDPKMINSEVHSPYEMLKKLNIFGHKHGVGRVDIVENRFIGMKSRGIYETPGGTILFHAHRAIESITLDAETQHRKDSVISEYAELIYNGFWFSKKRKELQEIVDINRNKVNGEVKLKLYKGNTIILGRRSNNSLYSVSEVSFENNEQKDQ

SEQ ID NO: 197168 - protein, 119 aa, Unknown
  Bacterial polypetide isolated from the Sargasso Sea
MGKEINKIILAYSGGLDTSVILHWLKEQYSADVIAFTADIGQEHNPQEVASRAKEIGASKVFIEDLKDEFVSEYVFPMFRANAVYEGEYLLGTSIARPLISKKLIEIAEEENADAIAHG

SEQ ID NO: 197169 - protein, 199 aa, Unknown
  Bacterial polypetide isolated from the Sargasso Sea
LLHTSSEGKILEDPWIEPPDYIYTRTNNISETPNKPETLIIGFENGDPISLNEEKLKPHELLKKLNKIAGEHGVGRIDIVENRFVGMKSRGVYETPGGTILVNAHRAMESITLDRGEAHLKDEIMPKYAESIYNGLWFSSERLAMQKLIDSTQKKVNGKVKLKLIKGNVIILGRKSENSLYDSSLVSFDEKGEYNQKDA

SEQ ID NO: 197170 - protein, 233 aa, Unknown
  Bacterial polypetide isolated from the Sargasso Sea
KIPIMKHNKKESPYSVDANVLHRSAEGKILEDPWKRPPENVFGISKSPQSAPNKETVITIQFKNGDPIGINGKKLSPYNLLEKLNHLGAANGIGRVDIVENRYVGIKSRGVYETPGGTILLKAHRAMESITLDREEVFTKDELMPKYARLIYNGYWFAPERVMMQKAIDASQKRVNGQVKLALYKGNVIVIGRQSPNSLYDENLATFESSNYDQRDAEGFIKLNALRLKKNKI

SEQ ID NO: 197171 - protein, 300 aa, Unknown
  Bacterial polypetide isolated from the Sargasso Sea
LIAKRQIAIAKKFKAYAVSHGATGKGNDQVRFELGYAFFGGKKIKTIAPWREWKLQSRADLIKYAKKNNIPIPKDKKGAPPFSVDDNIFHTSTEGKVLENPKNSAPEFIFQRTVSPEKAPNKKTKVRITFKNSDPVAVNGKKFKPEKILEKLNTLAGKNGIGRVDLVENRFIGIKSRGVYETPGGTLLYAAHRAIESVTLDKKTAHEKERIMPEYAELVYNGYWFSKKRIKLQKIIDKKRNQVSGEIVLSLYKGNITILSRGTKNKAYSMKKVSFEENKTFNKKKVENFIKFHSKQLNKS

SEQ ID NO: 197172 - protein, 234 aa, Unknown
  Bacterial polypetide isolated from the Sargasso Sea
PMIRGHALYEGVYLLGTSIARPLIAKDQIKVAKQYKAYAVSHGSTGKGNDQVRFELGYHYFGPKIKVIAPWRVWKLKSRTDLINYAKKHSIPIPKDKKGAPPFSIDDNLFHTSTEGKFLENPKNSAPEFIFQRTVSPENAPNKPTFVTINFKNSDPIGINGKKLSPSKLLEKLNLLAGKNAIGRVDLVENRFIGIKSRGVYETPGGTLLLNAHRAIESVTLDKDTMHKNRYDYG

SEQ ID NO: 197173 - protein, 159 aa, Unknown
  Bacterial polypetide isolated from the Sargasso Sea
MKSKKKIVLAYSGGLDTSIILKWLQENYKSEIIAYTADIGQEIDRKKLISNAKKLGVKNIIIKDLKNTFVKDYVFPMLRGHAIYEGIYLLGTSIARPLIAKDQIRVAKKFKAYAVSHGATGKGNDQVRFELGYHYFGPKIKIIAPWRIWKLKSRTDLIN

SEQ ID NO: 197174 - protein, 161 aa, Unknown
  Bacterial polypetide isolated from the Sargasso Sea
MKSKKKIVLAYSGGLDTSIILKWLQENYNSEIIAYTADIGQEIDRKKLISNAKKLGVKNIIIKDLKNTFVKDYVFPMIRGHAIYEGVYLLGTSIARPLIAKDQIRVAKKFKAYAVSHGSTGKGNDQVRFELGYHYFGPKIKIIAPWRIWKLKSRTDLINYA

SEQ ID NO: 197175 - protein, 394 aa, Unknown
  Bacterial polypetide isolated from the Sargasso Sea
MKRQKKIVLAYSGGLDTSIILKWLQENYDAEVIAYTADVGQEMDRKKIINNAKKLGVKKIIIQDLKNIFVKDYVYPMIRSHALYEGVYLLGTSIARPLIAKDQIRVAKKFNAYAVSHGSTGKGNDQVRFELGYHYFGPKIKIIAPWRIWKLKSRTDLINYAKKHGIPIPKDKKGAPPFSVDDNLFHTSTEGKVLENPKNSAPEFIFQRTISPEKAPNKPSFIIINYKNGDPVGLNGKKLSPAKVLDKLNQLAGKNGIGRVDLVENRFIGIKSRGVYETPGGTLLLVAHRAIESVTLDKDIMHKKDEVMPRYAELVYNGYWYSKERFKLQKIVDLKRNKVNGSVKLKLYKGNITIQSRQTSSNAYSMKKVSFEENKTFNKSNVEEFINFHKKKLR

SEQ ID NO: 197176 - protein, 394 aa, Unknown
  Bacterial polypetide isolated from the Sargasso Sea
MKKHKKIVLAYSGGLDTSIILKWLQENYDAEVIAYTADVGQEMDRKKIIKNAKKLGVKKIIIKDLKNIFVKDYVYPMIRGHAIYEGVYLLGTSIARPLIAKDQIRVAKKFNAYAVSHGSTGKGNDQVRFELGYHYFGPKIKIIAPWRIWKLKSRTDLINYAKKHGIPIPKDKKGAPPFSVDDNLFHTSTEGKVLENPKNSAPEFIFQRTTSPEKAPNKPSFITINYKNGDPVGLNGKKLSPAKVLDKLNQLAGKNGIGRVDLVENRFIGIKSRGVYETPGGTLLLVAHRAIESVTLDKDTMHKKDEIMPRYAELVYNGYWYSKERFKLQKIVDLKRNKVNGSVKLKLYKGNITIQSRQTSSNAYSMKKVSFEENKTFNKSNVERFINFHKKKLR

SEQ ID NO: 197177 - protein, 324 aa, Unknown
  Bacterial polypetide isolated from the Sargasso Sea
MTQKRRIVLAYSGGLDTSIILKWLQENYNAEVICYTADIGQEIDKKKIIKNAKKFGVKNIIIKDLKNIFVKDYVFPMIRGHAIYEGVYLLGTSIARPLIAKDQIRIAKKYKAYAVSHGATGKGNDQVRFELGYHFFGPKIKIIAPWRIWNLRSRTDLIKYAKKYKIPIPKDKAGSTPFSVDDNLFHTSTEGKVLENPKNSAPEIIFQRTVSAEKAPNKPTFISINFKNGDPVGINGKKYNPEKILTKLNLIAGKNGIGRVDLVENRFLGIKSRGVYETPGGTLLIHAHRAIESVTLDKNTMHKKDSIMSRYAELIYNGYWFLKR

SEQ ID NO: 197178 - protein, 375 aa, Unknown
  Bacterial polypetide isolated from the Sargasso Sea
SQWLQEEKNLDVVTYTADMGQGDIPDDLEEKAKSFGASKVIIDDLSEEFVSDYVYPMFRCNTLYEGEYLLGTAIARPLIAKKLVRIAESENTNIISHGATGKGNDQIRFEIGAHALNSDIQVIAPWREWNMSSRTDLMNYCKEHQIPMPASKAEEPPFSMDENLLHISYEGGVLEDLSTPPPEDMWLKVKSIEDAKDEAEEIKITFENGDPIAVDDESLSAAEILKKLNLIGGNHGIGRIDIVESRATGMKSRGCYETPGGTILLKARRAMESLCLSRDEIVKKDSLMPSYAKLIYDGLWWSNDRVSLQKQIDNFATKVSGSVVIKLLKGNVISLGKESKNSLYDENKASFEESGGFSNQDMEDYIKENILKFDR

SEQ ID NO: 197179 - protein, 350 aa, Unknown
  Bacterial polypetide isolated from the Sargasso Sea
IREKAESLGVKEIFIENLQEEFVKNYVFPMFRANTLYEGTYLLGTAIARPLIAKRQIEIAKEIGADSVAHGATGKGNDQVRFELGYYANNSSIIVIAPWREWDLSSRKELVNFALQHQIPIPKDKKGEPPFSTDANLLHTSSEGKVLEDPWLEAPEYVYNRTTSLLDAPDKPEEINIIFENGDPVAINNKKMKAHEILTSLNNIAGKHGVGRIDIVENRLVGMKSRGVYETPGGTILLHAHRAIESITLDRGEAHLKDEIMPKYAEIIYNGLWFSSERESMQKIIDKTQVNVSGEVRLKIYKGNVIVCGRKSTNSLYNTSLVSFDEEGQFNQKDAEGFIKILSLRLKKRK

SEQ ID NO: 197180 - protein, 188 aa, Unknown
  Bacterial polypetide isolated from the Sargasso Sea
MQKKAVHKIMKAKKKIVLAYSGGLDTSIILKWLQENYNAEVICYTADIGQEIDRKKVFKNAKKFGVKKIIIQNLKDTFVKDYIYPMVRGHAIYEGVYLLGTSIARPLIAKDQIRVAKKFKAYAVSHGSTGKGNDQVRFELGYHYFGPKIKIIAPWRIWKLKSRTDLINYAKKHGIPIPKDKKGSPPFS

SEQ ID NO: 197181 - protein, 398 aa, Unknown
  Bacterial polypetide isolated from the Sargasso Sea
MKKKSIVLAYSGGLDTSIILHWLKENYNADIIAYIADLGQGENLKSIAKRAKKVGAKKVYVENLRNEFVKDYIFPMIQASSVYEGNYLLGTSIARPLIAKRQIEIAKKEKSFAVSHGSTGKGNDQIRFELSFKALNPGIEIIAPWRIWNLKSREDCIKYARKNKISVPVTKSKPYSCDRNIYHISYEGGVLEDPWTEPPKDMYESVRLIENTPDKATNITLTFKDGVPISINNKKFSPVALLEKLNTLGGKNGVGVVDIVENRFVGMKSRGVYETPGGTILNIAHRAIESLTMDREVMHIRDSLIPKISQLIYNGFWFSPEMSTIMAFIKQSQKNISGDVRLKIFKGNVVVSGRKSKFSLYNSNLATFEEDNLYDQKDATGFIRLNSLRLILDKIKNK

SEQ ID NO: 197182 - protein, 393 aa, Unknown
  Bacterial polypetide isolated from the Sargasso Sea
MKKIVLAYSGGLDTSIILKWLQINYKAEVIAYTSNIGQNLNKKKIIQNAKRLGVKKIIIENLKNIFVKDYVFPMIRAHAVYEGVYLLGTSIARPLIAKRQIEIAKKFKAFAVSHGATGKGNDQVRFELGYSFFGKKIKVIAPWREWKLQSRSDLIKYAKKYKIPIPKDKKGAPPFSVDDNLFHVSTEGKVLENPRNAPPEFIFQKTISPEKAKNKTVKIKIGFKNSDPVSINGKKYKPEFLLEKLNKIGGANGIGRVDLVENRFIGIKSRGVYETPGGTILYFAHRAIESVTLDKATMHAKERIMPLYAELVYNGYWFSKKRLNLQKIIDKKRNQVNGEVILKIYKGNIIIVSRKSKNNAYSLKKVSFEENKTFKKSKIEKFIKFHSKQLHKQ

SEQ ID NO: 197183 - protein, 211 aa, Unknown
  Bacterial polypetide isolated from the Sargasso Sea
MKLKKKVVLAYSGGLDTSVILKWLQENYNAEVIAYTADIGQKLDKKKIFRNAKKLGVKNIIIKNLKDVFVKDYIYPMIRGHALYEGVYLLGTSIARPLIAKDQIRIAKKFKAYAVSHGSTGKGNDQVRFELGYHYFGPKIKIIAPWRIWKLKSRTDLINYAKKNKIIIPKDKKGAPPFSVDDNLFHTSTEGKVLENPINPAPELFSKNNSP

SEQ ID NO: 197184 - protein, 356 aa, Unknown
  Bacterial polypetide isolated from the Sargasso Sea
MKSKKKIVLAYSGGLDTSIILKWLQENYNADVICYTADVGQEIDRKKIITNAKKFGVKNIIIKDLKDIFVKDYVYPMIRGHAIYEGVYLLGTSIARPLIAKDQIRVAKKFKAYAVSHGATGKGNDQVRFELGYHYFGPKIKIIAPWRIWKLKSRTDLINYAKKHGITIPKDKKGAPPFSVDDNLFHTSTEGKVLESPKNSAPEFIFQRTVSPEKAPNKPSFVTINFKNGDPFGINGKKLSPAKLLTKLNGVAGKNGIGRVDLVENRFLGIKSRGVYETPGGTLLINAHRAIESVTLDKETMHKKDQIMSRYAELIYNGYWYSKERFKLQKIVDLKRSKVNGSVKQKLYKGNISIQS

SEQ ID NO: 197185 - protein, 268 aa, Unknown
  Bacterial polypetide isolated from the Sargasso Sea
MKKIVLAYSGGLDTSIILKWLQENYKAEVIAYTSDIGQEMNKQKIIRNAKRLGVKKIIIEDLKNIFVKDYVFPMIRAHAVYEGVYLLGTSIARPLIAKRQIAIAKKFKAFAVSHGATGKGNDQVRFELGYAFFGGKKIKVIAPWREWKLQSRTDLINYAKKNKIPIPKDKKGAPPFSVDDNIFHTSTEGKVLENPKNSAPEFIYQRTISPERAPNKKTKVKITFKNGDPTAVNGIKLKPEKLFEKLNLIAGKNGIGRVDLVENQIYWN

SEQ ID NO: 197186 - protein, 393 aa, Unknown
  Bacterial polypetide isolated from the Sargasso Sea
MKFKKRIILAYSGGLDTSIILKWLQEKYNAEVICYTADIGQKIDKIKIYKNAKKLGVKKIIIEDLKNIFVKDYVFPMLRGHAMYEGVYLLGTSIARPLIAKRQIAIAKKFKAYAVSHGSTGKGNDQVRFELGYYYFGPKIKIIAPWREWDLSSRSDLIKYAKKKNITFPKDKKGSPPFSIDDNIFHTSTEGKVLENPKNPAPEYIFQRTNSLEKSPNKQTIVSVGFKNGDPISVNGKKLSPGKLLEKLNNLAGKNGIGRVDLVENRFIGIKSRGVYETPGGTILMVAHRAIESVTLDKKTMHKKDQVMPRYAELIYNGYWYSKERYKIQKIVDLKKNKVNGLVKLKLYKGNITIISRQTKSSAYSMKKVSFEENKTFNKSNVERFINFHKKKL

SEQ ID NO: 197187 - protein, 249 aa, Unknown
  Bacterial polypetide isolated from the Sargasso Sea
EAIVYGEKFGIPAPVSKKSPYSIDVNLLGRSIEAGILEDPMQEAPEDIFLMTSSVDNSPDSHQDIEIVFKNGFPVGINDEFLTPVEIIQKANDLAGNHGFGRIDMIEDRVVGIKSREIYETPGLLLLIKAHKELESITLNPDVVDFKGIVEKKWGQLVYQGFWFGPLKESLDAFISSTQTSVNGRVKIRLYKGNAIVIGRMSEKNSLYREDLATYSKDDVFNHSLAEGFIYMWGMSNKIWAELNAKTKD

SEQ ID NO: 197188 - protein, 271 aa, Unknown
  Bacterial polypetide isolated from the Sargasso Sea
MKSKKKIVLAYSGGLDTSIILKWLQENYDADVICYTADVGQEIDRKKIIANAKKFGVKNIIIKDLKDIFVKDYVYPMIRGHAIYEGVYLLGTSIARPLIAKDQIRVAKKFKAYAVSHGATGKGNDQVRFELGYHYFGPKIKIIAPWRIWKLKSRTDLINYAKKHGIAIPKDKKGAPPFSVDDNLFHTSTEGKVLENPKNSAPEFIFQRTVSPEKAPNKPSLVTINFKNGDPFGINGKKLSPTKLLTKLNDLAGKNGIGRVDLVENRFLGIK

SEQ ID NO: 197189 - protein, 169 aa, Unknown
  Bacterial polypetide isolated from the Sargasso Sea
MKKIVLAYSGGLDTSIILKWLQENYKAEVIAYTADIGQKIDKKKIFRNAKKLGVKKIIIKNLKNIFVKDYVFPMIRGHAIYEGTYLLGTSIARPLIARDQIQIAKKFKAFAVSHGATGKGNDQVRFELGYHYFGPKIKVIAPWRIWKLKSRTDLINYAKKHSIQIPKDK

SEQ ID NO: 197190 - protein, 333 aa, Unknown
  Bacterial polypetide isolated from the Sargasso Sea
MKGKKKIVLAYSGGLDTSIILKWLQEKYKAEVIAYTADIGQQIDKKKIIRNAKKLGVKKIIIKDLKNIFVRDYIYPMIRGHAIYEGKYLLGTSIARPLIAKDQIRVAKKYRAHAVSHGSTGKGNDQIRFELGYHYFGPKIKIIAPWRIWKLNSRSDLIKYAKKNKINIPKDKKGATPFSVDDNLFHTSTEGKFLENPRNSAPEFIFQRTLSPEKSPNKATFITIGFKNSIPISINGKKLSPSKLLYKLNHVAGRNGIGRIDLVENRFLGIKSRGVYETPGGTLLIDAHRAIESVTLDKEIMHKKDNIMNRYAELIYNGYWYSRERFKLQKIID

SEQ ID NO: 197191 - protein, 402 aa, Unknown
  Bacterial polypetide isolated from the Sargasso Sea
MNIHNPSKIVLAYSGGLDTSVILKWLQEKYQCEVITFTADIGQGEEVEPARKKAQNLGVKKIYIENLENTFVKDYVFPMFRCNTTYEGMYLLGTSIARPLIAKRQIEIAKSEGADAVAHGATGKGNDQVRFELSYLSQDPNIKIIAPWREWELSSRTKLIEYAEKHQIAIAKDKRGEAPFSVDANLLHVSAEGKILEDPWIEPEEYIYSRTVNPMEAPDKPTEITIEFSKGDPIALNKKKLEPAQILKKLNEFGGKNGIGRIDIVENRFVGMKSRGVYETPGGTILLYARRAIESITLDREEAHLKDEIMPKYAKLIYNGFWFSPEREMMQALIDKASMSVNGVVRLKLYKGNIIITGRKSENSLYDESLVTFEDSTSNYDQTDAKGFIKLNALRLIKNKKI

SEQ ID NO: 197192 - protein, 302 aa, Unknown
  Bacterial polypetide isolated from the Sargasso Sea
MKNKIVLAYSGGLDTSVILKWLQTEYNADVIAYAADLGQGSELTEAKIKAKKLGAKKIYIENLKEEFVRDYVFPMFRCNTIYEGEYLLGTSIARPLIAKRQIEIAKKENANAVSHGATGKGNDQVRFEFSYYALDPKIKVIAPWREWDLSSRTKLLEFAAKNKIPIMKHNKKESPYSVDANVLHRSAEGKILEDPWKRPPENVFGISKSPQSAPNKETLITIQFKNGDPIAINGKKLSPFNLLEKLNKLGSTNGIGRVDIVENRYVGIKSRGVYETPGGTILLKAHRAMESITLDREEGFYE

SEQ ID NO: 197193 - protein, 172 aa, Unknown
  Bacterial polypetide isolated from the Sargasso Sea
MKSRKRIVLAYSGGLDTSIILKWLQENYNAEVISYTADIGQKIDRKKIYKNAKKLGVKKIIIENLKDTFVKDYVYPMLRGHPLYEGVYLLGTSIARPLIAKRQIAIAKKYKAYAVSHGSTGKGNDQVRFELGYHYFGPKIKIIAPWREWKLSSRTDLIKYAKKNNITIPKDK

SEQ ID NO: 197194 - protein, 332 aa, Unknown
  Bacterial polypetide isolated from the Sargasso Sea
MKKQKKIVLAYSGGLDTSIILKWLQKNYDAEVIAYTADVGQEMDRKKIIKNAKKLGVKKIIIQDLKNVFVKDYVYPMIRGHAIYEGVYLLGTSIARPLIAKDQIRVAKKFNAYAVSHGSTGKGNDQVRFELGYHYFGPKIEIIAPWRIWKLKSRTDLINYAKKHGIPIPKDKKGAPPFSVDDNLFHTSTEGKVLENPKNSAPEFIFQRTTSPEKAPNKPSFITINYKNGDPIGLNGKKLSPANVLDKLNQLAGKNGVGRVDLVENRFIGIKSRGVYETPGGTLLLVAHRAIESVTLDKDTMHKKDEVMPRYAELVYNGYWYSKERFKLQKII

SEQ ID NO: 197195 - protein, 345 aa, Unknown
  Bacterial polypetide isolated from the Sargasso Sea
MSKKKIVLAYSGGLDTSIILKWLQENYNAEVIAYTADIGQELNKKKIIKNAKKLGVKKIVINNLKNIFVKDYVFPMIRGHAIYEGVYLLGTSIARPLIAKDQIQVAKKNKAFAVSHGSTGKGNDQVRFELGYHYFGPKIKVIAPWRIWKLKSRTDLINYARKNNISIPKDKKGAPPFSVDDNLFHTSTEGKVLENPKNSAPEFIFQRTISPEKAPNKPTYLSIGFKNGDPTNVNGKKLTPEKILEKLNQLGGKNGIGRVDLVENRFIGIKSRGVYETPGGTLLLIAHRAIESVTLDRDTMHKKDSIMPRYAELIYNGYWFSKERLKLQKIVDQKRKKVNGTVKLK

SEQ ID NO: 197196 - protein, 359 aa, Unknown
  Bacterial polypetide isolated from the Sargasso Sea
LGQDEDYDFVEKKANQQGVKEIFIEDLKEEFVRDYVFPMFRANPLYEGYYLLGTSIARPLIAKKQIEIANKVGADAVSHGATGKGNDQIRFELGYYYHKPDIKIISPWREWDLSSRTSLVEYADQHGIEIAKDKRGEQPFSIDENILHSSAEGKVLEDPWEEAPDYVYTRSVSPENAPDTPEEITIEFKNGDAYALNGQSMSPFELLKALNEMGGKHGIGRVDLVENRYIGMKSRGIYETPGGTILYHAHRAIESITLDKEAAHMKDELSPKYAELVYNGYWFSPEREMMQSMIDKSQAKVEGKVRLKLYKGNTMITGRESSMSLYNPNLATFESDNIYSQKDAEGFIKLNALRLREKK

SEQ ID NO: 197197 - protein, 407 aa, Unknown
  Bacterial polypetide isolated from the Sargasso Sea
MSIENKNTGVKKVVLAYSGGLDTSAIIPWLKETYDNCEIIAFCADVGQGEEELVGLTEKALASGASECHIVDLKEEFVKDYIYPTMATGAIYEGTYLLGTSMARPIIAKAQVDVARKVGADALCHGCTGKGNDQVRFEGCFAALAPDLKVIAPWREWTMQSREDLLAYLAERNIKTSASATKIYSRDANAFHISHEGGELEDPWNEPSKGVWTLTADPEDAPNQAEYVSLEVEHGRVTKVNGEALTPYAALMKLNAIAAPHGVGRIDITENRLVGMKSRGCYETPGGTVMFAALRAIEELVLDKTSRTWREQVGAQMAHLVYDGRWFTPLCKSLLAASESLAESVNGEVVVKLYKGHAIAVKKRSPNSLYSEAFATFGEDQVYDQKHAEGFIRLYSLASRIRALNAK

SEQ ID NO: 197198 - protein, 402 aa, Unknown
  Bacterial polypetide isolated from the Sargasso Sea
MKKIVLAYSGGLDTSIILKWLQENYKAEVIAYTADIGQEMDKKKIIRNAKKLGVKKIIIKNLKNIFVRDYVFPMIRGHAIYEGVYLLGTSIARPLIAKDQIQVAKKFKAFAVSHGATGKGNDQVRFELGYHYFGPKIKVIAPWRIWKLKSRTDLMKYAKKHQISIPKDKKGAPPFSVDDNLFHTSTEGKVLENPKNSAPEFIFQRTTSPEKAPNKPSYVTIGFKNGDPTTINGKKLTPEKLLEKLNQLGGKNGVGRVDLVENRFIGIKSRGVYETPGGTLLLIAHRAMESVTLDKETMHKKDSIMPRYAELIYNGYWFSKERFKLQKIVDLKRNKVNGSVKLKLYKGNITIQSRITKSSAYSMRKVSFEEIKLLINPMLKDLLVSTKKNYNKEIWILKPQEQ

SEQ ID NO: 197199 - protein, 397 aa, Unknown
  Bacterial polypetide isolated from the Sargasso Sea
MDKINKVVLAYSGGLDTSVILRWLKETYQCEVATFTANLGQDEDYDLVKVKAEKQGTTEIFIEDLKDEFVSDYVFPMFRANPLYEGYYLLGTAIARPLIAKKQIEIANQINADAVSHGATGKGNDQIRFELGYYYHKPDIKIISPWREWDLSSRTSLVEYADKHGIEIAKDKRGEQPFSIDENILHSSAEGKVLEDPWVEAPDYVYTRSVSPEEAPDKSEEIIIEFKKGDACALNGKALTPFEILKCLNELGGKHGIGRVDLVENRYIGMKSRGIYETPGGTILYHAHRAIESITLDKEAAHMKDELAPKYAELIYNGYWFSPEREMMQSMIDKSQEKVEGKVRLKLFKGNTMITGRESSLSLYNPNLATFESDQVYSQKDAEGFIKLNALRLREKK

SEQ ID NO: 197200 - protein, 148 aa, Unknown
  Bacterial polypetide isolated from the Sargasso Sea
VGRIDIVENRLVGMKSRGCYETPGGTVLLKAYKALETMVLDKAALKYREQIGLEFSHVMYDGRWFTALNDALLAGAASFAKKVTGDIVVKLYKGQATVTQRRSPNSLYSEDFATFGADDVYDQKHAEGFIRLFSLSSRIEALKKQGEQ

SEQ ID NO: 197201 - protein, 407 aa, Unknown
  Bacterial polypetide isolated from the Sargasso Sea
MTDKKINKIVLAYSGGLDTTVILHWLKDTYDAEVIAFTADIGQDHDPEQVEERASAIGASKILIEDLKEEFTKNYIFPMFKANTLYEGEYLLGTSIARPLISKRLIEIAEEEGADAIAHGATGKGNDQIRFEIGSYSLNPDIQVIAPWRTWEYSSRADLVDYCKKHQIEIDASPDDPLYSTDENLLHTSYEGEILEDPSVKAPEEIWQRTSSLKNAPDEEEIISIEFKSGEPISINNVHNSSSEILSKLNQLAGKHGIGRLDLVENRYTGMKSRGCYETPGGTILLRAHRAIESITLDAEAGHLKDGLMPKYAQLIYDGYWWSPEREALQALIDKTQEFVSGSVKMSLYKGNITILGRSSDLSLYDSKIVTFEDDENTYNQEDATGFIKINSLRLKQVARRKKKEES

SEQ ID NO: 197202 - protein, 387 aa, Unknown
  Bacterial polypetide isolated from the Sargasso Sea
VCIPYLKQEWGVEEVITFAADLGQGDELEPIRLKALDAGASQSLVGDLIEPFITEFAFPAIRANALYEGRYPLSTALARPLIARRLVEIAREVGADAVAHGCTGKGNDQVRFDVAIGALAPDLKVLTPAREWGMSREETIAYGERYGLPSPVSKRSPYSIDLNLLGRSIEAGPLEDPDVEPPEEVFAMTCSIEAAPAQPEVVTIGFEAGLPVSINGQRLDPVSLIREANRLAGSHGFGRLDMIENRVVGIKSREIYETPGLLLLIQAHQELESLTLAADVLRTKRQLEMQWADLVYQGLWFGPLKDALDGFIERTQTTVNGNVRIKLHRGSATVVGRSSSDSLYEPDMATYGAEDQFDHRAASGFIYVWGLPTRLWAAAKRRRGHHG

SEQ ID NO: 197203 - protein, 394 aa, Unknown
  Bacterial polypetide isolated from the Sargasso Sea
MKSNKRIVLAYSGGLDTSIILKWLQENYNAEVICYTADIGQKIDRKKIIQNAKKLGVKKIVIKDLKDIFVKEYVYPMIRGHAIYEGVYLLGTSIARPLIAKDQIRVAKKFKAYAVSHGSTGKGNDQVRFELGYHYFGPKIKIIAPWRIWKLKSRTDLIRYANKHGIPIPKDKKGAPPFSVDDNLFHTSTEGKLLENPKNSAPEFIFQRTTSPERAPNKPTFIRINYRNGDPIGLNGKKLSPAKLLNKLNQLAGKNGIGRVDLVENRFIGIKSRGVYETPGGTLLLTAHRAIESVTLDKDTMHKKDDVMPRYAELIYNGYWYSKERFKLQKIVDLRRNKVNGSVKLKLYKGNITIQSRQTSSNAYSMKKVSFEENKTFNKSNVERFINFHKKKLR

SEQ ID NO: 197204 - protein, 391 aa, Unknown
  Bacterial polypetide isolated from the Sargasso Sea
MKQKSILAFSGGLDTSVVVKYMQDMHDMDVVTVTVDVGQGDDNNKIARKAKKLGVKKHYNIDAKKEFVTDYIFPAIKANALYQKKYCLATALARPLIAHKVLEIAKKEKVSSLAHGCSGKGNDQVRFDNTLRAGSDLPIIAPIRDMNLDRETELKFANKHGIEIDTVAKKFSIDQNLWGRAIEGGVLENPFNEPPDDAFIWIKTKNLPEKPAYLKIKFTKGVPTEVDGKKLPPVKLIEYINKKAGSHGVGIVDHIEDRVVGIKSREVYETPAALCLIEAHSDLEKMVHTKHETKFKTLVDDEWAWMVYSGLWDDPLREELDQFIEQAQKRVTGTVKLKLYKGNVRVVGRESKYSLYSHDIATYGKDSTFDQKLAKGFVELWGMQSTEANKF

SEQ ID NO: 197205 - protein, 393 aa, Unknown
  Bacterial polypetide isolated from the Sargasso Sea
MKSKKKIVLAYSGGLDTSIILKWLQENYDAEVICYTADVGQEINRKKIIKNAKKFGVKNIIIKDLKDIFVKDYVYPMIRGHAIYEGVYLLGTSIARPLIAKDQIKVAKKYKAYAVAHGATGKGNDQVRFELGYHYFGPKIKIIAPWRIWKLKSRTDLINYAKKHGIAIPKDKKGAPPFSVDDNLFHTSTEGKVLENPKNSAPEFIFQRTTSPEKAPNRPSYVTINFKNGDPLGINGKKLSASKLLEKLNQLAGKNGIGRVDLVENRFIGIKSRGVYETPGGTLLIHAHRAIESVTLDKDTMHKKDQVMPRYAELIYNGFWYSKERFKLQKIVDLNKNKVNGSVKLKLYKGNIIIESRQTKSSAYSMKKVSFEENKTFNKSNVERFINFHKKKL

SEQ ID NO: 197206 - protein, 350 aa, Unknown
  Bacterial polypetide isolated from the Sargasso Sea
MKSKKKIVLAYSGGLDTSIILKWLQENYDADVICYTADVGQEIDRKKIITNAKKFGVKNIIIKDLKDIFVKDYVYPMIRGHAIYEGVYLLGTSIARPLIAKDQIRVAKKFKAYAVSHGATGKGNDQVRFELGYHYFGPKIKIIAPWRIWKLKSRTDLINYAKKHSIAIPKDKKGAPPFSVDDNLFHTSTEGKVLENPKNSAPEFIFQRTVSPEKAPNKPSFVTINFKNGDPFGINGKKLSPAKLLTKLNDLAGKNGIGRVDLVENRFLGIKSRGVYETPGGTLLINAHRAIESVTLDKETMHKKDQIMSRYAELIYNGYWYSKERFKLQKIVDLKRSKVNGSVKLKLYKG

SEQ ID NO: 197207 - protein, 225 aa, Unknown
  Bacterial polypetide isolated from the Sargasso Sea
MPKKIVLAYSGGLDTSVILKWLQVKYKCPVVTFTADLGQGEELEPVKGKAQKLGVEETFIEDLREEFVKDYVFPMFRANALYEGTYFLGTAIARPLIAKKQIEIAKEVGADTVAHGATGKGNDQVRFELGYYAKNSKIKVISPWREWELNSRNDLINFAEKYQINIPKDKRGEAPFSTDANLLHTSSEGKILEDPWIDAPDFIYSRTKSINDANPTPDEIIISLS

SEQ ID NO: 197208 - protein, 278 aa, Unknown
  Bacterial polypetide isolated from the Sargasso Sea
MDHTGKGNDQVRFELGYHYFGPKIKIIAPWRIWKLKSRTDLINYAKKHGITIPKDKKGAPPFSVDDNLFHTSTEGKILENPKKSAPEFIFQRTCSPEKAPNSASFVTIGFKKGDPVAINGKILTPSKLLEKLNYIAGKNGIGRVDLVENRFIGIKSRGVYETPGGTLLINAHRAIESVTLDKETMHKKDEIMPKYAELIYNGYWYSKTRFKLQKIVDRKRNKVNGSVKLKLYKGNITIVSRQTKSIAYSMKKVSFEENKTFNKSNVERFINFHKKKLQ

SEQ ID NO: 197209 - protein, 391 aa, Unknown
  Bacterial polypetide isolated from the Sargasso Sea
MKQKSILAFSGGLDTSVVVKYMQDMHDMDVITVTVDVGQGDDNNKIAKKAKKLGVKKHYNIDAKKEFVTDYIFPAIKANALYQKKYCLATALARPLIAHKVLEIAKKEKVSSLAHGCSGKGNDQVRFDNTLRSGSNLPIIAPIRDMNLDRETELKFANKHGIEIDTVAKKFSIDQNLWGRAIEGGVLENPFNEPPDDAFIWIKTKNLPEKPSYLKIKFVKGVPTEVDGKKLPPVKLIEYINKKAGNNGVGIVDHIEDRVVGIKSREVYETPAAICLIEAHSDLEKMVHTKHETKFKTLVDDEWAWMVYSGLWDDPLRKELDQFIEQAQKRVTGTVKLKLHKGNVRVVGRESKYSLYSHDIATYGKDSTFDQKLAKGFVELWGMQSTEANKF

SEQ ID NO: 197210 - protein, 403 aa, Unknown
  Bacterial polypetide isolated from the Sargasso Sea
MQNVKKIVLAYSGGLDTSAIIPWLKENYGCEVVAFAADVGQGDEELEGLHEKAIASGASECHIVDLKEEFVSEYIFPTITTGAVYEGEYLLGTSMARPVIAKAQVEIARKVGADALCHGCTGKGNDQVRFESTFAALAPDLTVIAPWREWDMVSREDLLAYLAERNIPTTASATKIYSRDANAWHISHEGGELEDPWQEPTKQVWTMTVDPEDAPDTPERVTLSFDEGKLTHVDGEALSPYQALVKLNTVAAAHGVGRIDIVENRLVGMKSRGCYETPGGTVLLKAYKALETMVLDKAALKYREQIGLEFSHVMYDGRWFTALNDALLAGAASFAKKVTGDIVVKLYKGQATVTQRQSPNSLYSEDFATFGADDVYDQKHAEGFIRLFSLSSRIEALKKQGEQ

SEQ ID NO: 197211 - protein, 234 aa, Unknown
  Bacterial polypetide isolated from the Sargasso Sea
MKSKKKIVLAYSGGLDTSIILKWLQENYDADVICYTADVGQKIDRKKIITNAKKFGVKNIIIKDLKDIFVKDYVYPMIRGHAIYEGVYLLGTSIARPLIAKDQIRVAKKFKAYAVSHGATGKGNDQVRFELGYHYFDPKIAIIAPWRIWKLKSRTDLINYAKKHGIAIPKDKKGAPPFSVDDNLFHTSTEGKVLENPKNSAPEFIFQRTVSPEKAPNKPSFVTINFKNGESFWN

SEQ ID NO: 197212 - protein, 279 aa, Unknown
  Bacterial polypetide isolated from the Sargasso Sea
MPTKIVLAYSGGLDTSVILKWLQNRYECPVVTFTADIGQGDELSPIEAKAKNLGVEEIFIEDLQEEFVRDYVFPMFRANTLYEGTYLLGTAIARPLIAKRQIEIAKIVGADAVAHGATGKGNDQVRFELGYYANNPKIEVIAPWRDWEFESRNDLIDYAEKNQITVPKDKMGEPPFSTDANLLHTSSEGKLLENPWVEPPEYVFSRTKSIEDALDQPEMITIEFKNGDPVSINEDNLKPHEILAKLNSVAGNHGVGRIDIVENRFVGMKSRGIYETPGG

SEQ ID NO: 197213 - protein, 342 aa, Unknown
  Bacterial polypetide isolated from the Sargasso Sea
MKSNKRIVLAYSGGLDTSIILKWLQENYKAEVIAYTADIGQEIDKKKIIKNAKRLGVKKIIIKNLKDTFVKDYVYPMIRGHAIYEGVYLLGTSIARPLIAKDQIRIAKKFKAYAVSHGSTGKGNDQVRFELGYHYFGPKIKIIAPWRIWKLKSRADLINYAKKHRIVIPKDKKGAPPFSVDDNLFHTSTEGKVLENPKNSAPEFIFQRTISPEEAPKKPSFVTIGFKNSDPITINGKKLSPSKLLEILNSIAGKNGIGRVDLVENRFIGIKSRGVYETPGGTLLINAHRAIESVTLDKETMHKKDEIMPKYAELIYNGYWYSKARFKLQKIVDKKRNKVNGS

SEQ ID NO: 197214 - protein, 268 aa, Unknown
  Bacterial polypetide isolated from the Sargasso Sea
MSDKKIKKIVLAYSGGLDTTVILHWLKNTYDAEVIAFTADIGQDHDPELVKSRANSIGASKIIIEDLKEDFTKDYIFQMLKANTLYEGEYLLGTSIARPLISKRLVEIAEEEGADAIAHGATGKGNDQIRFEIGSYSLNPEIEVIAPWRTWDYSSRADLVEYCKQHQIEIESSPDEPLYSTDENLLHTSYEGEILEDPSVEAPEEIWQRTSSLEDAPDKAERISISFEQGLAISINKEKLSSSEILSRLNELAGLHGIGRLDLVEIGS

SEQ ID NO: 197215 - protein, 390 aa, Unknown
  Bacterial polypetide isolated from the Sargasso Sea
MKKIVLAYSGGLDTSIILKWLQENYQAEVIAYTSDIGQELDKKKIIRNAKKLGVKKIIINDLKNTFVKDYIFPMIRGHAIYEGVYLLGTSIARPLIAKDQIKVAKKYKAYAVSHGSTGKGNDQVRFELGYHYFGPKIKVIAPWRIWKLKSRTDLINYAKKHGIPIPKDKKGAPPFSVDDNLFHTSTEGKVLENPKNSAPEFIFQRTNSPEEAPNKPTYVTINFKNSDPIGLNGKKLKPAKLLEKLNQLAGKNGIGRVDLVENRFIGIKSRGVYETPGGTVLLNAHRAIESVTLDKETMHKKDMVMPRYAELIYNGYWYSKERNKLQKIVDLKRNKVNGSVKIKLYKGNITIQSRVTKSGAYSMKKVSFEENKTFNKSNVERFINFHKNKL

SEQ ID NO: 197216 - protein, 241 aa, Unknown
  Bacterial polypetide isolated from the Sargasso Sea
GLDLREVGDNNRVYSIDRNLWGLAMKGEDLEDTWVEPPEDAFSWTSNAEDAPDTPEVIEIGFDKGIPISLNGEKTDGVTLIEKLNITAGKHGIGRVDHLENRLVGIKSREVYETPAAIILYNAISALETATLSREQQRIKSNLSKIYSDLVYDGRWFTLLRENIESFMNSAQKFSSGEVKLKLYKGNVTVIGRKSKYSLYDYDMSTYSTTDSFNHQSAEGFIDIYSLPSRIQAKKQKFNDL

SEQ ID NO: 197217 - protein, 146 aa, Unknown
  Bacterial polypetide isolated from the Sargasso Sea
DIVENRFVGMKSRGCYETPGGTILLKAHRAMESLTLDREVGHLKDELMPRYAKMIYNGYWWSPERKVLQALIDESQKNVTGTVNLKLYKGQVQIVGRSSEKDSLYDAEVVTFEDDRGAYDQKDSEGFIRLNGLRLRIGANKGRDYS

SEQ ID NO: 197218 - protein, 282 aa, Unknown
  Bacterial polypetide isolated from the Sargasso Sea
MQQVKKIVLAYSGGVDTSVCIPYLKNEYGISEVVTFVADLGQGEDLELIRQKALNSGASKSIVGNLVNSFVERYAFPAIRANALYLDKYPLSTALARPLIAENLVNIAREINADAVAHGCTGKGNDQVRFDLAINALGPDLKIITPAREWNMSREEAIVYGEKFGIPAPVSKKSPYSIDVNLLGRSIEAGILEDPMQEAPEDIFSMTSSIDNSPDSYQDIEIVFKNGFPVGINDEFLTPVEIIQKTNDLAGNHGFGRIDMIEDRVVGIKSREIYETPGLLLL

SEQ ID NO: 197219 - protein, 335 aa, Unknown
  Bacterial polypetide isolated from the Sargasso Sea
MKKEKLVLAYSGGLDTSVILHWLNNQGYEVIALCLNLGQKVEDLDKILEKGEKAGATKVIVENVEDEFVEDYVLKAINWNALYEGTYLLGTSLARPLIAKKQIEIAEKEGASLVSHGATGKGNDQVRFELSYYALKPDIRVIAPWKITEFYQKYPGRTELLKYAKKFGIPVKATKESPWSSDENLMHISFESGMLEDPWQAPLQEMFELSNSPQQAPSDPQEILIEFKNGNPTAIDGKNNSPAKLLRQLNEVGGKHGIGRVDMVESRFVGMKNRGVYETPGGTILHIAHRAIESITLNRGVINLKDSLMPRFAQLTYDGFWFSPEMEILLEYGEK

SEQ ID NO: 197220 - protein, 241 aa, Unknown
  Bacterial polypetide isolated from the Sargasso Sea
LVEYADKHGIEISKDKRGEQPFSIDENILHSSAEGKVLEDPWVEAPDYVYTRTVSPEDAPDDAEEITIEFKKGDACALNGKALTPFVILKSLNKLGGKHGIGRVDLVENRYIGMKSRGIYETPGGTILYHAHRAIESITLDKEAAHMKDELAPKYAELVYNGYWFSPEREMMQSMIDKSQEKVEGKVRLKLYKGNAMITGRESSLSLYNPNLATFESDQVYSQKDAEGFIKLNALRLREKK

SEQ ID NO: 197221 - protein, 202 aa, Unknown
  Bacterial polypetide isolated from the Sargasso Sea
DPWVEAPDYVYTRSVSPEEAPDNAEEITIEFKKGDACGLNGKALTPFEILKSLNELGGKHGIGRVDLVENRYIGMKSRGIYETPGGTILYHAHRAIESITLDKEAAHMKDELAPKYAELIYNGYWFSPEREMMQSMIDKSQEKVEGKVRLKLFKGNTMITGRESSLSLYNPNLATFETDNIYSQKDAEGFIKLNALRLREKK

SEQ ID NO: 197222 - protein, 93 aa, Unknown
  Bacterial polypetide isolated from the Sargasso Sea
MSKPKKVVLAYSGGLDTSIILKWLQSEYACEVVTFTADLGQGEELEPARKKAELLGIEPKNIFIEDVREEFVQDFVFPMFRANAVYEGPISFR

SEQ ID NO: 197223 - protein, 371 aa, Unknown
  Bacterial polypetide isolated from the Sargasso Sea
NYKAEVIAYTSDIGQVLDKKKIIKNAKRLGVKKIIIENLKNIFVKDYIFPMIRAHAVYEGVYLLGTSIARPLIAKRQVEIAKKFKAFAVSHGATGKGNDQVRFELGYSYFGKNKIKTIAPWREWELQSRADLIKYAKKNSIPIPKDKKGAPPFSVDDNIFHTSTEGKVLEDPKNSAPEFIYQRTVSPQKAPNKPTKVKITFKNSDPIAVNGKKLSPEKLLSKLNILAGKNGIGRVDLVENRFIGIKSRGVYETPGGTVLYTAHRAIESVTLDKETAHKKERIMPEYAELVYNGYWFSKKRLKLQKLIDKKRNKVSGDIVLSLCKGNVTILSRRTKNKAYSMKKVSFEENKSFNKRKVENFIKFHSKQLNKA

SEQ ID NO: 197224 - protein, 392 aa, Unknown
  Bacterial polypetide isolated from the Sargasso Sea
SGGLDTTVILHWLKETYNAEVITFTADIGQDHNPDLVKKRANEIGASKVILEDLKEEFVKEYVFPMFRANTLYEGEYLLGTSIARPLISKRMIEIAEEEGADAIAHGATGKGNDQIRFEIGAYSLNPSIAVIAPWRTWDFVSRADLIDYCKKNQINIDADPDEPMYSTDENILHTSYEGEILEDPSIPAPESIWQRTSSLKEAQDSEEEITINFKNGDPVGLDGKDLDSSQLLETLNIIAGKHGIGRLDLVENRFTGMKSRGCYETPGGTLLLKAHRAIESLALDAQTGHLKDELMPKYAQLIYDGFWWSPEREALQAFIDKTQELVTGSVKLGLYKGNIIIKERTSPNSLYDPKIVTFEDDENTYNQSDATGFIKINSLRLKANAKRKKED

SEQ ID NO: 197225 - protein, 150 aa, Unknown
  Bacterial polypetide isolated from the Sargasso Sea
MVDDRTDIKKVVLAYSGGLDTSVILRWLQDTYDCEVVTFTADLGQGEELEPARQKAELMGVKEIYVEDLREEFVRDFVFPMFRANATYEGVYLLGTSIARPLIAKRQIEIANKTGADAVSHGATGKGNDQVRFELGYYGLNPDIKVIAPW

SEQ ID NO: 197226 - protein, 402 aa, Unknown
  Bacterial polypetide isolated from the Sargasso Sea
MGKKENINKVVLAYSGGLDTSVILKWLEEAYDCEVVTFSADLGQGAELDEAKKKAEDLGVKEIFVEDLKNEFVKDYVFPMFRANTLYEGSYLLGTAIARPLIAKKQIEIAKEVGADAVCHGATGKGNDQIRFELAYYGLNPDIKVIAPWREWDLNSRKKLIEFAEKNQIVITKDNLGEDPYSVDANLLHTSSEGKLLEDPSKECPEDVYQRTVSPEDAPDKATYIEVEFEQGDPISINGKKLSPEKLLTELNELGGKNGIGRLDMVENRSIGMKSRGIYETPGGTILLSAHRGIEQITLDREACHLKDEIMPRYAKLIYNGFWFSPERKMLQALIDESQKNVTGMVRLKLYKGNATVVGRSSDLSLYSEEHVTFEEDDVYDQYDAEGFIKLNALRLKLLKKD

SEQ ID NO: 197227 - protein, 217 aa, Unknown
  Bacterial polypetide isolated from the Sargasso Sea
MPKKIVLAYSGGLDTSVILKWLQNKYECPVVTFTADIGQGEELSSVESKAKSLGVKEFFIENLQEVFVKDYVFPMFRANAIYEGNYLLGTAIARPLIAKRQIEIAKLVGADAVAHGATGKGNDQVRFELGYIANDPKIKIIAPWRDWEFNSRKDLVDFAEKNQIPVSKDKLGEPPFSTDANLLHTSSEGKILEDPWLAPPEHVYSRTTNLDKTPNEP

SEQ ID NO: 197228 - protein, 198 aa, Unknown
  Bacterial polypetide isolated from the Sargasso Sea
MDKINKVVLAYSGGLDTSVILRWLKETYSCEVVTFTANLGQDEDYDLVNKKATQQGVKEIFIEDLKEEFVRDYVFPMFRANPLYEGYYLLGTSIARPLIARKQIEIANKVGADTVSHGATGKGNDQIRFELGYYYHKPDIKIISPWREWDLTSRTSLVEYADQHGIEIAKDKRGEQPFSIDENILHSSAEGKVLEDPW

SEQ ID NO: 197229 - protein, 344 aa, Unknown
  Bacterial polypetide isolated from the Sargasso Sea
MKKQKRIVLAYSGGLDTSIILKWLQENYDAEVIAYTADVGQEMDRKKIIKNAKKLGVKKIVIKDLKNIFVKDYVYPMIRGHALYEGVYLLGTSIARPLIAKDQIRVAKKFKAYAVSHGSTGKGNDQVRFELGYHYFGPKIKIIAPWRIWKLKSRTDLINYAKKHGIPIPKDKKGAPPFSVDDNLFHTSTEGKVLENPKNSAPEFIFQRTISPEKAPNKPSFITINYKNGDPIGLNGKKLSPAKVLDKLNQLAGKNGIGRVDLVENRFIGIKSRGVYETPGGTLLLVAHRAIESVTLDKDTMHKKDEVMPRYAELVYNGYWYSKERFKLQKIVDLKRNKVNGSVK

SEQ ID NO: 197230 - protein, 395 aa, Unknown
  Bacterial polypetide isolated from the Sargasso Sea
MKSKKRIVLAYSGGLDTSIILKWLQENYKAEVICYTADIGQEIDKKKIISNAKKLGVKNIIIKDLKNIFIKDYVFPMLRGHAVYEGVYLLGTSIARPLIAKDQIKVAKKYKAYAVSHGSTGKGNDQVRFELGYHYFGPKIKIIAPWRIWKLKSRTDLINYAKKNKISIPKDKKGAPPFSVDDNLFHTSTEGKVLENPKNSAPELIFQRTVSPEKAPNKPTFVSINFRNGDPMGVNGKKLTPAKLLEKLNQLAGKNGVGRVDLVENRFLGIKSRGVYETPGGTLLIYAHRAIESVTLDKETMHKKENIMARYAELIYNGYWYSKERFKLQKIVDLKKNKVNGTVKLKLYKGNVTIISRQTKSSAYSLKKVSFEENKTFNKSNVEKFINFHKKKLRS

SEQ ID NO: 197231 - protein, 248 aa, Unknown
  Bacterial polypetide isolated from the Sargasso Sea
MTSKKKIVLAYSGGLDTSIILKWLQENYDADVICYTADVGQEIDRKKIITNAKKFGVKNIIIKDLKDIFVKDYVYPMIRGHAIYEGVYLLGTSIARPLIAKDQIRVAKKFKAYAVSHGATGKGNDQVRFELGYHYFGPKIKIIAPWRIWKLKSRTDLINYAKKHGIVIPKDNKGAPPFSVDDNLFHTSTEGKVLENPKNSAPEFIFQRTVSPEKAPNKPSFVTINFKNGDPFGINGKKLSPAKLLTKL

SEQ ID NO: 197232 - protein, 320 aa, Unknown
  Bacterial polypetide isolated from the Sargasso Sea
SMIRGHAIYEGVYLLGTSIARPLIAKDQIRVAKKFKAYAVSHGATGKGNDQVRFELSYHYFGPKIKIIAPWRIWKLKSRTDLINYAKKHGIVIPKDKKGAPPFSVDDNLFHTSTEGKILENPKNSAPEFIFQRTVSPEKAPNKPSFVTINFKNGDPVGINGKKMSPAKLLIKLNYLAGKNGIGRVDLVENRFLGIKSRGVYETPGGTLLINAHRAVESVTLDKETMHKKDRIMSRYSELIYNGYWYSKERFKLQKIVDLKRSKVNGSVKLKLYKGNITIQSRVTSSSAYSMKKVSFEENRSFDKSNVEKFIKFHKKKLRS

SEQ ID NO: 197233 - protein, 395 aa, Unknown
  Bacterial polypetide isolated from the Sargasso Sea
MKPKKKIVLAYSGGLDTSIILKWLQENYDADVICYTADVGQEIDRKKIITNAKKFGVKNIIIKDLKNIFVKNYVYPMIRGHAIYEGVYLLGTSIARPLIAKDQIRVAKKFKAYAVSHGATGKGNDQVRFELGYHYFGPKIKIIAPWRIWKLKSRTDLINYAKKHGIAIPKDKKGAPPFSVDDNLFHTSTEGKVLENPKNSAPEFIFQRTVSPEKAPNKPSFVTINFKNGDPFGINGKKLSPAKLLTKLNDLAGKNGIGRVDLVENRFLGIKSRGVYETPGGTLLINAHRAIESVTLDKETMHKKDQIMSRYAELIYNGYWYSKERFKLQKIVDLKRSKVNGSVKLKLYKGNITIQSRVTNSSAYSMKKVSFEENKSFNKSNVERFINFHKKKLRS

SEQ ID NO: 197234 - protein, 394 aa, Unknown
  Bacterial polypetide isolated from the Sargasso Sea
MKAKKKIVLAYSGGLDTSIILKWLQENYNAEVICYTADIGQEIDRKKIFKNAKKFGVKKIIIQNLKDTFVKDYVYPMIRGHAIYEGVYLLGTSIARPLIAKDQIRVAKKFKAYAVSHGSTGKGNDQVRFELGYHYFGPKIKIIAPWRIWKLKSRTDLINYAKKHGIPIPKDKKGSSPFSVDDNLFHTSTEGKVLENPKNSAPEFIFQRTASPEKAPNRPIFVTINFKNSDPIGINGRRLSPSKLLEKLNLLAGKNGIGRVDLVENRFIGIKSRGVYETPGGTLLLNAHRAIESVTLDKETMHKKDSIMSRYAELIYNGYWYSKERFKLQKIIDFKRGKVNGSVKLKLYKGNITIQSRITKSNAYSMKKVSFEENKTFNKSNVERFINFHKKKLR

SEQ ID NO: 197235 - protein, 404 aa, Unknown
  Bacterial polypetide isolated from the Sargasso Sea
MQQVKKVVLAYSGGVDTSVCIPYLKNEYGISEVVTFVADLGQGEDLELIRQKALNSGASQSIVGNLVNSFVEKYAFPAIRANALYLDKYPLSTALARPLIAENLVNIAREINADAVAHGCTGKGNDQVRFDLAINALGPDLKIITPAREWNMSREEAIVYGEKFGIPAPVSKKSPYSIDVNLLGRSIEAGILEDPMQEAPEDIFAMTSSIDNSPDSPQDIEIVFKNGFPVGINDEFLTPVEIIQKANDLSGAHGFGRIDMIEDRVVGIKSREIYETPGLLLLIKAHKELESITLNPDVVDFKGIVEKKWGQLVYQGFWFGPLKESLDAFISSTQTSVNGRVKIRLHKGNAIVIGRMSENNSLYREDLATYSKEDVFNHSLAEGFIYMWGMSNKIWAELNSKTKD

SEQ ID NO: 197236 - protein, 348 aa, Unknown
  Bacterial polypetide isolated from the Sargasso Sea
MQQVKKVVLAYSGGVDTSVCIPYLKNEYGISDVVAFVADLGQGEDLEAIRQKALNSGASKSIIGNLVNSFVERYAFPAIRANALYLDKYPLSTALARPLIAENLVNIAREINADAVAHGCTGKGNDQVRFDLAINALGPDLKIITPAREWNMSREEAILYGEQFGIPAPVSKKSPYSIDVNLLGRSIEAGILENPMQEAPEDIFAMTSSIVDTPDSPQDVEILFKNGFPVGLNNEFLTPVEVIKNCNDLAGKHGFGRIDMIEDRVVGIKSREIYETPGLLLLIKAHKELESITLNPDVIDFKGIVEKKWGQLVYQGFWFGPLKDSLDAFISSTQTSVNGRVKIRLHKG

SEQ ID NO: 197237 - protein, 397 aa, Unknown
  Bacterial polypetide isolated from the Sargasso Sea
MDKVNKVVLAYSGGLDTSVILRWLKETYSCEVVTFTANLGQDEDYDLVEKKATQQGVKEIFIEDLKEEFVRDYVFPMFRANPLYEGYYLLGTSIARPLIAQKQIEIANKVGADAVSHGATGKGNDQIRFELGYYYHKPDIKIISPWREWDLTSRTSLVEYADQHGIEIAKDKRGEQPFSIDENVLHSSAEGKVLEDPREEAPDYVYTRSVSPENAPDTPEEITIEFKQGDACALNGQSMTPFELLKALNEMGGKHGIGRVDLVENRYVGMKSRGIYETPGGTILYHAHRAIESITLDKEAAHMKDELSPKYAELVYNGYWFSPEREMMQSMIDKSQAKVEGKVRLKLYKGNTMITGRESSMSLYNPNLATFESDNIYSQKDAEGFIKLSALRLREKK

SEQ ID NO: 197238 - protein, 133 aa, Unknown
  Bacterial polypetide isolated from the Sargasso Sea
MKNKIVLAYSGGLDTSVILKWLQTEYNADVIAYAADLGQGEELTEAKAKAKKLGAKKIYIENLKEEFVRDYVFPMFRCNTIYEGEYLLGTSIARPLIAKRQIEIAKKEKANAVSHGATGKGNDQVRFEFSYYA

SEQ ID NO: 197239 - protein, 394 aa, Unknown
  Bacterial polypetide isolated from the Sargasso Sea
MKKNKKIVLAYSGGLDTSIILKWLQENYDSEVIAYTADIGQEMDQKKIIKNARKLGVKKIIINNLKNTFVKEYVFPMIRGHAIYEGVYLLGTSIARPLIAKDQIKVAKKFKAFAVSHGSTGKGNDQVRFELGYHYFGPKIKVIAPWRIWKLKSRTDLINYAKKNNIPIPKDKKGAPPFSVDDNLFHTSTEGKVLENPKNSAPEFVFQRTTSPEKAPNKPTYVSIGFKNSDPVSINGKKLNPEKLLKKLNQIGGKNGVGRVDLVENRFIGIKSRGVYETPGGTLLLIAHRAIESVTLDKDTMHKKDSIMPRYAELIYNGYWYSKERFKLQKIVDLKKSKVNGSVKLKLYKGNVAIQSRITKSSAYSMKKVSFEENKTFNKSNVERFINFHKKKLK

SEQ ID NO: 197240 - protein, 395 aa, Unknown
  Bacterial polypetide isolated from the Sargasso Sea
MKSKKRIVLAYSGGLDTSIILKWLQENYDAEVICYTADIGQEINRKKIFYNARKFGVTKIIINDLKDVFVKDYVFPMIRGHAIYEGVYLLGTSIARPLIAKDQIKVAKKFKAYAVSHGATGKGNDQIRFELGYHYFGPKIKIIAPWRIWNLKSRSDLINYAKKHNIPIPKDKKGASPFSVDDNLFHTSTEGKLLENPKNSAPEFIFQRTISPEKAPNKATHVTINFKNGDPIGFNGKKFGPAKLLLKLNQLAGKNGIGRVDLVENRFLGIKSRGVYETPGGTLLIHAHRAIESVTLDKETMHKKDAIMSRYAELIYNGYWFSKERFKLQKIVDLKKNKINGSVKLKLYKGNVTIQSRMTKSNAYSMKKVSFEENKSFIKSNVEKFINFHKKKLRN

SEQ ID NO: 197241 - protein, 304 aa, Unknown
  Bacterial polypetide isolated from the Sargasso Sea
MKKKIVLAYSGGLDTSIILKWLQENYNAEVIAYTADIGQNLDRKKIANNAKKLGVKKVIIKDLKNTFVKNYVYPMIRGHALYEGSYLLGTSIARPLIAKDQIRVAKKFNAYAVSHGSTGKGNDQVRFELAYHYFGPKIKIIAPWRVWKLKSRTDLINYARKHNILIPKDKKGQSPFSVDDNLFHTSTEGKVLENPINSAPDFIFQRTTSPEKAPRKPSFVTINFKNSNPIGLNGKKLSPAKLLEKLNQLAGKNGIGRVDLVENRFIGIKSRGIYETPGGSLLLVAHRAIESVTLDKETMHKKDK

SEQ ID NO: 197242 - protein, 407 aa, Unknown
  Bacterial polypetide isolated from the Sargasso Sea
MSIENKNTGVKKVVLAYSGGLDTSAIIPWLKETYDNCEIIAFCADVGQGEEELVGLTEKALASGASECHIVDLKEEFVKDYIYPTMATGAIYEGTYLLGTSMARPIIAKAQVEVARKVGADALCHGCTGKGNDQVRFEGCFAALAPDLKVIAPWREWTMQSREDLLAYLAERNIKTSASATKIYSRDANAFHISHEGGELEDPWNEPSKGVWTLTADPEDAPNEAEYVSLEVENGRVTKVNGEALTPYAALMKLNTIAAPHGVGRIDITENRLVGMKSRGCYETPGGTVMFAALRAIEELVLDKTSRTWREQVGAQMAHLVYDGRWFTPLCKSLLAASESLAESVNGEVVVKLYKGHAIAVKKRSPNSLYSEAFATFGEDQVYDQKHAEGFIRLYSLASRIRALNAK

SEQ ID NO: 197243 - protein, 403 aa, Unknown
  Bacterial polypetide isolated from the Sargasso Sea
MNAKKINKIILAYSGGLDTTVILHWLKETYNAEVITFTADIGQDHDSELVKERANAIGASKVIVEDLKEEFVSNYVFPMFRANTVYEGEYLLGTSIARPLISKRMIEIAEEEGADTISHGATGKGNDQIRFELGSYALNPSINVVAPWRTWNFVSRSDLVNYCKKNQIKIDASPDEPLYSTDENILHTSYEGEILEDPSKPAPESIWKRTTALKDAPDEEKEITIDFKQGDPISINGKDLNAAEILNTLNDVAGRNGIGRLDLVENRFTGMKSRGCYETPGGTILLKAHRAIESLTLDAQMSHLKDELMPKYAQLIYDGFWWSPEREALQQFINKTQEFVNGSVKLSLYKGNITIKERSSPNSLYDSKIVTFEDDDNAFNQADASGFIKINSLRLKANAKRKK

SEQ ID NO: 197244 - protein, 169 aa, Unknown
  Bacterial polypetide isolated from the Sargasso Sea
MPKKIVLAYSGGLDTSVILKWLQVKYQCPVVTFTADLGQGEELSPVKGKAQSLGVEEIFIEDLREEFVRDYVYPIFRANAIYEGTYFLGTAIARPLIAKRQIEIANIVGADAVAHGATGKGNDQVRFELGYYANKHDIKVISPWREWELNSRNDLINFAEKYQIPIAKD

SEQ ID NO: 197245 - protein, 190 aa, Unknown
  Bacterial polypetide isolated from the Sargasso Sea
MRIKKRIVLAFSGGLDTSIILKWLQENYNAEVIAYTADIGQKIDKKKIIKNAKKLGVKKVVINNLKDTFVKEYIFPMIRGHAIYEGAYLLGTSIARPLIAKDQIKVAKKFKAYAVSHGSTGKGNDQVRFELGYYFFNPKIKVIAPWRIWKLKSRKDLINYAKKYKIPIPRDKKGAPPFFIDDNLFHTSTE

SEQ ID NO: 197246 - protein, 359 aa, Unknown
  Bacterial polypetide isolated from the Sargasso Sea
MKFNKVILAYSGGLDTSVIAKWLMEKYKCEVITFTADIGQGSETRDARAKAKKLGIKKIYIEDLKEVFVKDYVYPMFRSNAIYEGEYLLGTSIARPLISKRLIEIAKKEKADAICHGATGKGNDQVRFELSAYALNPKIKIIAPWREWAFKSRKDLVRYARLHKIAIDFDSGKKSPYSMDANILHTSYEGGILEDPWKSPDESMWLRTASIEKSSNKPDIIELEFKNGDVKKINKKMHSPAKALAYLNRLAGKHGIGRIDIVENRYVGMKSRGCYETPGGTIYHKAHKAIESITMDRELLHLKEDLTNRYTKLIYNGYWFSPERESLQSLIDQSQKKVSGVVKLKLYKGNIIVMGRKSP

SEQ ID NO: 197247 - protein, 315 aa, Unknown
  Bacterial polypetide isolated from the Sargasso Sea
NALYEGMYFLGTAIARPLIAKRQVEIAKEVGADSVAHGATGKGNDQVRFELGYYANSPKIKVISPWREWELESRNDLINFAEKYQIKIPKDKRGEAPFSIDANLLHTSSEGKILEDPWVDAPEYLYSRTKSIEDANSKPDEIIISFEKGDPVSINQQKLKSHELLSKLNEYGFNHGIGREDIVENRFVGMKSRGVYETPGGTILAKAHRAIESITLDKGEAHLKDEIMPKYAETIYNGLWFSSERLSMQSLIDSTQEKVTGEVRLQLFKGNVIIKGRRSPYSKYNSSLVSFDEVGDYNQRDAEGFIKINSLRLKN

SEQ ID NO: 197248 - protein, 395 aa, Unknown
  Bacterial polypetide isolated from the Sargasso Sea
MKSKSKIVLAYSGGLDTSIILKWLQENYDADVICYTADVGQEIDRKKIINNAKKFGVKNIIIQDLKDTFVKDYVYPMIRGHAIYEGVYLLGTSIARPLIAKDQIRVAKKYKAYAVSHGATGKGNDQVRFELGYHYFGPKIKIIAPWRIWKLKSRTDLINYAKKHGIAIPKDKKGAPPFSVDDNLFHTSTEGKVLENPKNSAPEFIFQRTVSPEKAPNKPSFVTINFKNGDPIGINGKKMSPAKLLIKLNYLAGKNGIGRVDLVENRFLGIKSRGVYETPGGTLLINAHRAIESVTLDKETMHKKDQVMSRYAELIYNGYWYSKERFKLQKIVDLKRSKVNGSVKLKLYKGNITIQSRVTNSSAYSMKKVSFEENKSFNKSNVERFINFHKKKLRS

SEQ ID NO: 197249 - protein, 212 aa, Unknown
  Bacterial polypetide isolated from the Sargasso Sea
MELNKNINKVVLAYSGGLDTSVILKWLQENYNSEVVTFTADIGQGQEIEPVRNKAESLGVKKIFIEDLKEEFVEKYVFPMFRANALYEGVYLLGTSIARPLIAKRQIEIAKEVGAQAVSHGATGKGNDQVRFELGYYSLNPKIKVIAPWREWNLNSRKKLIEYAQKNQITIQKDRKGDDPFSVDANLLHISAEGKILEDPWIEPNELVFSRT

SEQ ID NO: 197250 - protein, 124 aa, Unknown
  Bacterial polypetide isolated from the Sargasso Sea
MSNAVKKTGVKKVVLAYSGGLDTSAIIPWLKETYDNCEIVAFCADVGQGEEELVGLTEKALASGASECHIVDLKEEFVADYIYPTIATGAIYEGTYLLGTSMARPIIAKAQVEVARKVGADAVC

SEQ ID NO: 197251 - protein, 284 aa, Unknown
  Bacterial polypetide isolated from the Sargasso Sea
MKKQKKIVLAYSGGLDTSIILKWLQENYDAEVIAYTADVGQEMDRKKIIKNAKKLGVKKIIIQDLKNIFVKDYVYPMIRGHALYEGVYLLGTSIARPLIAKDQIRVAKKFNAYAVSHGSTGKGNDQVRFELGYHYFGPKIKIIAPWRIWKLKSRTDLINYAKKYGIPIPKDKKGAPPFSVDDNLFHTSTEGKVLENPKNSAPEFIFQRTTSPEKAPKKPSFIIINYKNGDPVGLNGKKLSPAKVLDKLNQLAGKNGIGRVDLVENKFIGIKSRGVYETPGGTLL

SEQ ID NO: 197252 - protein, 445 aa, Unknown
  Bacterial polypetide isolated from the Sargasso Sea
MATILQNLPLGQKVGIAFSGGLDTSAALRWMKNKGALPYAYTANLGQPDEPDYDAIPRKAMEYGAEKARLIDCRTQLAHEGIAALQAGAFHVRTAGATYFNTTPLGRAVTGTMLVAAMKEDDVNIWGDGSTFKGNDIERFYRYGLLTNPSLKIYKPWLDQLFIDELGGRAEMSAFMTKEGFGYKMSAEKAYSTDSNMLGATHEAKDLEFLNSGIRIVNPIMGVAFWKDDVVVKAEEVSVRFEEGQPVALNGVEFNDPVELFLEANRIGGSHGLGMCDQIENRIIEAKSRGIYEAPGLALLHIAYERLVSGIHNEDTIEQYRVNGLKLGRLLYQGRWFDPQAIMLRETAQRWVARAVTGTVTLELRRGNDYSILNTESPNLTYAPERLSMEKVEDAPFSPLDRIGQLTMRNLDIVDTRDKLGVYSRAGLLSLGGNAALAQLENDRK

SEQ ID NO: 197253 - protein, 394 aa, Unknown
  Bacterial polypetide isolated from the Sargasso Sea
MKKIVLAYSGGLDTSIILRWLQENYNAEVIAYTSDIGQVLDKKKIIKNAKRLGVKKIIIENLKNIFVKDYVFPMIRAHAVYEGVYLLGTSIARPLIAKRQVEIAKKFKAFAVSHGATGKGNDQVRFELGYSYFGKNKIKTIAPWREWKLQSRADLIRYAKKNNIPIPKDKRGAPPFSVDDNIFHTSTEGKVLEDPKNSAPEFIYQRTVSPQKAPNKPTKVKITFKNSDPIAVNGKKLSPEKLLSKLNILAGKNGIGRVDLVENRFIGIKSRGVYETPGGTLLYTAHRAIESVTLDKETAHKKERIMPEYAELVYNGYWFSKKRLKLQKLIDKKRNKVSGDIVLSLYKGNVTILSRRTKNKAYSMKKVSFEENKTFNKRKVENFIKFHSKQLNKA

SEQ ID NO: 197254 - protein, 358 aa, Unknown
  Bacterial polypetide isolated from the Sargasso Sea
MEPIRQKALDAGASQSLVGDLIQPFIEEFAFPAIRANALYEGRYPLSTALARPLIARRLVEVAREVGADAVAHGCTGKGNDQVRFDVAIAALAPDLKVLTPAREWGMSREETIAYGERCGIPAPVSKKSPYSIDLNLLGRSIEAGPLEDPMVAPPEEVFAMTSPVSETPDAAEEIEIAFEAGNPVAINGQSLDPVAMIREANRLAGSHGIGRLDMIENRVVGIKSREIYETPGLLLLIQAHQELESLTLAADVLRSKRQLEMQWADLVYQGLWFGPLKDALDGFMDRTQQHVNGVVRLRLHKGSATVIGRGSTQSSLYVPEMASYGSEDKFDHRAAEGFIYVWGLPTRLWAASQRTSG

SEQ ID NO: 197255 - protein, 337 aa, Unknown
  Bacterial polypetide isolated from the Sargasso Sea
MQQVKKVVLAYSGGVDTSVCIPYLKNEYGISEVVTFVADLGQGEDLELIRQKALNSGASKSIVGNLVNSFVERYAFPAIRANALYLDKYPLSTALARPLIAENLVNIARESNADAVAHGCTGKGNDQVRFDLAINALGPDLKIITPAREWNMSREEAIVYGEKFGIPAPVSKKSPYSIDVNLLGRSIEAGILEDPMQEAPEDIFSMTSSIDNSPDSYQDIEIVFKNGFPVGINDEFLNPVEIIQKTNHLAGNHGFGRIDMIEDRVVGIKSREIYETPGLLLLIKAHKELESITLSPDVVDFKGIVEKKWCQLVYQGFWFGPLKESLDAFISSTQTSV

SEQ ID NO: 197256 - protein, 396 aa, Unknown
  Bacterial polypetide isolated from the Sargasso Sea
MKSNKRIVLAYSGGLDTSIILKWLQENYNAEVICYTADIGQEINRKKIINNAKKFGVKKIIIKDLKNLFVKDYVFPMIRGNAIYEGVYLLGTSIARPLIAKDQIRIAKKFKAYAVSHGATGKGNDQVRFELGYHYFGPKIKVIAPWRIWKLKSRSDLINYAKKHKIPIPKDKKGAPPFSVDDNLFHTSTEGKILENPKNSAPEFIFQRTTSPEKAPNKPTFISINFKNGDPVGINGKKLNPENILTKLNFIAGKNGIGRVDLVENRFLGIKSRGVYETPGGTLLIHAHRAIESVTLDKETMHKKDSIMPRYAELIYNGYWYSKERFKLQKIIDQKRNKVNGSVKLKLYKGNITIQSRITKSNAYSMKKVSFEENKTFNKSNVERFINYHKKKLRYL

SEQ ID NO: 197257 - protein, 370 aa, Unknown
  Bacterial polypetide isolated from the Sargasso Sea
MSDIKKVVLAYSGGLDTSVILKWLQDNYDAEVVTFTADIGQGEELEPARKKALQLGIKPDNIFIEDLREEFVRDYVFPMFRANTIYEGEYLLGTSIARPLIAKRQIEIARATGAQAVSHGATGKGNDQVRFELGYYALEPGIKVIAPWREWDLLSREKLLAYAEKAGIPIEMKHKQGGAPYSMDANLLHISFEGRHLEDPKAEAEADMWRWTVSPEQAPDQAEYLDIEYEHGDPVAINGKRLSPAEMLTELNRLGGKHGIGRLDLVENRYVGMKSRGCYETPGGTIMLKAHRGIESITLDREVAHLKDDLMARYASLIYNGYWWSPERRAIQVLIDHTQEKVNGWVRVKLYKGSVSVVARDSKETLFDKT

SEQ ID NO: 197258 - protein, 109 aa, Unknown
  Bacterial polypetide isolated from the Sargasso Sea
RAIESITLDRGEAHLKDEIMPKYAEIIYNGLWFSSERYAIQKLIDSTQKKVSGDVKIKIFKGNVIVLGRKSQNSLYNNSLVSFDEKGDYDQKDAEGFIKINSIRLKNLK

SEQ ID NO: 197259 - protein, 221 aa, Unknown
  Bacterial polypetide isolated from the Sargasso Sea
MKNKIVLAYSGGLDTSVILKWLQTEYNADVIAYAADLGQGAELTEAKIKAKKLGAKKIYIENLKEEFVRDYVFPMFRCNTIYEGEYLLGTSIARPLIAKRQIEIAKKEKAYAVSHGATGKGNDQVRFEFSYYALEPKIQVIAPWREWDLLSRTKLLKFAAKNKIPIMKHNKKESPYSVDANILHRSAEGKILEDPWKRPPENVFGISKSPQLAPNKETVIT

SEQ ID NO: 197260 - protein, 416 aa, Unknown
  Bacterial polypetide isolated from the Sargasso Sea
MKKEKVVLAYSGGLDTSIILKWLVNKRFEVICFIGDVGQSDDFDLVKEKAIKLGASKVHIKDLQEEFIVDYIFPALQGNALYEGRYLLGTSLARPVLAKAQIDLANEEGATIVSHGSTGKGNDQVRFELSYYALAPDIKVLAPWKNNEFLNQFKGRDDLLDYAKKWSIPVTASKNSPYSEDENIMHISHEAGELENPDTRPEESVFSLTNSIANSDENESLIEIHFKNGMPTKVKNMDDGKNISGALNLFRYLNELGNRHGIGRVDMVENRFIGIKSRGIYETPGATILWEAHRDLEGIAMDKEVMHIRDMLIPKFSELIYNGFWFSPEMDFLLTAINKSQEAVDGKVKLALIKGNVITIGRESPSSLYDKDLSSMNVEGGFDATDSTGFININAIRLKAHNLIMKKINPYKWRKD

SEQ ID NO: 197261 - protein, 394 aa, Unknown
  Bacterial polypetide isolated from the Sargasso Sea
MKKQKKIVLAYSGGLDTSIILKWLQENYDAEVIAYTADVGQEMDRKKIIKNAKKLGVKKIIIQDLKNIFVKDYVYPMIRGHALYEGVYLLGTSIARPLIAKDQIRVAKKFNAYAVSHGSTGKGNDQVRFELGYHYFGPKIKIIAPWRIWKLKSRTDLINYAKKHGIPIPKDKKGAPPFSVDDNLFHTSTEGKVLENPKNSAPEFIFQRTTSPEKAPNKASFITINYKNGDPVGLNGKKLSPAKVLDKLNQLAGKNGIGRVDLVENRFIGIKSRGVYETPGGTLLLMAHRAMESVTLDKDTMHKKDEVMPRYAELIYNGYWYSKERFKLQKIVDLNRNKVNGSVKLKLYKGNITIQSRQTSSNAYSMKKVSFEENKTFNKSNVERFINFHKKKLR

SEQ ID NO: 197262 - protein, 404 aa, Unknown
  Bacterial polypetide isolated from the Sargasso Sea
MQHVKKVVLAYSGGVDTSVCIPYLKNEYGVSEVVTFVADLGQGEDLELIRQKALNSGASQAIVGNLVNSFVERYAFPAIRANALYLDKYPLSTALARPLIAENLVNIAREFSADAVAHGCTGKGNDQVRFDLAINALGPDLKIITPAREWNMSREEAIVYGEKFGIPAPVSKKSPYSIDVNLLGRSIEAGILEDPMKEAPEDIFAMTSSIENSPDSPQEIEIIFKNGVPVGINDESLTPVEIIKKANVLAGEHGFGRIDMIEDRVVGIKSREIYETPGLLLLIKAHKELESITLNPDVVDFKGIVEKKWGQLVYQGFWFGPLKDSLDSFISSTQTSVNGRVKIRLHKGNAIVIGRMSENNSLYREDLATYSKDDVFNHSLAEGFIYMWGMSNKIWAELNSKTKD

SEQ ID NO: 197263 - protein, 370 aa, Unknown
  Bacterial polypetide isolated from the Sargasso Sea
VITFTADIGQDHNPQEVNERANLIGANKVIIEDLKEDFVKDYVFPMFRANTLYEGEYLLGTSIARPLISKRMIEIAEEEGADAISHGATGKGNDQIRFEIGAYSLNPAIEVIAPWRTWEYGSRADLVDYCKKNQINIDADPDEPLYSTDENILHTSYEGEILEDPSLPAPESIWQRTSALRDTPDEEEEITINFENGDPVGLDGNNLNASEILGKLNSIAGDHGIGRLDLVENRFTGMKSRGCYETPGGTILLKAHRAIESLTLDANTGHLKDELMPKYAQLIYDGFWWSPEREALQALINNTQELVTGSVKLGLYKGNIIIKERKSPYSLYDSKIVTFEDDKNAYNQADATGFIKINSLRLKANAKRKK

SEQ ID NO: 197264 - protein, 395 aa, Unknown
  Bacterial polypetide isolated from the Sargasso Sea
MKSKKRIVLAYSGGLDTSIILKWLQENYKAEIICYTADIGQEIDKKKIINNARKLGVRKVIIKDLKDTFVKDYVFPMLRGHAVYEGVYLLGTSIARPLIAKDQIRIAKKYKAYAVSHGSTGKGNDQVRFELGYHFFGPKIKIIAPWRIWKLSSRTDLIKYAKKHKITIPKDKKGAPPFSVDENLFHTSTEGKVLENPKNSAPEIIYQRTVSPEKAPRKASFVTINFKNGDPFRLNGKKFSPAKLLEKLNQLAGKNGIGRVDLVENRFLGIKSRGVYETPGGTLLIKAHRAIESVTLDKETMHKKDNIMSRYAELIYNGYWYSKERFKLQKIVDLKRNKVNGSVKLKLYKGNITIISRMTSGKAYSMKKVSFEENKSFNKKNVEKFINFHKKKLRS

SEQ ID NO: 197265 - protein, 400 aa, Unknown
  Bacterial polypetide isolated from the Sargasso Sea
MKIVSVVKKIVLAYSGGLDTSVILKWLQLKYNCPVATFTADLGQGDELEPVREKAESLGVKEIFIENLQEEFVKNYVFPMFRANTLYEGTYLLGTAIARPLIAKRQIEIAKEVGADSVAHGATGKGNDQVRFELGYYANDPSIIVIAPWREWDLSSRKELVNFAQKYQIPIPKDKKGEPPFSTDANLLHTSSEGKVLEDPWLEAPEYVYNRTTSLLDAPDKPEEINIIFENGDPVAINNKKMKAHEILTSLNNIAGKHGVGRIDIVENRLVGMKSRGVYETPGGTILLHAHRAIESITLDRGEAHLKDEIMPKYAEIIYNGLWFSSERESMQKIIDKTQVNVSGEVRLKIYKGNVIVCGRKSANSLYDTSLVSFDEEGQFNQKDAEGFIKILSLRLKKRK

SEQ ID NO: 197266 - protein, 338 aa, Unknown
  Bacterial polypetide isolated from the Sargasso Sea
VKKIIINNLKNTFVKEYVFPMIRGHAVYEGVYLLGTSIARPLIAKDQIKVARKFKAFAVSHGSTGKGNDQVRFELGYHYFGPKIKVIAPWRIWKLKSRTDLINYAKKHNIPIPKDKKGAPPFSVDDNLFHTSTEGKVLENPKNSAPEFIFQRTTSPEKAPNKPSYISIGFKNSDPISINGKKLTPEKLLEKLNQIGGKNGVGRVDLVENRFIGIKSRGVYETPGGTLLLIAHRAMESVTLDKDTMHKKDSIMPRYAELIYNGYWFSKERFKLQKIVDLKKNKVNGSVKLKLYKGNVTIQSRMTKSSAYSMKKVSFEENKTFNKTNVERFINFHKKKLK

SEQ ID NO: 197267 - protein, 285 aa, Unknown
  Bacterial polypetide isolated from the Sargasso Sea
MEKGNDQVRFEIGYYSLRPDIKVISPWREWNLSSRTNLINYAEKNQIQVPKDKRGEAPFSIDANLLHISAEGKILEDPWVEPEEFIYSRTVSPLEAPDKPTEIILEFLNGDPVELNGKSLSPAKMLHQLNIFGGRNGIGRIDLVENRFVGMKSRGVYETPGGTILFHMRRAIESITLDRGAAHLKDELMPKYAELIYNGFWFSPEREMLQASIDVSQKNVSGTVRAKLYKGNVIITGRKSPFSLYSESLVTFEEGTADYNHSDAEGFIKLNALRLRVKKIIESAS

SEQ ID NO: 197268 - protein, 127 aa, Unknown
  Bacterial polypetide isolated from the Sargasso Sea
MLKGKSKIKKIVLAYSGGLDTSVILKWLQDNYQCDVVTFTADIGQGEEVQPARNKAKSLGVKEIFIDDLKEEFVKDFVFPMFRANALYEGVYLLGTSIARPLIAKRQIEIAELTGSDAVSHGATGKG

SEQ ID NO: 197269 - protein, 397 aa, Unknown
  Bacterial polypetide isolated from the Sargasso Sea
MSQKVNKVVLAYSGGLDTSVILKWLKETYQCEVATFTADLGQDEDFEAVKKKAAQQGTAEIFVEDLKEEFVKDYVFPMFRANPLYEGYYLLGTSIARPLIAKKQIEIANQINADAVSHGATGKGNDQIRFELGYYFHNPDIHIISPWREWDMNSRESLVQYADQNGIEIQKDKRGEQPFSIDENILHSSAEGKVLEDPSQEAPEYVYSRSVSPYDAPDTPEEISIDFKSGDACAINNTPMSPFEILKKLNELGGKHGIGRIDLVENRYIGMKSRGIYETPGGTIYYHAHRAIESLTLDKEAAHMKDGISPKYAELVYNGYWFSPERDMLQSMINQSQVNVEGKVNLKLYKGNVIINGRQSAKSLYNPDLATFESDNIYSQKDAEGFIKLNALRLRQK

SEQ ID NO: 197270 - protein, 264 aa, Unknown
  Bacterial polypetide isolated from the Sargasso Sea
MKKIVLAYSGGLDTSIILRWLQENYKAEVIAYTSDIGQVLDKKKIIKNAKRLGVKKIIIENLKNIFVKDYIFPMIRAHAVYEGVYLLGTSIARPLIAKRQVEIAKKFKAFAVSHGATGKGNDQVRFELGYSYFGKNKIKTIAPWREWKLQSRADLIKYAKKNSIPIPKDKKGAPPFSVDDNIFHTSTEGKVLEDPKNSAPEFIYQRTVSPQKAPNKPTKVRITFKNSDPIAVNGKKLNPEKLLSKLNILAGKNGIGRVDLVKID

SEQ ID NO: 197271 - protein, 402 aa, Unknown
  Bacterial polypetide isolated from the Sargasso Sea
MGKKENINKVVLAYSGGLDTSVILKWLQETYDCEVVTFSADLGQGAELEEAKKKAEDLGVKEIFIEDLKNEFVKDYVFPMFRANTIYEGSYLLGTAIARPLIAKKQIEIAKEVGADAVCHGATGKGNDQIRFELAYYGLNPNIKVIAPWREWDLNSRKKLIEFAEKNQIVITKDNLGEDPYSVDANLLHTSSEGKLLEDPSKECPEDVYQRTVSPEDAPDKATYIEIEFEKGDPVSIDGKKLSPEELLTKLNTLGGENGIGRLDMVENRSIGMKSRGIYETPGGTILLSAHRGIEQITLDREACHLKDEIMPRYAKLIYNGFWFSPERKMLQALIDESQENVTGMVRLKLYKGNATVVGRSSDLSLYSEEHVTFEEDDVYDQFDAEGFIKLNALRLKLLKKD

SEQ ID NO: 197272 - protein, 395 aa, Unknown
  Bacterial polypetide isolated from the Sargasso Sea
MKSKKKIVLAYSGGLDTSIILKWLQENYDAEVICYTADVGQEINRKKIISNAKKFGVTKIIIKDLKDVFVKDYVYPMIRGHAIYEGIYLLGTSIARPLIAKDQIRVAKKFKAYAVSHGATGKGNDQVRFELGYHYFGPKIKIIAPWRIWNLKSRTDLINYAKKHNIAIPKDKKGAPPFSVDDNLFHTSTEGKLLENPKNSAPEFIFQRSVSPEKAPNKASFVTINFKNGDPFAVNGKKLSPAKLLEKLNKLAGKNGIGRVDLVENRFIGIKSRGVYETPGGTLLLHAHRAIESVTLDKDTMHKKDQIMPRYAELIYNGYWFSKERFKLQKIVDLKKNKVNGSVKLKLYKGNVTINSRQTKSTAYSMKKVSFEENKTFNKSNVEKFINYHKKKLRS

SEQ ID NO: 197273 - protein, 394 aa, Unknown
  Bacterial polypetide isolated from the Sargasso Sea
MKSKKKIVLAYSGGLDTSIILKWLQENYDAEVICYTADIGQEIDRNKIFRNAKKLGVKNIIIQDLKDIFVKDYVYPMIRGHAIYEGVYLLGTSIARPLIAKDQIRIAKKFNAYAVSHGSTGKGNDQVRFELGYHYFGPKIKVIAPWRIWKLKSRSDLINYAKKNKIEIPKDKKGAPPFSVDDNIFHTSTEGKLLENPKNSAPDFIFQRTVSPEKAPNKSSIVKIDFKSGDPIAVNGKKLSPSKLLGKLNDIAGKNAVGRVDLVENRFIGIKSRGVYETPGGTLLMHAHRAIESVTLDKDTMHKKEKIMPRYAELIYNGYWFSKERFKLQRIVDLKRSKVNGSVKLRLYKGNVIIHSRITKSSAYSMKKVSFEENKTFNKSNVERFINFHKKKLK

SEQ ID NO: 197274 - protein, 378 aa, Unknown
  Bacterial polypetide isolated from the Sargasso Sea
MKKQKKIVLAYSGGLDTSIILKWLQENYDAEVIAYTADVGQEMDKKKIIKNAKKLGVKKIIIQDLKNIFVKDYVYPMIRGHALYEGVYLLGTSIARPLIAKDQIRVAKKFKAYAVSHGSTGKGNDQVRFELGYHYFGPKIKIIAPWRIWKLKSRTDLINYAKKHGIPIPKDKKGAPPFSVDDNLFHTSTEGKVLENPKNSAPEFIFQRTTSPEKAPNKASFITINYKNGDPVSLNGKKLSPAKVLNKLNQLAGKNGIGRVDSVENRFIGIKSRGVYETPGGTLLIVAHRAIESVTLDKDTMHKKDEVMPRYAELIYNGYWYSKERFKLQKIVDLKRNKVNGSVKLKLYKGNITIQSRQTSSNAYSMKKVSFEENKTFN

SEQ ID NO: 197275 - protein, 395 aa, Unknown
  Bacterial polypetide isolated from the Sargasso Sea
MPKKIVLAYSGGLDTSVILKWLQNKYKCPVVTFTADIGQGEELSPVETKAKSLGVEEIFIENLQEEFVKDYVFPMFRSNALYEGAYLLGTAIARPLIAKRQIEIAKIVGADAVAHGATGKGNDQVRFELGYYANNPKIEVIAPWRDWEFESRNDLLDYAEKNQITVPKDKMGEPPFSTDANLLHTSSEGKLLEDPWLEPPEHIFSRTKSIEDTPNKAEVITIGFENGDPVSINEEKLKPHEILTRLNSIAGNHGVGRIDIVENRFVGMKSRGVYETPGGTILLDARRAIESITLDKGEAHLKDELMPKYAETIYNGFWFSSERVSMQKLIDSMSHKVSGDVKIKVFKGNVIILGRRSSNSLYDTTLVSFDEVGEYNQKDAEGFIKINSIRLRKNN

SEQ ID NO: 197276 - protein, 411 aa, Unknown
  Bacterial polypetide isolated from the Sargasso Sea
MSGINKIVLAYSGGLDTSAIIPWLKENYDAEIIAFVADVGQERDDLEGIEQKAIASGATKCIVKDLREEFVKEYVYPTLKTGAVYEGTYLLGTSMARPVIAKAMVEAALAEGADAISHGCTGKGNDQVRFEGAVAALAPQLKVIAPWRLWDMRSREDLLAYLETRNIPCKATLKKIYSRDANAWHISTEGGELESTWNEPSEAVWQWTVPAEQAPDQPEYVKLTVAQGEVVAVDDQPLSPHQILMTLNERAGKHGVGRIDITENRMVGMKSRGCYETPGGTVMVAALRAVEELVLDRPTRAWREKLGAEFSHLVYDGRWFTPLCKAIVASANAIAEDLDGEVVLKMYKGQVTAVQKKSPNSLYSEDFATFGADEVYDQSHAEGFIRLYTLASRIRAMKEQHQAIGGDHTHG

SEQ ID NO: 197277 - protein, 410 aa, Unknown
  Bacterial polypetide isolated from the Sargasso Sea
MGTIDKKNINKVVLAYSGGLDTSVILRWLQEEYDCEVVTFTADLGQGEEVEPARAKAEAAGVKEIYIEDLREEFVREFVFPMFRANAVYEGVYLLGTSIARPLIAKRQIEIAAKTGADAVSHGATGKGNDQVRFELGYYALNPEIHVIAPWREWDLDGRQRLLEYARKHQIDVPRDKEDEPPYSTDANLLHISYEGRALEDPWIEPNDKMFTRSVSPEVAPDTPTYIELEFKGGDPIAINGDKLSPAVMLTKLNELGGANGIGRLDLVENRYVGMKSRGVYETPGGTILMTARRGMESITLDRGAAHLKDELMPRYAELVYNGFWFSPEREMIQTAVDESQKFVAGTVRLKLYKGLVSVVGRKSLNSLYSESHVTFEADTVYNQRDAEGFIKLNALRLKLLQAAQKRFTS

SEQ ID NO: 197278 - protein, 285 aa, Unknown
  Bacterial polypetide isolated from the Sargasso Sea
MKKIVLAYSGGLDTSIILKWLQINYKAEVIAYTSNIGQDLNKKKIIQNAKRLGVKKIIIEDLKNIFVKDYVFPMIRAHAVYEGVYLLGTSIARPLIAKRQIEIAKKYKAFAVSHGATGKGNDQVRFELGYYFFGKKIKVIAPWREWKLQSRSDLIRYAKKYKIPIPKDKKGAPPFSVDDNLFHVSTEGKVLENPRNAPPEFIFQKTISPEKAKNKAVKIKIGFKNSDPVSINGKKYKPEFLLEKLNTIGGANGIGRVDLVENRFIGIKSRGVYETPGGTILYFAQ

SEQ ID NO: 197279 - protein, 316 aa, Unknown
  Bacterial polypetide isolated from the Sargasso Sea
MKNKIVLAYSGGLDTSVILKWLQTEYNADVIAYAADLGQGAELTEAKIKAKKLGAKKIYIENLKEEFVRDYVFPMFRCNTIYEGEYLLGTSIARPLIAKRQIEIAKKEKANAVSHGATGKGNDQVRFEFSYYALEPKIKVIAPWREWDLSSRTKLLEFAAKNKIPIMKHNKKESPYSVDANVLHRSAEGKILEDPWKRPPENVFGISKSPQSAPNKETIITIQFKNGDPIGINGKKLSPFNLLEKLNKLGAVNGIGRVDIVENRYVGIKSRGVYETPGGTILLKAHRAMESITLDREEVFTKDELMPKYARLIYNG

SEQ ID NO: 197280 - protein, 397 aa, Unknown
  Bacterial polypetide isolated from the Sargasso Sea
MKSKRKVVLAYSGGLDTSVIAKWLMEKYNCEVITFTADIGQGEETKSARIKAKKLGIKKIYIEDLREDFVKNYVYPMFRANAIYEGEYFLGTSIARPLISKRLIEIAKKEKADAICHGATGKGNDQVRFELSAYSLNPKIQVIAPWREWTFKSRKDLMRYSKLHKIDIDFDKGKKSPYSMDANMLHISYEGGILEDPWAAPEESMWLRTNSIEKAPNKAELITLEFKKGDVIKINNKTLSPGRILDKLNQLAEKHGIGRADIVENRYVGIKSRGCYETPGGTIYYKAHKAIESITLDREVLHLKEDIINKYSRLIYNGYWFSPERVTLQKLIDDTQNVVNGKVRIKLLKGNVVIEGRTSPNSLYDENLSTFEDDDGSYDQRDAEGFIKINSLRLRKK

SEQ ID NO: 197281 - protein, 286 aa, Unknown
  Bacterial polypetide isolated from the Sargasso Sea
MKIVLAYSGGLDTSVLLTWLKEKYNAEMIAFCADVGQEEELRGLDKKAKRTGASKMFIDDLQEEFAADFIYPMMQAGAIYEDQYYLGTSIARPLIAKRMVEIARKEKAHAIAHGATGKGNDQVRFELTAASLAPEIDIIAPWRMAVFREQFPGRKEMIDYCRKHKVDVEASASKPYSMDRNLLHISYEAGILEDTWFDAFAPKNKEMFKLSVAPEDAPDKPEYVNLEFDKGNCIAVNGKALNPLGVMRKLNKLGGKHGIGRVDIVENRFVGMKSRGVYETPGGTIL

SEQ ID NO: 197282 - protein, 330 aa, Unknown
  Bacterial polypetide isolated from the Sargasso Sea
KNLFVKDYVYPMIRGHALYEGVYLLGTSIARPLIAKRQIAVAKKFKAFAVSHGSTGKGNDQVRFELGYYYFGPSIKVIAPWRLWKLKSRTDLIRYAKKNKIPIPKDKKGAPPFSVDDNLYHTSTEGKILEDPKKSAPEYIFQRTVAPEKAPNKASFVTIGFKKGDPVSVNNKKLSPAKLLQKLNLVAGRNGIGRVDLVENRFIGIKSRGVYETPGGTLLVVAHRAMESVTLDKKTMHKKDEIMPKYAELIYNGFWFSKARFKLQKIVDLKRNQVNGSIKLRLYKGNITIVSRISKNKAYSIKKVSFEENKSFKKSKVEKFILGAARKLRS

SEQ ID NO: 197283 - protein, 267 aa, Unknown
  Bacterial polypetide isolated from the Sargasso Sea
MKSKKKIVLAYSGGLDTSIILKWLQEKYNSEVITYTADIGQKINKKKIISNAKKLGVKKIIIKNLKDIFVKNYVYPMIRGHALYEGVYLLGTSIARPLIAKDQIRVAKKYNAYAVSHGSTGKGNDQVRFELGYHYFGPKIKILSPWRIWKLKSRSDLIKYAKKNNISIPKDKKGAPPFSIDDNLFHTSTEGKILENPMNAAPEFIFQRTKSPEKAPNKSSFVTIEFKNSDPVSVNGKKYSPSKLLGKLNNLAGKNGIGRVDLVENRF

SEQ ID NO: 197284 - protein, 400 aa, Unknown
  Bacterial polypetide isolated from the Sargasso Sea
MSKVKKVVLAYSGGLDTSVILKWLQEVYDCEVVTFTADIGQGEEIEPARLRAQEMGIKEIFIEDLREEFVQDYVFPMLKASTIYEGTYLLGTAIARPLIAKRQIEIAKETGADSVSHGATGKGNDQVRFELGYLGLNPDINIIAPWREWDLDSRTKLIEWAEKRNISVPKDKRGEPPYSTDANLLHISYEGKALEDPWVSATEEMFTRTVSPNKAPDEEEEVIIEFKEGTPVSVNGKQLSPADLLEDLNGKAGKHGVGRVDIVENRFVGMKSRGVYETPGGSILHVAHRGIEQLILDGPTMLLRDELMPKYASLVYNGLWFSPEREMLQSLIDESQKNVTGEVKVKLFKGNCSLVGRRSPKSIYNEGIVTFETGNNYDQKDADGFIKLNALRLQQRKRVK

SEQ ID NO: 197285 - protein, 395 aa, Unknown
  Bacterial polypetide isolated from the Sargasso Sea
MKSKKRIVLAYSGGLDTSIILKWLQENYNAEVICYTADIGQEINRKKIINNAKKFGVKKIIIKDLKNLFVKDYVFPMIRGNAIYEGVYLLGTSIARPLIAKDQIRIAKKFKAYAVSHGATGKGNDQVRFELGYHYFGPKIKVVAPWRIWKLKSRSDLINYAKKHKIPIPKDKKGAPPFSVDDNLFHTSTEGKILENPKNSAPEFIFQRTTSPEKAPNKPTFISINFKNGDPVGINGKKLNPENILTKLNFVAGKNGIGRVDLVENRFLGIKSRGVYETPGGTLLIHAHRAIESVTLDKETMHKKDSIMPRYAELIYNGYWYSKERFKLQKIIDQKKNKVNGSVKLKLYKGNITIQSRITKSNAYSMKKVSFEENKTFNKSNVERFINYHKKKLRY

SEQ ID NO: 197286 - protein, 329 aa, Unknown
  Bacterial polypetide isolated from the Sargasso Sea
KNIFVKDYVYPMIRGHALYEGVYLLGTSIARPLIAKDQIRVAKKFKAYAVSHGSTGKGNDQVRFELGYHYFGPKIKIIAPWRIWKLKSRTDLINYAKKHGIPIPKDKKGAPPFSVDDNLFHTSTEGKVLENPKNSAPEFIFQRTISPEKAPNKPSFITINYKNGDPIGLNGKKLSPAKVLDKLNQLAGKNGIGRVDLVENRFIGIKSRGVYETPGGTLLLVAHRAIESVTLDKNTMHKKDQIMPRYAELVYNGYWYSKERFKLQKIVDLKRNKVNGSVKLKLYKGNITIQSRQTSSNAYSMKKVSFEENKTFNKSNVERFINFHKKKLR

SEQ ID NO: 197287 - protein, 263 aa, Unknown
  Bacterial polypetide isolated from the Sargasso Sea
YHYFGPKIKIIAPWRIWNLKSRSDLISYAKKRNIPIPKDKKGASPFSVDDNLFHTSTEGKLLENPKNSAPEFIFQRTVSPEKAPNKATHVTINFKNGDPIGLNGKKFGPAKLLFKLNQLAGKNGIGRVDLVENRFLGIKSRGVYETPGGTLLIHAHRAIESVTLDKETMHKKDAIMSRYAELIYNGYWFSKERFKLQKIVDLKKNKINGSVKLKLYKGNVTIQSRMTKSNAYSMKKVSFEENKSFIKSNVEKFINFHKKKLRN

SEQ ID NO: 197288 - protein, 315 aa, Unknown
  Bacterial polypetide isolated from the Sargasso Sea
NKAESLGVEEIFIEDLQEEFVRDYVFPMFRANALYEGEYLLGTAIARPLIAKRQVEIARIVGADAVAHGATGKGNDQVRFELGYYSNHPDINIIAPWRDWEFQSREELINFAEKNQIIVPKDKLGETPFSTDANLLHTSSEGKLLEDPWVEPPEYVFSRTASLEDASDTPETIIITYKNGDPIKLNNKSLKPHTLLKELNHIASKHGVGRVDIVENRFIGMKSRGVYETPGGTILIKAHRAIESITLDRGEAHLKDQIMSNYAEIIYNGLWFSSERRALQKLIDSTQMNVSGDVRLEIFKGNVIIKGRRSNNSII

SEQ ID NO: 197289 - protein, 296 aa, Unknown
  Bacterial polypetide isolated from the Sargasso Sea
REFSADAVAHGCTGKGNDQVRFDLAINALGPDLKIITPARKWNMSREEAIVYGEKFGIPAPVSKKSPYSIDVNLLGRSIEAGILEDPMQEAPEDIFSMTSSIEDSPDSPQEVEIVFKNGFPVGINDESLSPVEIIKKANVLAGEHGFGRIDMIEDRVVGIKSREIYETPGLLLLIKAHKELESITLNPDVVDFKGIVEKKWGQLVYQGFWFGPLKESLDAFISSTQTAVNGRVKIRLHKGNAIVIGRMSENNSLYREDLVTYGKHDVFNHSLAEGFIYMWGMSNKIWAELNSKTKD

SEQ ID NO: 197290 - protein, 307 aa, Unknown
  Bacterial polypetide isolated from the Sargasso Sea
ARPLISKRMIEIAEEEGADAIAHGATGKGNDQIRFEIGAYSLNPSIEVIAPWRTWNFVSRADLIDYCKKNQINIDADPDEPMYSTDENILHTSYEGEILEDPSQPAPESIWQRTSSLKEAPDEEQEITINFENGDPVGLDGKDLSSSQVLGILNDIAGNNGIGRLDLVENRFTGMKSRGCYETPGGTILIKAHRAIESLCLDAQTGHLKDELMPKYAQLIYDGFWWSPEREALQAFIDKTQQYITGSVKLGLYKGNIIVKERTSPYSLYDSKIVTFEDDQNTYNQADATGFIKINSLRLKANAKRKK

SEQ ID NO: 197291 - protein, 134 aa, Unknown
  Bacterial polypetide isolated from the Sargasso Sea
MINSDNFSLDKKNIDTILVLDFGSQYTQLIARRIRELNVFSEILPWDISVDRIKSLNPKGVILSGGPESVTESNTPRIPKTIFELEVPVLGICYGMQTLAEQFGGQVTSSKNKEFGHAKIFIESASLLFDGFIS

SEQ ID NO: 197292 - protein, 318 aa, Unknown
  Bacterial polypetide isolated from the Sargasso Sea
FCEVIPFNKINKKILNDRALSGIILSGGPNSVKDKKSPKLDSKILNLGIPILGICYGLQLICREFKGKIGQSKLREYGHSIITLKRKSLLFKKVKTKNQVWMSHGDHIEKKPHGFVITSLSSEKVIASIENLDQNLFGLQFHPEVYHSLEGKKILSNFLFIICKIKNKFKLENFLSVKIKSLRAELQNKRVICGLSGGVDSTVTAFLLHKAVQNNLFCIFVDHGLLRLNESKEVEKLFKKKFGKNFKKIEASNIFLHKLKKIKDPEKKRKIIGKTFIEVFEKEAKKIKGIDYLAQGTLYPDIIESIPFFGGPTAKIKS

SEQ ID NO: 197293 - protein, 160 aa, Unknown
  Bacterial polypetide isolated from the Sargasso Sea
KDLKFDVIEPFKELFKDEVRRLGLFYKLDQRFVNRHPFPGPGLGIRCIGKVNRQRLDTLREIDEIFINFLIEKDLYNKSWQAFAVLLPVKSVGVMGDERTYEETCVLRCINSVDGMTADVSQINVETLSEVATHIINKVPRVNKVLYDITSKPPSTIEWE

SEQ ID NO: 197294 - protein, 358 aa, Unknown
  Bacterial polypetide isolated from the Sargasso Sea
YTQLIARRLRELNVYSEVYPWDEIPVLESVDGFVLSGGPESSNIEGNPNIFNEIFESNKPILGICYGMQVLAFQEGGEIQNEGKKEFGYAKIDLNNQTSLFADTSDSIDVWMSHGDKVISLPEGYETLASSDNSPIAAYQNLEKNYFGLQFHPEVTHTDFGLKIIENFINVCGVERNWNADDILKNIHNQAKTEVGEGKVLLALSGGVDSTVLASVLHKTLEDRLVCVMVDHGLLRKDEANNVVTNLKEKIGLEVNLVNAQETFLEKLKGIKDPEEKRKIIGNTFIEVFEAEAKKIQGIEWLAQGTIYPDVIESAGNSKSKAKVIKSHHNVGGLPERMNLKLLEPFRMLFKDEVRKIG

SEQ ID NO: 197295 - protein, 318 aa, Unknown
  Bacterial polypetide isolated from the Sargasso Sea
MRETGVYTEILPCTTAPNKIAAAAPKGIILSGGPNSVALADTPRAPQIVFDLGVPIFGICYGQQTMCAQLGGRVEPGTTREFGRSELEIKEHSVLFDGVWSQQSRYVVWMSHGDHVAALPDGFRVLATSAGAPYAVVEDAARRYYGVQFHPEVVHTEGGSDLLRKFALCICGCSGNWSMAAYRQRAIAAIRDQVGEARVICGLSGGVDSSVAAVLIHEAIGDQLTCVFVDHGLLRAGEAEEVVRLFGDCYNVKLVHVNASDMFLDRLAGISDPEQKRKIIGASFIEVFDAEASKIADAKFLAQGTLYPDVIESISAAG

SEQ ID NO: 197296 - protein, 311 aa, Unknown
  Bacterial polypetide isolated from the Sargasso Sea
DNSFCAAFEKDLFYGVQFHPEVDNTDYGKEILKNFALDICNISDNWSAKNFINKSIENIRKEIGNSKVICGISGGVDSSITATLIHKAIGNNLTSIFVDNGLLRKGESEDVMNFLQKGLGLNIVKVNASKNFLYKLKDIIDPEEKRKIIGKEFINVFEKEAKKIKNVKYLAQGTLYSDVVESAVIKSGHQAVIKSHHNVGGLPDKMKLKLIEPLRLHFKDEVREIGYELGINKEIIERHPFPGPGLAIRIMGEITEEKLYILREADHIFIDEIKKAGLYHKIWQAFAVLTNTQSVGVMGDNRTYQNCVAIR

SEQ ID NO: 197297 - protein, 316 aa, Unknown
  Bacterial polypetide isolated from the Sargasso Sea
MNFGSQVTRLIARRIRDFGVYSEIITPEDLGKIINFKDIHGLIFSGGPSTVTNKFFPKIPKRVFFLNIPILGICYGLQLIAKNFGGRIKSNTKKREYGRTLIKKRRNSVLTENFYKNRKSEVWMSHQDCVTKLPNNFYTVASSKSSKYAILEHKNKSIFGIQFHPEVSHTNRGIILLKNFVFKICNAKKNWGTLNYKNNIIENLRKISKSEKIICGLSGGVDSSVTALVLSKAVKKNLTCIIVDTGLMRKNEFKNLYKIFKNKYKINVKLVNESILFLTKLKNVTEPEKKRKIIGKLFVKIFERESKKIKGVKYLA

SEQ ID NO: 197298 - protein, 273 aa, Unknown
  Bacterial polypetide isolated from the Sargasso Sea
ITGIILSGGPLNVYQTKKVSFDKKILNQNIPILGICFGHQIISKVLGGKVKQSKLREFGLVNIKKNKDSVLTRGFFNKNGINNVWMSHSDQVTKLPKNFEKLASSANSKFCIIQNKYKKFYGIQFHPEVTHTHNGIKLIKNFLFSICKSKKNWSSKKQKEKIIDEIKNQVGGSKVICALSGGVDSSVVAKIIHKAIGKNLTCIFVNTGLLRKNEEIQVIKTFKQKLKIKLIYVNAKGLFIKKLKKINDPEKKRKIIGNLFIKIFEKYSKKISN

SEQ ID NO: 197299 - protein, 220 aa, Unknown
  Bacterial polypetide isolated from the Sargasso Sea
MLLKTESEEVFLRHLKNIEDPEQKRKIIGRTFIDVFDAEAIKFKDIKFLAQGTIYPDVIESSGSESNEARVIKSHHNVGGLPEEMKLNLVEPLRDLFKDEVRRMGIELGIPKNMLERHPFPGPGLGVRIIGEVTKEKTKVLQEADHIFIEELIKADLYDKVSQAFAVLLPVKSVGVVGDERRYAEVIGLRAVETVDFMTAKWAHLPYEFLEYVSNRIVNE

SEQ ID NO: 197300 - protein, 132 aa, Unknown
  Bacterial polypetide isolated from the Sargasso Sea
VASTQTAPIAAMEHKNLPIYGIQFHPEVTHTNNGHKILENFIFNACNARTDWKMDDLISQRIQEIKEEVQKDKVLLGLSGGVDSSVTAALLNKAIGKKLTCVFVDNGLLRKGEADSVMQTFKDNMDLNVIKD

SEQ ID NO: 197301 - protein, 342 aa, Unknown
  Bacterial polypetide isolated from the Sargasso Sea
KGKVELAYKREFGHADLSLKSQGSGLFKGINKKKMSVWMSHGDHVSKLPKDFKVCATTYNSPIAAFHHPTKKIFGLQFHPEVTHTPQGKKILKNFVRDISGCKGLWNSKNIIDRAVSEIREQVGDQEVLLGLSGGVDSAVVAALLSKAIGNQLTCIFVDNGLLRLNEGDQVMETFKGKFGIKVKRANAGNQFLRDLKGKKDPELKRKAIGKTFIDVFLKEAKRNTKIQWLAQGTIYPDVIESAGTKNGSAHVIKSHHNVGGLPSYLNLPVIEPLKDLFKDEVRKMGLELGLPKEILFRHPFPGPGLGVRILGEIKRPYIKTLQLADDIFISELVKRWLLRES

SEQ ID NO: 197302 - protein, 174 aa, Unknown
  Bacterial polypetide isolated from the Sargasso Sea
VIKSHHNVGGLPDDVDLIIVEPLREFYKDEVRQIARQLQIPSSERQPFPGPGLAVRVLGEITPSRVESCREACHIVETRIKEAASRGMCDLPWQYFAALLPVRSVGVHGDTRVHGETIVVRAVTSIDGMSARYSSLPQDLLAEISTEITNSLKGQVNRVVYDITHKPPGTIEWE

SEQ ID NO: 197303 - protein, 272 aa, Unknown
  Bacterial polypetide isolated from the Sargasso Sea
IPRNFRAVASSTNSKFAIVEDRIKKFYGVQFHPEVTHTENGKKIISNFVFLICKIKKNWSSKDQKLKLIKDVRSQVGSNKVICALSGGVDSSVVAQLLNKAIGKKLFCIFVNTGLLRKNEEIQVVQTFKKRLKMNLIYVNAEKEFLKKLSNVSDPEKKRKIIGNLFIKIFERYAKKIKNVKFLAQGTLYPDLIESKSVTGSQTSKIKSHHNVGGLPKRMKLKLVEPLKFLFKDEVRKLGLELNLNNEIISRHPFPGPGLAIRMPGVITNEKI

SEQ ID NO: 197304 - protein, 282 aa, Unknown
  Bacterial polypetide isolated from the Sargasso Sea
EFGLANVYKKNKSLLTTNFFGNKKSKQVWMSHADQVSKLPKNFKVVASSTNSKFAIVENKIKKYYGVQFHPEVTHTENGKKLISNFIFLICKIKRNWSSRDQKNQLIKDVRKQVGNNKVICALSGGVDSSVVAQLLNKAIGKKLYCIFVNTGLLRKKEEIQVVQTFKKRLKMNLIYVNAEKEFLKKLKNVSDPEKKRKIIGNLFIKIFERYAKKINNVKFLAQGTLYPDLIESKSVTGSQTSKIKSHHNVGGLPKKMNLKLVEPLKFLFKDEVRKLGLELNL

SEQ ID NO: 197305 - protein, 327 aa, Unknown
  Bacterial polypetide isolated from the Sargasso Sea
MKIAGFDGDWTMQAYKKEMIQNIKDIVKKDRVICGISGGVDSTVTATLLHKAINKQLTCIFVNHGFLRKYEEKEVLKMFKNNIKIPLIYADESALFMKELEGVADPEIKRKKIGKLFINVFQKYAKKIKNAKYLGQGTLYPDVIESVSVNGQISETIKSHHNVGGLPKKMGLKLIEPLREVFKDEVRNLGKELGISKEFINRHPFPGPGLAIRCPGEITKQKIEILRDADHIFIDQIKKFGLYDEIWQAFAAILPVKTVGVMGDKRTYEFACTLRAVTSVDGMTADYYPFDHEFLKDTSTRIINEVRGINRVTYDITSKPPGTIEWE

SEQ ID NO: 197306 - protein, 250 aa, Unknown
  Bacterial polypetide isolated from the Sargasso Sea
TFSEHMNLNVIRVDAEEAFLKRLKGINDPEEKRKIIGRTFIEVFEDEASKLENVKWLAQGTIYPDVIESAGSKTGKAHVIKSHHNVGGLPEDMKLKLIEPLRDLFKDEVRKIGKELGLTSKLVDRHPFPGPGLGVRILGAVKKEYADLLRLADDIFIEELHKENLYDKVSQAFAVFLPVKSVGVMGDGRKYEYVIALRAVETTDFMTANSAKLPYEFLDHVSTRIINEVPGISRVTLDISSKPPSTIEWE

SEQ ID NO: 197307 - protein, 123 aa, Unknown
  Bacterial polypetide isolated from the Sargasso Sea
MSLDQNLDKILIVDFGSQFTQLIARRIRELGIFSEIVSHKKIRVKDINQSIKGIILSGGPLNVYQISKYTFNEKILDLNIPILGICFGHQILSKLNGGRVKQSKHREFGLANIYRKNSSLLTK

SEQ ID NO: 197308 - protein, 261 aa, Unknown
  Bacterial polypetide isolated from the Sargasso Sea
GVQFHPEVVHSTCGMALIRNFVYHICGCEPDWTTSAFIDEAVAVVREQVGEKRVLLALSGGVDSSTLAFLLKKAIGDQLTCMFIDQGFMRKGEPEFLMDFFDRKFNIHVEYINARQRFIGKLKGITDPEEKRKIIGTEFIRVFEEESKRLGPFDYLAQGTLYPDVIESAGTNVDPKTGERVAVKIKSHHNVGGLPKDLQFKLVEPLRKLFKDEVRKVGRALGLPEEIVRRHPFPGPGLAIRILGEVTDEKLNCLRDADLIV

SEQ ID NO: 197309 - protein, 302 aa, Unknown
  Bacterial polypetide isolated from the Sargasso Sea
MAQTVVVLDFGSQYTQVIARRIREASVYSKVLPYDTPIGEIKKIDPVGLVLSGGPASVLAKGAPKPHPRLFELGIPTLGICYGLQLMGKMLGGRVMSSQHREYGRGKLTIKKKGPLFKSLPGELTVWNSHGDCLTKLPKGFHALAQTENSPFAAIEDPSRKFFGLQFHPEVEHSEKGTQIIRNFLVAVCGCKGDWGMEDFTESAVRSIRAQVGDRKVILGLSGGVDSSVAAALIDRAIGKQLTCIFVDNGLLRLNEREQVRQLFRNHIPGKLKVALAGPLFLGRLKGVTNPETKRKIIGRTF

SEQ ID NO: 197310 - protein, 255 aa, Unknown
  Bacterial polypetide isolated from the Sargasso Sea
MQDRILILDFGSQYTQLIARRVREAGVYSEIYVGDIGVEAIESFQPSGLILSGGPESAFTDDAIKPSQEIYSLGLPILGICYGMQVMSEQLGGKVSPSSHREFGHADIKIESNSRLLEGIENSAEQTVWMSHGDRVESLPEGFRTICTSQNSPSAAMASEDKSFYGLQFHPEVTHTICGQKIIENFLHHICGCASDWNPGNIIAKHIKKVQEAVGNDQILLGLSGGVDSSVVAALLHKAIGDQLVCIFVDNGLLR

SEQ ID NO: 197311 - protein, 260 aa, Unknown
  Bacterial polypetide isolated from the Sargasso Sea
RLNEGDQVMETFKGKFGIKVKRANAGNQFLRDLKGKKDPEQKRKAIGKTFIDVFLKEAKRNTKIQWLAQGTIYPDVIESAGTKNGSAHVIKSHHNVGGLPSYLNLPVIEPLKDLFKDEVRKIGLELGLPKEILFRHPFPGPGLGVRILGEIKRPYIKTLQLADDIFISELVKGGYYEKVSQAFAVFLPVKSVGVVGDARRYEYVIALRAVETIDFMTAKSAKLPHAFLEKVSNRIINEIPEVSRVTYDISSKPPATIEWE

SEQ ID NO: 197312 - protein, 68 aa, Unknown
  Bacterial polypetide isolated from the Sargasso Sea
MSQTSLKKERDPSILILDFGSQYSELIARRIRETNVFSLVVSNCISIKDISDINPKGIILSGGPKFCI

SEQ ID NO: 197313 - protein, 294 aa, Unknown
  Bacterial polypetide isolated from the Sargasso Sea
MQNYLKIQVAKIKIKVEKNHVICGLSGGVDSMVTAAIISKAINKQLTCIYVDTGLMRLNETKEVQNLFKKHFKSKLITVNAKNRFFTSLKGVFDPEKKRKIIGNLFIKIFNAESSKISKAKFLAQGTIYPDIIESQSFHGGPTSVIKSHHNVGGLPKEMKLGLIEPLQELFKDEVRRLGKELKLPKEFIQRHPFPGPGLGIRVLSDITIDKVRMLQHADKIYIDEIKAADLYNDIWQAFAVLLPVRTVGVMGDQRSYEFVCGLRAVTSVDGMTADFYPFSGEFLSKVSTRIINE

SEQ ID NO: 197314 - protein, 156 aa, Unknown
  Bacterial polypetide isolated from the Sargasso Sea
MPDKEYDKILIIDFGSQVTKLIARSIRELNVYCEIVTISKFNKILNDKLKFKGIILSGGPDSVAKHKYFPNVNKSTFQHNIPILGICYGHQLISYLFGGKIKKAKKREFGRTFLHQLTKSDLTNGFFQNKKNVVWMSHSDSVIKIPKGFKVIARSE

SEQ ID NO: 197315 - protein, 279 aa, Unknown
  Bacterial polypetide isolated from the Sargasso Sea
MSGGVDSSVVALLLKRAVGNKLTCIFINTGLLRKNEEREVINNFKKKLKLKLIYIDASKIFLSRLKNVNNPETKRKIIGKLFIQLFEKYAKKIKNVKFLAQGTLYPDLIESKTVTGSPSSKIKSHHNVGGLPKKMKLDLVEPLNSLFKDEVRKLGKELSLSKDLLLRHPFPGPGLAIRIPGKITKEKINILKEADYIFINELKKSNLYNKIWQAYAALLPLKTVGVMGDKRTYEYTCLLRAVTSEDGMTADFFPFSKNFFQKVSNKIINSVSGINRGVY

SEQ ID NO: 197316 - protein, 276 aa, Unknown
  Bacterial polypetide isolated from the Sargasso Sea
MKKNNRDKKILIIDFGSQYTQLIARRVRELGVFSEISNHKQVKKVDVEELFGIILSGGPLNVYEDKKINFNKKILNLKVPILGLCFGHQLISRHYGGKVITAKNREFGLATIKKKLNSKLTKNFFDNRKQRNVWMSHADHVTRLPKGFKAAASTKGSKFTIIENDLIKRYGIQFHPEVTHTEKGILLLKNFVFGICKSKKNWSTDHQKKTLIKNVQNQIGNKKIICALSGGVDSSVVAQLLNKAVGKQLHCIFVNTGLLRLNEEKQVVNTFKKKLK

SEQ ID NO: 197317 - protein, 149 aa, Unknown
  Bacterial polypetide isolated from the Sargasso Sea
RELYKDEVRDVARILGVPEKLLKRHPFPGPGLAVRIIGDITPSKLAICRKASKIVEEELWDAGVYDKVWQAYAAVGDDKAVGVVGDERKYGRIVTVRVVDSIDAMTADWTRLPNGVLEKISNRITNEIEEVTWVSYVISSKPPATIEPQ

SEQ ID NO: 197318 - protein, 232 aa, Unknown
  Bacterial polypetide isolated from the Sargasso Sea
MLNKLLIVDFGSQVTQLIARNVRSQKVYCEVVAYNKVSLNYIKKEKPLGIILSGSPLSVTKKRFPKIKKDIFFLGIPILGICYGMQLISSTLGGKIKKISGREYGDTSIKVLKKSSINPNNWNTNTKHNVWMSHGDSVKKLPKNFTSFAKSNNENYVGIANEKMKIFGLQFHPEVTHTKDGKSLIKKFLFNVCKCKPHWNMKKFKKENIKLLKKKLANKKVLCALSGGVDSS

SEQ ID NO: 197319 - protein, 293 aa, Unknown
  Bacterial polypetide isolated from the Sargasso Sea
CYGMQVMTEQLGGKVSPSNEREFGHADAKMEANSSLFKGIETDDEQPVWMSHGDRVESLPQGFQKICTSANSPSAAMANEDNSFYGLQFHPEVTHTSCGQRIIKNFVHNICGCENDWNPGNIIEKDIKEVQEAVGDDQVLLGLSGGVDSSVVAALLHKAIGDQLVCIFVDNGLLRLNEGDQVMETFSEHMNLNVIRVNAEDIFLEKLKGVDDPEDKRKIIGRTFIEVFEDEASKLENVKWLAQGTIYPDVIESAGSKTGKAHVIKSHHNVGGLPEEMKLKLVEPLRGFIQRPR

SEQ ID NO: 197320 - protein, 325 aa, Unknown
  Bacterial polypetide isolated from the Sargasso Sea
SHYPPDFGSQYTQLIARKIRELNVYSRILSHDSTLDDIMVYKPKAIILSGGPSSVYEKNAPQYDNEILEVDIPILGICYGLHILAHHSGGSVKSTGQGEYGFAKISITDKTEFLQSDLNGSQVWMSHMDQVTKVPDSWSVIAESSNGVVAAMASNDLSRLATQFHPEVSHTEYGKEMLKNFLFKIASCNADWTPDNFIDQQVDLIREVVGSSNVLIGVSGGVDSSVVAAILNKAIGDKAIAVLIDHGLMRKNEALDCINALKDGLGININLENESDTFLEKLSGITDPEQKRKIIGNQFIYSFESIASRFDKMEYLAQGTLYPDV

SEQ ID NO: 197321 - protein, 339 aa, Unknown
  Bacterial polypetide isolated from the Sargasso Sea
RAPQAVWDLGVPVLGICYGMQTMAVQLGGKVEWSDHREFGYAEVRAHGHTRLLKDIQDFATPEGHGMLKVWMSHGDKVAELPPGFKLLASTPSCPIAGMADEARGYYAVQFHPEVTHTVQGRAMLERFVLEIAGAKPDWIMRDHIEEAVKRIREQVGDEEVILGLSGGVDSSVAAALIHRAIGDQLTCVFVDHGLLRLDEGKMVMDMFAGRLHAKVVHVDASEQFLGHLAGVTDPEAKRKIIGREFVEVFQAEAKKLSNAKWLAQGTIYPDVVESGGTKTKKATTIKSHHNVGGLPETLGLKLLEPLRDLFKDEVRELGVALGLPHEMVYRHPFPGPGL

SEQ ID NO: 197322 - protein, 312 aa, Unknown
  Bacterial polypetide isolated from the Sargasso Sea
NLDRILIIDYGSQYTQLIARRVREIGIYSEIYPPNVSKKRVEIFRPSGVILSGSPDSVSNEAIDVEGLPLFVALGVPILGICFGMQSLASYTGGEVQTSQEKEFGFAQVRARGHSRLLEGIQDATNESKHGLLDVWMSHGDSVTKLPPGFKVIASTLNTPIAGIADEVRRFYGLQFHPEVTHTKRGKEILERFCLEICDCDKSWSTEDFIKSSLRSIKKEIGSEKVLLGLSGGVDSSVAASLLHKAVGDQLLCVFVDNGLLRLGEAEQVMNTFQKSMGLNIRFVNAQNEFLEALDGVNDPEEKRKIIGKKFV

SEQ ID NO: 197323 - protein, 78 aa, Unknown
  Bacterial polypetide isolated from the Sargasso Sea
MDLNNNLNKILIIDFGSQFTQLIARRIRELGVYSEIISHKKLNSKLIKSKILGIILSGGPLNVYQSKKVKFKRELFKW

SEQ ID NO: 197324 - protein, 273 aa, Unknown
  Bacterial polypetide isolated from the Sargasso Sea
MQKILVVDFGSQYTQLIARRLRELNVYSEVYPWDEIPNLESVDGFVLSGGPESSNIEGNPNISNEILESNKPILGICYGMQVLAFQEGGEIQNEGKKEFGYAKIDLNNQTSLFADTSDSIDVWMSHGDKVISLPEGYETLASSDNSPIAAYQNLEKNYFGLQFHPEVTHTDFGIKIIENFINVCGVERNWNADDILKNIHNQAKTKVGKGKVLLALSGGVDSTVLASVLHKTLEDRLVCVMVDHGLLRKDEANNVVTNLKEKIGLEVNLVNAQ

SEQ ID NO: 197325 - protein, 309 aa, Unknown
  Bacterial polypetide isolated from the Sargasso Sea
MSKEDKIIILDFGSQYTQLIARRVREIGVFSVILPCDISIDKIQSLNPKGIILSGGPETVTESDNPKINKALFDTEIPLLGICYGMQTMAQELGGNVVQSDKREFGHATINRINHSILFDEVKFKNDTLNVWMSHGDKVSVVPGNFNAIAESDNCPIAAFAHTDKDWFGLQFHPEVTHTDEGIKIIENFVYKICKCQKNWDITNIIDGMKSDVTSTVKDDKVILGLSGGVDSSVVAILLHQCIQDNLTCIFVDNGLLRLNEVEEVLDTFSKIGIKVHLSKSSDTFLSRLKGVKDPEKKRIIIGNTFIEV

SEQ ID NO: 197326 - protein, 268 aa, Unknown
  Bacterial polypetide isolated from the Sargasso Sea
MDLNNNLNKILIIDFGSQFTQLIARRIREFGIYSEILSHKKLNLNINKNQIKGIILSGGPLNVYQSKKVKFKKEIFKWNIPILGICFGHQVISKELGGKVKKAKHREFGLAKLNRLNNSKLTKNFFNKRGSNNVWMSHADEVTKLAKGFKVIADTETSKFSIVENPKQKFYGIQFHPEVTHTEKGKIILKNFIFSICMIKKNWSPSNQKKILIEDLKKIVGNSKVICALSGGVDSSVVAKLIHNAIGKKLTCIFVNTGLLRKNEENQV

SEQ ID NO: 197327 - protein, 255 aa, Unknown
  Bacterial polypetide isolated from the Sargasso Sea
KDQVGDQEVLLGLSGGVDSAVVAALLSKAIGNQLTCIFVDNGLLRLNEGDQVMETFKDKFGIKVKRANAGNQFLRDLKGKKDPEQKRKAIGKTFIDVFLKEAKRNKKIQWLAQGTIYPDVIESAGTKNGSAHVIKSHHNVGGLPSYLNLPVIEPLKDLFKDEVRKIGLELGLPKEILFRHPFPGPGLGVRILGEIKRPYIKTLQLADDIFIGELIKGGYYEKVSQAFAVFLPVKSVGVVGDARRYEYVIALRAVE

SEQ ID NO: 197328 - protein, 192 aa, Unknown
  Bacterial polypetide isolated from the Sargasso Sea
MKQDTIVVFDYGSQYTRLISRRLREINVFCDLVYPEIDKSFFDERNIKGFILSGGPNSVFEENSPDLPRWVMESKLPILGICYGMQLIAINHQGKVKKTSKREYGNSILNILDSSKLFNGIPKKSNVWMSHGDKVIDLPDDFQIVAKTDNSFCAAFEKDLFYGVQFHPEVDNTDYGKEILKNFALDICNISE

SEQ ID NO: 197329 - protein, 318 aa, Unknown
  Bacterial polypetide isolated from the Sargasso Sea
YGVQFHPEVTHTENGKKLISNFIFLICKIKRNWSSKDQKNQLIKNIKKQVGNKKVICALSGGVDSSVVAQLLNKAIGKKLYCIFVNTGLLRKNEEIQVVQTFKKRLKMNLIYVNAEKEFLKKLKNVSDPEKKRKIIGNLFIKIFERYAKKIKNVKFLAQGTLYPDLIESKSVTGSQTSKIKSHHNVGGLPKKMNLKLVEPLKFLFKDEVRKLGLELKLSKEIISRHPFPGPGLAIRMPGKITYEKIKILKEADYYFIQALKDHGLYHKIWQAYAALLPVKTVGVMGDNRTYEYLCLLRAITSYDGMTADYYEFKKVFY

SEQ ID NO: 197330 - protein, 129 aa, Unknown
  Bacterial polypetide isolated from the Sargasso Sea
MNKILIIDFGSQFTQLIARRIRELGVFSEIISHKKIKNKDITNSIKGIILSGGPLNVYQINDYSFDKKIIQNEIPVLGICFGHQILSKLNGGRVKQSKYREFGLANIYKKKESILTKNFYNQKNTNKVW

SEQ ID NO: 197331 - protein, 273 aa, Unknown
  Bacterial polypetide isolated from the Sargasso Sea
MKDFIAILDFGSQYAHLISKRIRHIGAYTRVFSPSSDEKLLAKAKGIILSGGPASVNSINIPEFNSKILELNKPILGLCFGHQLIAHSFGGSISNTSKGEFGKAMLNQKSDCPLWENISFPNQVWMSHHDSVTKCPDEFEVTAETETGSLAALKHYKRPIFTFQFHPEVKDTSQGEIMLKNFVNVCEVRSRWSMESFIELTTKRLSNKVVNKKVLMFLSGGVDSSVAFALLHKVLGNENLLGLYINNGFMRKHESEEILSLYSQLGYKNIISP

SEQ ID NO: 197332 - protein, 285 aa, Unknown
  Bacterial polypetide isolated from the Sargasso Sea
SVTAALLIKAIGNKLICVFVDNGLLRKGEPDEVMNTFKKNMNLNVIKSNSEDIFLRHLEGVEDPEQKRKIIGRTFIDVFDAEANKLKEINFLAQGTIYPDVIESSGSESKEARVIKSHHNVGGLPDEMNMELVEPLRDLFKDEVRKLGVELGLPKEMLNRHPFPGPGLGVRILGEVTKEKTTILKEADHIFIEELIRADLYRMVSQAFAVFLPIKSVGVVGDERRYAEVIGLRAVETVDFMTARWAHLPYDFLEHVSSRIVNEIEQVSRVVYDISSKPPATIEWE

SEQ ID NO: 197333 - protein, 256 aa, Unknown
  Bacterial polypetide isolated from the Sargasso Sea
GEVDEVMSTFEALDIDIRLVDASELFLSKLSGVTDPEQKRKIIGNTFIDVFEIEANKIKDVDWLAQGTIYPDVIESSSDDHNSSVIKSHHNVGGLPDRMNLKLLEPIRELFKDEVRKIGAELNTPEHILLRHPFPGPGLGIRIMGDINKERIDILQKADKIFIDELKANNLYDSLSQAFVVYLPVKSVGVVGDERRYEDVLALRAIETVDFMTANWAHLPYDFIGKVSNRIVNEISSISRVVYDCTGKPPATIEWE

SEQ ID NO: 197334 - protein, 259 aa, Unknown
  Bacterial polypetide isolated from the Sargasso Sea
MSHSDEVTKLPKDFKIIAKSSNSKLCIVENTKKNLYGIQFHPEVTHTNKGKIILKNFVFHICKLKKNWSIKNQKTRLIKKIKNQVGNSKVICALSGGVDSSVVAKLLANAIGKKLICVFVNTGLLRKNEEHQVINTFKKKLKINLIYVNAEKEFLSKLKNISDPEKKRKIIGNLFIKIFEKYAKKIQNVKFLAQGTLYPDLIESKSVTGSQTSKIKSHHNVGGLPKKMNLRLVEPLKYLFKKEVRKLGLELNLSKENYL

SEQ ID NO: 197335 - protein, 295 aa, Unknown
  Bacterial polypetide isolated from the Sargasso Sea
MSHQDAVIKLPKNFIKIASTNNSALSVIENRENKIYGIQFHPEVTHTNRGKIIFRNFIYNVCKVKKNWKAGLEKKRIINEIRKEVKNNKVVCALSGGVDSSVVALIINEAIGSKLKCIMVDTGLMRKNEFKFTSKIFKKKYKLNIKIINAKKIYLNKLKNVQDPEKKRKIIGNLFIKIFEKEAKKFKNVKYLAQGTLYPDVIESQSATGSKTSKIKSHHNVGGLPKKMKLKLLEPLREFFKDEVRSLAKSLDLIPSIRNKHPFPGPGLAIRIIGKVSENKVKILQEADNIFINEL

SEQ ID NO: 197336 - protein, 219 aa, Unknown
  Bacterial polypetide isolated from the Sargasso Sea
REFIRVFEEESNRLGPFQYLAQGTLYPDVIESAGTNLDPKTGERIAVKIKSHHNVGGLPKDLQFKLVEPLRKLFKDEVRKVGGALGLPDEIIKRHPFPGPGLAIRILGAVSHEKLNCLRDADWIVRDEIKKAGLYNDIWQAFAVLLPVKTVGVMGDKRTYAWPIVLRCVSSEDGMTADWSRIPYEILERISNRIVNEVEQVNRVVFDITSKPPGTIEWE

SEQ ID NO: 197337 - protein, 195 aa, Unknown
  Bacterial polypetide isolated from the Sargasso Sea
WLAQGTIYPDVIESAASKTGKAHVIKSHHNVGGLPEEMKMGLVEPLRELFKDEVRRVGLELGLPYDMLYRHPFPGPGLGVRVLGEVKKEYCDLLRKADAVFIEELRKADLYNQVSQAFAVFLPVRSVGVMGDGRKYDWVIALRAVETIDFMTAHWAHLPYDFLGHVSNRIINEINGISRVVYDVSGKPPATIEWE

SEQ ID NO: 197338 - protein, 267 aa, Unknown
  Bacterial polypetide isolated from the Sargasso Sea
GKSKVICALSGGVDSSVVAKLIHNAVGKQLTCIFVNTGLLRKNEEIQVVKTFKKKFKINLIYVNAKKLFLRRLKKVTDPEKKRKIIGKLFIKIFEKYAKKIKKVKYLAQGTLYPDLIESKSVTGSQTSKIKSHHNVGGLPKKMKLKLVEPLRLLFKDEVRKLGLELKLSKQIVLRHPFPGPGLAIRMPGEITENKIKILKEADYIFINSLREHNLYNKIWQAYAALLPVKTVGVMGDNRTYEYMCLLRAITSEDGMTADFFSFSKEF

SEQ ID NO: 197339 - protein, 257 aa, Unknown
  Bacterial polypetide isolated from the Sargasso Sea
KSVWMSHEDAVVKLPKNFKIIAYTKDSKLTIIENSKKKIYGVQFHPEVTHTDNGKQLFKNFLFLICKVKKKWNVISQKRRLIKDIKNVTKNNKVICALSGGVDSSVVALLVHKAIKKNLICIMVDTGLMRKNEFKITYKLFKKKYKLNVKLVDSSNLFIKKLKNVINPEKKRKIIGQLFIKIFEKEARKFKNVKYLAQGTLYPDIIESRSSSGSKTSKIKSHHNVGGLPKKMNLKLIEPLKEFFKDEVRVLGNSLGL

SEQ ID NO: 197340 - protein, 261 aa, Unknown
  Bacterial polypetide isolated from the Sargasso Sea
MSLNYKIDKILIIDFGSQFTQLIARRIRELGVFSEIISHKKVKNKDINNSIKGIVLSGGPLNVYQINKYSFDKKIIENQIPVLGICFGHQIISKLSGGRVKHSKHREFGLVNIIKKKDSPLIKNFFKNKKNNVWMSHADQVSKLPKNFTVIASSQNSKFAIVENKLRKLYGVQFHPEVTHTENGIKIIGNFIFDICRIKKNWSSKDQKNRLIKDVREIVGNNKVICALSGGVDSSVVAQLLNKAIWEKLYCVFVNTGLLRK

SEQ ID NO: 197341 - protein, 304 aa, Unknown
  Bacterial polypetide isolated from the Sargasso Sea
SNDWEVVAYSSNNIVAAIASNDNLRFATQFHPEVSHTEEGDILLNNFLFHISDCDKNWTAGNFVNEEISSLKNKIGKDRILVGASGGVDSTVVASLINKAVGGKCLAVLIDHGLMRKNEARDCVNALKQGLGMNIHLYDESEVFFSRLKGIKDPEEKRKVIGDQFIQSFDRIASEIGKFKFLGQGTLYPDIIESGVSAGKSAHVIKSHHNVGGLPEKMNFELIEPLKDLFKDEVRKVGSELNISDELTKRHPFPGPGLAVRIIGEITKERVSILQEADEIFINVLKEEQEYDNIWQAFAVLIPV

SEQ ID NO: 197342 - protein, 193 aa, Unknown
  Bacterial polypetide isolated from the Sargasso Sea
KIKSKKINVWMSHGDHVSKLPKGFKSCATTSNSPIAALYHPTKKIFGLQFHPEVTHTPQGKQILKNFVREISNCKGLWNSKNIITKAVEEIKREVGDQEVLLGLSGGVDSAVVAALLSKAIGDQLTCIFVDNGLLRLNEGDQVMNTFKDRFGIKVKRANAGNQFLKDLKGKRDPEHKRKAIGKTFIDVFLKEA

SEQ ID NO: 197343 - protein, 200 aa, Unknown
  Bacterial polypetide isolated from the Sargasso Sea
MTKLSVEDKKIDTILVLDFGSQYTQLIARRIRESNVYSEILPWDIDESKIIDLNPKGIILSGGPNSVTESYTPRLPQSVFDLGIPILGICYGMQTLAEQMGGHVISSDQKEFGHSELTIVKDSVLFKNLKKQINVWMSHGDQVQDIPDEFDLIAATETAPISAMEHINLPIYAIQFHPEVTHTEDGKTILDNFIFEICGA

SEQ ID NO: 197344 - protein, 278 aa, Unknown
  Bacterial polypetide isolated from the Sargasso Sea
THLSQIIERNPSAIILSGGPSSVFGDEAPIFDKKIFDIDVPILGICYGLQLLAHHHGGLVESNGQGEYGFAEIEIDDDKKLFQNVPKFSEVWMSHMDRVTKLPDGWHTLAHSSNGVIAAMANKDETRVATQFHPEVIHSKEGKNILKNFLFNISNCYANWTAENFVEQKVKLIREEVGKSNILVGVSGGVDSTVVAALMNKAVGPQCNAVLIDHGLLRKDEAENCVTALKEGLGVNIHCYNESKIFLSKLKGVTDPEKKRKVIGNQFIFAFEKISKEF

SEQ ID NO: 197345 - protein, 262 aa, Unknown
  Bacterial polypetide isolated from the Sargasso Sea
MSLDQNLDKILIIDFGSQFTQLIARRIRELGVFSEIVSHKKIKNKDIDNSIKGLILSGGPLNVYEINKYSFDKKIIKNQIPVLGICFGHQILSKLSGGQVKQSKHREFGLANIYKKKDSLLTKKLFDNKKKIKVWMSHADQVSKLPRNFKVIASSQNSKFAIVENKSKKFYGVQFHPEVTHTENGKKLIRNFIFLICRIKKNWSSKDQKIRLIKDIRNQVMNNKVICALSGGVDSSVVAQLLNKAIGKNLYCIFVNTRTSKE

SEQ ID NO: 197346 - protein, 232 aa, Unknown
  Bacterial polypetide isolated from the Sargasso Sea
MTLEPNLNKILIVDFGSQFTQLIARRIRELGVFSEIISHKKIKKKYIGEGVKGIILSGGPLNVYENKKYSFDKDIIESNVPVLGICFGHQIISKVNGGKVKQSKHREFGLANIKKKMESPLTKNFFKGKKLIKVWMSHADQVSKLPKNFEVIASSQNSKYAIVENKIKKLYGVQFHPEVTHTQNGKKILSNFVFFICKIKKNWSSRDQKKKLITDIRRTVEKIKLFVHFLEV

SEQ ID NO: 197347 - protein, 216 aa, Unknown
  Bacterial polypetide isolated from the Sargasso Sea
SQKKRIILDIKKVVKNERVLCALSGGVDSSVVALLINRAIKKNLICIMVDTGLMRKNEFKYTYKIFKNKYKFNVKLINASSIFLKKLKDISDPETKRKIIGKLFIKIFERESKKIKNVKFLAQGTLYPDVIESKSATGSKTSKIKSHHNVGGLPKRMNFKLIEPLREFFKDEVRILGKSLGLSKDIYNRHPFPGPGLAIRILGKISSEKIKILQEA

SEQ ID NO: 197348 - protein, 225 aa, Unknown
  Bacterial polypetide isolated from the Sargasso Sea
YFLKTLSPKAIILSGGPKSVNEQHSPKVNSVVYKLGIPILGICYGQQLMMHQLGGKVQNSKFSSEFGRAFLKLKKETKLLEGWFNDSKEVVWMSHGDHVSKIAPGFEVFAISKNAPLAVVADIKRNFYGVQFHPEVHHTPKGIVLFENFLKIAGFNGDWTMQAYKKEMIQNIKDIVKKDRVICGISGGVDSTVTATLLHKAINKQLTCIFVNHGFLRKYEEKEVL

SEQ ID NO: 197349 - protein, 148 aa, Unknown
  Bacterial polypetide isolated from the Sargasso Sea
MSLDQNLNKILIVDFGSQFTQLIARRVRELGIFSEIVSHKKIKSKNINHTIKGIILSGGPLNVYQINKYSFDKKIIQKDVPVLGICFGHQIISKLNGGKVKQSKHREFGLANITKKNNSLLIKNLFKKKKSIKVWMSHADQVQNTQKF

SEQ ID NO: 197350 - protein, 242 aa, Unknown
  Bacterial polypetide isolated from the Sargasso Sea
MSLEDNLNKILIIDFGSQFTQLIARRIRELGVYSQIISHKKINNHILKTKNIIGIILSGGPLNVYEVKKVKFNKKILNSKVPILGICFGHQIIAKEFGGSVNKSKVREFGLANIKRIKKSILTRNFFNRNGLNNVWMSHSDEVTKIPKGFKVIASSKNSKFAAIENKSKNFYGIQFHPEVTHTHNGKKLIKNFIFSICKAQRNWSSKIQKKIIINNVKNSVGTSKVICALSGGVDSSVVAKL

SEQ ID NO: 197351 - protein, 200 aa, Unknown
  Bacterial polypetide isolated from the Sargasso Sea
LAQGTLYPDVIESAGTNIDPKTGERIAVKIKSHHNVGGLPKDLQFKLVEPLRNLFKDEVRKVGAALGLPDEIVKRHPFPGPGLAIRILGEVNNEKLDCLRDADWIVRDEVKKAGLYNDIWQAFAVLLPVKTVGVMGDKRTYAWPIVLRCVSSEDGMTADWSKIPFQILERIANRIVNEVSSVNRVVYDITSKPPGTIEWE

SEQ ID NO: 197352 - protein, 120 aa, Unknown
  Bacterial polypetide isolated from the Sargasso Sea
PGLAIRILGEVTNEKLDCLRDADWIVRDEIKKAGLYNDIWQAFAVLLPVKTVGVMGDKRTYAWPIVLRCVSSEDGMTADWSKIPFQILERISNRIVNEVVSVNRVVYDITSKPPGTIEWE

SEQ ID NO: 197353 - protein, 265 aa, Unknown
  Bacterial polypetide isolated from the Sargasso Sea
MSLEQNLNKILIIDFGSQFTQLIARRVRELGVFSEIVSHKKIKLKDINSSIKGVILSGGPLNVYQINKYSFDKKILQFDLPVLGICFGHQILSKLNGGRVKQSKHREFGLANVFKKNNSLLTSNFFGNKKSKQVWMSHADQVSKLPKNFKVIASSTNSKFAIVENKIKKYYGVQFHPEVTHTENGKKLISNFIFLICKIKRNWSSKHQKNQLIKDVRKQVGNNKVICALSGGVDSSVVAQLLNKAIGKKLYCIFVNTGLLRKNEE

SEQ ID NO: 197354 - protein, 116 aa, Unknown
  Bacterial polypetide isolated from the Sargasso Sea
MAKNILADKILIIDFGSQYTQLIARRVRELGVYCEIYNHRASLKSIKDFNAKGIILSGGPETVKQKGSPKIPDKVFDLGIPLLGICYGMQSIAKQLKGKVELADKRELDMLIYCEK

SEQ ID NO: 197355 - protein, 215 aa, Unknown
  Bacterial polypetide isolated from the Sargasso Sea
IGNLFIKIFERYAKKIKDVKFLAQGTLYPDLIESKSVTGSQTSKIKSHHNVGGLPKKMNLKLVEPLKFLFKDEVRKLGLELKLSKEIISRHPFPGPGLAIRMPGKITNEKIKILKEADYYFIQALKDRGLYHKIWQAYAALLPVKTVGVMGDNRTYEYLCLLRAITSEDGMTADFFEFRKSFMQTISNKIVNSIRGINRVVYDVTSKPPSTIELE

SEQ ID NO: 197356 - protein, 275 aa, Unknown
  Bacterial polypetide isolated from the Sargasso Sea
MNKILIIDFGSQFFQLIARRIRESGVYSEIISHKKVKNKNIDNSIKGIILSGGPLNVYQINKYSFDKRIIENQIPVLGICFGHQILSKLNGGRVKQSKYREFGLANIRKKRESILTKNFFNKKNINKVWMSHADQVSKLPKNFDVIASSQNSKFAIIENKKKKFYGVQFHPEVTHTENGKKLINNFIFLVCKIKRNWSSKDQKIKLIKDVQNLVGKNKVICALSGGVDSSVVAQLLNKAIGKKLFCIFVNTGLLRKNEEIQVVKTFKKKLKINLI

SEQ ID NO: 197357 - protein, 263 aa, Unknown
  Bacterial polypetide isolated from the Sargasso Sea
GLLRKNEEVQVVQTFKKRLKMNLIYVNAEKEFLKKLKNVSDPEKKRKIIGNLFIKIFERYAKKIKNVKFLAQGTLYPDLIESKSVTGSQTSKIKSHHNVGGLPKKMNLKLVEPLKFLFKDEVRKLGLELNLTKEIISRHPFPGPGLAIRMPGIITNVKIKILKEADYYFIQALKDHGIYHKIWQAYAALLPVKTVGVMGDNRTYEYLCLLRAITSEDGMTADYYEFKKSFMQSISNKIVNSIRGINRVVYDVTSKPPSTIELE

SEQ ID NO: 197358 - protein, 199 aa, Unknown
  Bacterial polypetide isolated from the Sargasso Sea
DLKFYAVQFHPEVVHTPDGGKLLTNFAHNICGCRGTWTMSAFKDEAVQKIRDQVSDGKVICGLSGGVDSSVVAVLLHEAIGDQLQCVFVDHGLMRINEPDEVVRLFRDHFNIPLVHRDASTLFIDALEGVTDPEVKRKIIGKLFIDVFEEEAKNIGGAKFLAQGTLYPDVIESVSFTGGPSVTIKSHHNVGGLPERMNM

SEQ ID NO: 197359 - protein, 270 aa, Unknown
  Bacterial polypetide isolated from the Sargasso Sea
KYLELNIPILGICFGHQILSKLNGGSVRQSKHREFGLANIFKKRDSLLTKNFYGVKKTKEVWMSHADQVSKLPKNFQVIASSTNSKYAIVENKLKKYYGIQFHPEVTHTENGKKLISNFVFLICKIKKNWSSKDQKIKLIKEIRDQVGTHKVICALSGGVDSSVVAQLLNKAIGKKLYCIFVNTGLLRKNEETQVVRTFKKKLKMNLIYVNAEKQFLGKLKNVSDPEKKRKIIGNLFIKIFERYAKKIKNVKFLAQGTLYPDLIESKSVT

SEQ ID NO: 197360 - protein, 275 aa, Unknown
  Bacterial polypetide isolated from the Sargasso Sea
MGKKLYCIFVNTGLLRKDEEKQVVRTFKKRLKINLIYINAEKEFLRKLKNVSEPEKKRKIIGNLFIKIFERYAKKIKNVKFLAQGTLYPDLIESKSVTGSQTSKIKSHHNVGGLPKKMNLKLVEPLKFLFKDEVRKLGLELKLNEEIISRHPFPGPGLAIRMPGIITNEKIKILKEADYYFIKALRDHGLYHKIWQAYAALLPVKTVGVMGDNRTYEYLCLLRAITSEDGMTADFFEFRKSFMQTISNKIVNSIRGINRVVYDVTSKPPSTIELE

SEQ ID NO: 197361 - protein, 246 aa, Unknown
  Bacterial polypetide isolated from the Sargasso Sea
KFKLNLIYINAEKDFLKKLKNVIDPEKKRKIIGNLFIKIFEKCAKKIKNVKFLAQGTLYPDLIESKSVTGSQTSKIKSHHNVGGLPKKMNLKLVEPLKYLFKDEVRKLGLELNLSKEIISRHPFPGPGLAIRMPGIITKDKIKILKEADYYFIKSLKENNLYDKIWQAYAALLPVKTVGVMGDNRTYEYLCLLRAITSEDGMTADFFEFKKSFMQSISNQIVNNIRGINRVVYDITSKPPSTIELE

SEQ ID NO: 197362 - protein, 232 aa, Unknown
  Bacterial polypetide isolated from the Sargasso Sea
MTKDIHQHRILILDFGSQYTQLIARRVREIGVYCELWAWDVTEEQIREFNPSGIILSGGPESVTEAGSPRAPEYVFNAGVPVFGICYGMQTMAEQLGGKVQSSTEREFGYAKVEVLGNSGKTSALLRNIEDAIADNGNALLDVWMSHGDKVTTIPADFTTIAQTATCPHAAMANEAKRFYGVQFHPEVTHTRQGARMLEHFVKDICGCECLWTPATIIDDAVARIREQVGDD

SEQ ID NO: 197363 - protein, 264 aa, Unknown
  Bacterial polypetide isolated from the Sargasso Sea
MIFIVDFGSQVTQLIARRVREAGVYCEIVSSKSIYKQILNRGCSGIVFSGGPASVHKSNTPKIDKRIFNLNIPILGICYGMQLLCYQLGGKVKISKKREFGKTLIKPSKKSVLFSGFRKGMSSNYVWMSHGDKVISLPRDFKSIASSSNTKFAAVENKKKSYYGLQFHPEVVHTPNGHKIIENFIFKICKVKRNWSMKNHLRNQITEIQHSVHKDQVICGLSGGVDSTVTAAIISKAINKQLTCIYVDTGLMRLNETKEVVKMF

SEQ ID NO: 197364 - protein, 104 aa, Unknown
  Bacterial polypetide isolated from the Sargasso Sea
TAQDAAAGLCGEGDVGKSWYDLTSQAFAVFLPIKSVGVMGDGRTYDYVTALRAVQTTDFMTAHWAHLPYTLLGRVSNRIINEVRGLSRVVYDVSGKPPATIEWE

SEQ ID NO: 197365 - protein, 289 aa, Unknown
  Bacterial polypetide isolated from the Sargasso Sea
DDLIDQRVKEIKNQVGDNKVLLGLSGGVDSSVTAALLHKAIGKKLVCVFVDNGLLRKGEAEEVMNTFKENMNLNVIKSDSEEVFLRHLKDVDDPEQKRKIIGRTFIDVFDAEAKKLTEVHFLAQGTIYPDIIESSGSESKEARVIKSHHNVGGLPEEMKMELVEPLRDLFKDEVRRMGAELGLSKEILNRHPFPGPGLGVRILGDITKEKITILKNADHIFIEELIKADLYNKVSQAFAVYLPIKSVGVVGDERRYAEVIGLRAVETVDFMTARWAHLPYDFLEHVSNT

SEQ ID NO: 197366 - protein, 192 aa, Unknown
  Bacterial polypetide isolated from the Sargasso Sea
QGTLYPDLIESKSVTGSQTSKIKSHHNVGGLPKKMNLKLVEPLKFLFKDEVRKLGLELNLSKEIISRHPFPGPGLAIRMPGIITNEKIKILKEADYYFIQALKDHGLYHKIWQAYAALLPVKTVGVMGDNRTYEYLCLLRAITSEDGMTADYYEFKKSFMQTISNKIVNSIRGINRVVYDVTSKPPSTIELE

SEQ ID NO: 197367 - protein, 270 aa, Unknown
  Bacterial polypetide isolated from the Sargasso Sea
VCIFVDNGLLRLNEGDQVMETFSEHMNLNVIRVNAEDIFLERLKGIDDPEDKRKIIGRTFIEVFEDEASKLENVKWLAQGTIYPDVIESAGSKTGKAHVIKSHHNVGGLPEDMKLKLVEPLRDLFKDEVRKIGKELGLTSKLVDRHPFPGPGLGVRILGEVKKEYADLLRLADDIFIEELHKENLYDKVSQAFAVFLPVKSVGVMGDGRKYEYVIALRAVETTDFMTANSAKLPYEFLDHVSTRIINEVSGISRVTLDISSKPPSTIEWE

SEQ ID NO: 197368 - protein, 181 aa, Unknown
  Bacterial polypetide isolated from the Sargasso Sea
AGSKTGKAHVIKSHHNVGGLPEDMKLKLVEPLRDLFKDEVRKIGKELGLSSKLVDRHPFPGPGLGVRILGEVKKEYADLLRLADDIFIEELHKENLYDKVSQAFAVFLPVKSVGVMGDGRKYEYVIALRAVETTDFMTANSAKLPYEFLDRVSTRIINEVSGISRVTLDISSKPPSTIEWE

SEQ ID NO: 197369 - protein, 273 aa, Unknown
  Bacterial polypetide isolated from the Sargasso Sea
DQLTCIYVDTGLMRENETDEVVNLFRENFNIPLIDVDAGDTFLTRLTGVSDPEEKRKIIGSSFIDIFEEEANKIGGADFLAQGTLYPDVIESVSFTGGPSVTIKSHHNVGGLPERMNMELVEPLRELFKDEVRELGKELGIPSHFIERHPFPGPGLAIRLPGEISSEKADILRKADTIYIEEIRKAGLYNEIWQAFAVLLPVQTVGVMGDERTYDFVCALRAVTSLDGMTADYYPFEQEFLANVSTRIINEVKGINRVVYDITSKPPGTIEWE

SEQ ID NO: 197370 - protein, 133 aa, Unknown
  Bacterial polypetide isolated from the Sargasso Sea
KNNSQVWMSHGDTIISEPSDSSIICSTKDVRVAGFKINNEETYGIQFHPEVYHTEGGLSIMKNFIVTICNCSQEWTPFSFVEETVSKLKNKLGSDSVIMGLSGGVDSTVASVLLHKAIGEKLHCIFVNNGLVR

SEQ ID NO: 197371 - protein, 260 aa, Unknown
  Bacterial polypetide isolated from the Sargasso Sea
MKHEKNIKDNLRISTSDDIELGTYLEIAKSHTLKGTSPEIDSKNQTIVIFDFGSQYSRLIARRVRELNTFCEIINFDSDPSIMNEQNVIGFIFSGGPNSVYDKNAPLAPNWVYASNKPILGICYGMQILAHQLGGKVVPGQKKEYGHTVIHKNKNSKILAEIADDVTVWMSHGDRIESKPIGFETIAFSDNSPNAIISDENKMYYGIQFHPEVVHTPNGTEILKNFIFKICNSSGSWTSKNFVSQTVKNIKQRIGNDKVI

SEQ ID NO: 197372 - protein, 155 aa, Unknown
  Bacterial polypetide isolated from the Sargasso Sea
ELVEPLRELFKDEVRELGKELGIPSHFIERHPFPGPGLAIRLPGEISPEKADILRKADTIYIEEIRKAGLYNEIWQAFAVLLPVQTVGVMGDERTYDFVCALRAVTSLDGMTADYYPFEQEFLANVSTRIINEVKGINRVVYDITSKPPGTIEWE

SEQ ID NO: 197373 - protein, 272 aa, Unknown
  Bacterial polypetide isolated from the Sargasso Sea
KLTCVFVDNGLLRKGESDQVMQTFKENMNLNVIKSDSQDIFMRHLENIDDPEQKRKIIGRTFIDVFDAEAIKLKDIKFLAQGTIYPDVIESSGSESNEARVIKSHHNVGGLPEEMELDLVEPLRDLFKDEVRRMGLELGIPKEMLERHPFPGPGLGVRIIGEITVEKTLILQEADNIFIEELIKADLYDKVSQAFAVLLPVKSVGVVGDERRYAEVIGLRAVETVDFMTARWAHLPYEFLEHVSNRIVNEIEQVSRVVYDISSKPPATIEWE

SEQ ID NO: 197374 - protein, 283 aa, Unknown
  Bacterial polypetide isolated from the Sargasso Sea
MNLDQNLDKVVIIDFGSQFTQLIARRIRELGVFSEIVSHKKIRTSDINQSVRGIILSGGPLNVYQINKYSFNKKILELNIPILGICFGHQILSKLNGGRVRQSKHREFGLANIFKKRDSLLTKNFYGVRKTKEVWMSHADQVSKLPKNFQVIASSTNSKYAIVENKLKKYYGVQFHPEVTHTQNGKKLISNFVFLICKIKKNWSSKDQKIKLINEVRDQVGSHKVICALSGGVDSSVVAQLLNKAIGKKLYCIFVNTGLLRKDEEIQVVRTFKKQLKMNLIYV

SEQ ID NO: 197375 - protein, 242 aa, Unknown
  Bacterial polypetide isolated from the Sargasso Sea
MNNGIIILDFGSQYNQLIGRRIREMGVYSEILPFNTPLETILEKQPKGIILSGGPSSVNAENAHLVEKELYEQGIPILGICYGMQLTAHLLGGKVHKGVKGEYGKAHLEIVNESSLLKGVTNNSIVWMSHFDEVGMLPPGFELNAQSGVIASIANEEKKIYCVQFHPEVSHTEEGGKMLENFVFGICDAEKNWKLTNYIEKTVAEIRERVGDQKVILGLSGGVDSSVAAVLIHKAIGGSVNL

SEQ ID NO: 197376 - protein, 193 aa, Unknown
  Bacterial polypetide isolated from the Sargasso Sea
MSLHDDRLLILDFGSQYTQLIARRVREHGVYSEILPCDVDPLRIQSSSPKGVILSGGPESTTDVAGWKIPKEVYDLNVPVLGICYGMQALAQELGGRVESSDLREFGHADLVIEREESLLTGVSDTGSLSVWMSHGDRVTELPPGFKVIGSSDHAPIAAMADEERAIYGLQFHPEVTHSEGGSEILAKFAHAI

SEQ ID NO: 197377 - protein, 164 aa, Unknown
  Bacterial polypetide isolated from the Sargasso Sea
GGLPKNMKLKLVEPLRLLFKDEVRKLGLELKLSKEIVLRHPFPGPGLAIRIPGEITENKIKILQEADDIFINSLREHNLYSKIWQAYAALLPVKTVGVMGDNRTYEYMCLLRAITSEDGMTADFFNFSKEFMQLVSNKIINNINGINRVVYDITSKPPSTIELE

SEQ ID NO: 197378 - protein, 245 aa, Unknown
  Bacterial polypetide isolated from the Sargasso Sea
LKKIKSFQKIKGLILSGGPATVTKKSFPKIPMYIFSKNIPILGICYGLQLIAKSFGGKVKSGNKKREFGRAILKKNNNSLLTKNFFKKNKTKVWMSHQDTVYKIPKGFNKIASTKDSALTIIENKEKKLFGIQFHPEVTHTDKGDILIKNFVYLICKVKKNWKMNYEKDRIIKSIKEKVKKQKVICALSGGVDSSVVAILVHKAIKNNLRCIMVDTGLLRKNEFRYTYKILKNKYKLNIKLVKAS

SEQ ID NO: 197379 - protein, 189 aa, Unknown
  Bacterial polypetide isolated from the Sargasso Sea
KFNSKILKLGIPVLGICFGHQIISKELGGRVKNSKFREFGLAEVEEVKKSILTKNFFFKGKNNVWMSHADQVTKLPKNFYVLAKSKNSKLCIIENLEKKFFGIQFHPEVSHTNKGKQILKNFVFSICKIKRNWSSIDQKKKLINEVRNLVGDSKVICALSGGVDSSVVAKLLSNAIGKKLTCIFVNNRP

SEQ ID NO: 197380 - protein, 133 aa, Unknown
  Bacterial polypetide isolated from the Sargasso Sea
MDLNNNLNKILIIDFGSQFTQLIARRIRELGVYSEIISHKKLNSKLNKSRIRGIILSGGPLNVYQSKKVKFRKELFEWNIPILGICFGHQVISKELGGKVKKAKHREFGLAKLKRINKSKLTQNFFNKNGLNK

SEQ ID NO: 197381 - protein, 299 aa, Unknown
  Bacterial polypetide isolated from the Sargasso Sea
LSGGPNSVTDSYTPRIPQCIFELNIPILGICYGMQTMAEQMGGQVVSVDKKEFGHTNLDVENDSVLFKDINKTINVWMSHGDQVQDLPDEFDLIASTKTAPIAAMQHKNLPIYAIQFHPEVTHTQDGHVLLDNFIFEICHARSDWKMDDLISSRIKEIKEQVQDNKVLLGLSGGVDSSVTAALLHKAIGKKLVCVFVDNGLLRKGEAEQVMQTFKENMQLNVVKSDSQDTFLRHLKEIEDPEQKRKIIGRTFIDVFDAEAMKLKDIRFLAQGTIYPDVIESSGSESKEARVIKSHHNVG

SEQ ID NO: 197382 - protein, 167 aa, Unknown
  Bacterial polypetide isolated from the Sargasso Sea
MPANLSSTSKIIDTILVLDFGSQYTQLIARRVRDSNVYSEILPWDVDEKKIQSINPKGIILSGGPDSVTESYTPRIPQIIFDLNIPILGICYGMQTLAEQFGGQVISSEFKEFGYSELKVKTDCVLFSNLDKTLNVWMSHGDQVQDLPDNFELVAASTSAPIAAMQH

SEQ ID NO: 197383 - protein, 164 aa, Unknown
  Bacterial polypetide isolated from the Sargasso Sea
GGLPKEMKLGLVEPLQELFKDEVRRLGKELKLPKEFIQRHPFPGPGLGIRILSDITKDKVRMLQHADKIYIDEIKAANLYNEIWQAFAVLLPVRTVGVMGDQRSYEFVCGLRAVTSVDGMTADFYPFSGEFLSKVSTRIINEVKGINRVVYDTTSKPPGTIEWE

SEQ ID NO: 197384 - protein, 155 aa, Unknown
  Bacterial polypetide isolated from the Sargasso Sea
MDIHVNQILILDFGSQYTQLIARRVRESGVYCEIHPWDQDEKILQNFKPAGIILSGGPESVNLDNPPTAPEFLFNLSIPILGICYGMQTMAKQLGGKVEASSEREYGYAEVEPSNSFLLNGLSDNDTGLLKVWMSHGDRVESIPEGFVASASSKN

SEQ ID NO: 197385 - protein, 288 aa, Unknown
  Bacterial polypetide isolated from the Sargasso Sea
VISVPPGFSVVGSSVNSSVAMMANEERNLFGLQFHPEVHHTKQGKAILEQFVKAVCACETLWNPTNIVEDLVEKIREQVAGKKVLLGLSGGVDSSVVAALLARSIGDQLICVFVNNGLLRFDEVEQVQKMVEKGFGSGSSFDLRVVDAEDVFLDRLAGINDPEKKRKIIGNTFIEVFEKEAASLSDIKFLAQGTIYPDVIESAAGKGGKAHVIKSHHNVGGLPRNMSLELVEPLRQLFKDEVRELGTQLGLPSSMINRHPFPGPGLAVRILGEVKSEYLSVLRKADKI

SEQ ID NO: 197386 - protein, 276 aa, Unknown
  Bacterial polypetide isolated from the Sargasso Sea
GISGGVDSTVTAVLLHKAIKKQLTCIFVNHGFLRKNEENEVLEMFKNDIKIPLIYADESDLFLRELEGISDPEVKRKKIGKLFINVFEKYAQKIKGAKFLGQGTLYPDVIESISVHGGESETIKSHHNVGGLPKKMGLKLIEPLKEIFKDEVRDLGREMGINKNFLNRHPFPGPGLAIRCPGKITKKKLEILKNADHIFIEQIRKYGLYDKIWQAFVAILPIKTVGVMGDKRTYDFACTLRAVTSVDGMTADYYPFEHEFLRDTSTRIINGSKRNK

SEQ ID NO: 197387 - protein, 284 aa, Unknown
  Bacterial polypetide isolated from the Sargasso Sea
YSEVCPWDEIPDLSGVKGFILSGGPESSNIEGNPSIHQQIFDTKKPILGICYGMQVLAHQEEGRIINEGKREFGYAKIDIKQDSILFKNFDKSQDVWMSHGDKVESLPDGYNITAVSNNSPVAAYENIAKKYFGLQFHPEVTHTESGTTIIKNFLEICDIEQNWSADDILQQINALVKTEVKDGEVLLALSGGVDSTVLAAVLHKTLGNKLTCVMVDHGLLRKDEALNVVNNLKEKIGLSVNLVNAQDTFLSKLKGITDPEEKRKTKGNTFIEVLKARAKNKRY

SEQ ID NO: 197388 - protein, 302 aa, Unknown
  Bacterial polypetide isolated from the Sargasso Sea
MQFQKIKEKILIVDFGSQVTKLIARRIRDLGVYSEILTPNEIKKIKDFKRIKGIILSGGPSTVTTQRFQTIPTEIFSKQIPILGICYGLQLIAKIFGGKIKPSKKRREFGRAYIYKKKKSILTKNFFSPNCSVWMSHQDAVVKLPKDFKLIAYTTDSKLSIIENSKKKIYGVQFHPEVTHTDKGKQLFKNFLFSICKIKKKWNVVSQKKRLIYEIRKTVKKDKVICALSGGVDSSVVALLINKAIEKNLICIMVDTGLMRKDEFKTSYKVFKKKHKFNIKLINASHIFLKKLKNVSNPRKKK

SEQ ID NO: 197389 - protein, 80 aa, Unknown
  Bacterial polypetide isolated from the Sargasso Sea
MGKNLLKKERDPSILILDFGSQYSELIARRIREANVFSLVVTNLISINEIQKINPQGIILSGGPNSVYENFAPKCDDKIF

SEQ ID NO: 197390 - protein, 253 aa, Unknown
  Bacterial polypetide isolated from the Sargasso Sea
VEQVFRDRFNISLLVRDAKNMFLDQLQGVSDPETKRKIIGGTFIDVFEEEAAKIGGADFLAQGTLYPDVIESVSPFGGPSATIKSHHNVGGLPERMNMELVEPLRELFKDEVRDLGRELGIPHEIVGRHPFPGPGLAIRVPGDFDREKLEILRQADAIYLEEIRKAGLYDSIWQAFAVLLPVRTVGVMGDARTYDHVCALRAVTSTDGMTADSYPFEHAFVAGVATRIINEVRGINRVVYDVTSKPPGTIEWE

SEQ ID NO: 197391 - protein, 265 aa, Unknown
  Bacterial polypetide isolated from the Sargasso Sea
VYNEDAPKPDEELFNFDLPLLGICYGHQLIVNKFGGKVKRANKEYGSSLLSMDKNSGLLDGIGESIRAWMSHGDEAEEIPANFEVIGHTENSHAAAIANTDRTVFGIQFHPEVVHTERGTDILKNFVLNVCKAKQEWTMEGFVEKTVKKISEIEGNVLCGVSGGIDSTVAALLIHKAIGNRQTGVFVDNGLLRLDESKEIEDMFKNNFSLNFHRIDASEQFLSKLKGITDPEQKRKIVGEEFIQVFTEFAKQKGPFKWLAQGTLY

SEQ ID NO: 197392 - protein, 284 aa, Unknown
  Bacterial polypetide isolated from the Sargasso Sea
KGIPILGICFGHQILSKLNGGKIKKSKHREFGLANIFKKNDSLLVKKFFKNKKFAKVWMSHADQVSKLPKTFKVVASSQNSKFAIVEDKSQKFYGVQFHPEVTHTEKGKIIISNFIFLICKIKKNWSVKNQKIKLIKEIKNQVGSNKVICALSGGVDSSVVAQLLNKSIGKKLYCIFVNTGLLRKNEEKQVLSTFKKKLKINLIYVNAEKEFIKKLKKVSDPEKKRKIIGNLFIKIFERYAKKIKNVKFLAQGTLYPDLIESKSVTGSKTSKIKSHHNVGGLPK

SEQ ID NO: 197393 - protein, 298 aa, Unknown
  Bacterial polypetide isolated from the Sargasso Sea
VHKISDCAADWTTETFLEETIPSIREQVGNKKVLLALSGGVDSSTLAFLLNKAIGNQLTCMFIDQGFMRKGEPEFLMNFFDKKFHIKVEYINARERFIAKLDGITDPEEKRKIIGEEFIRVFEEASKRLGPFQYLAQGTLYPDVIESAGTNIDPKTGERIAVKIKSHHNVGGLPKDLQFKLVEPLRKLFKDEVRKLGTVLGLPDEIIKRHPFPGPGLAIRILGEVTNEKLDCLRDADWIVRDEIKKAGLYNDIWQAFAVLLPVKTVGVMGDKRTYAWPIVLRCVSSEDGMTADWSKIP

SEQ ID NO: 197394 - protein, 309 aa, Unknown
  Bacterial polypetide isolated from the Sargasso Sea
KRNWEHENHLRNQITEIQHSVHKDQVICGLSGGVDSTVTAAIISKAINKQLTCIYVDTGLMRLNETKKVVKMFKRHFKSRLIVKDSRKTFIKALKGITDPEKKRKIIGNLFIKIFNQEANKIKRAKYLAQGTIYPDVIESQSFHGGPSSVIKSHHNVGGLPKRMKLKLVEPLRELFKDEVRKLGLEMRLPKKFINRHPFPGPGLGIRILGEVTADRVKILQEADNIYIEEIKEAGLYDKIWQAFAVLMPVKTVGVMGDHRSYEQVCGLRAVTSVDGMTADFYPFKGEFLSKVSTRIINEVKGINRVVYD

SEQ ID NO: 197395 - protein, 274 aa, Unknown
  Bacterial polypetide isolated from the Sargasso Sea
KGFSVIASTKNSKFAMIENYKKKIFGIQFHPEVTHTKNGKKILRNFVFSICKLKRNWSSKQQKTKLIKQVKNQVKNSKVICALSGGVDSSVVAKLLKEAIGNKLICVFVNTGLLRKAEEKQVVNTFKKKFKINLIYVNAKNMFLSKLKNVSDPEKKRKIIGNLFIKIFEKHARKVKKIKFLAQGTLYPDLIESRSVTGSQTSKIKSHHNVGGLPKKMKLKLIEPLKYLFKDEVRKLGLELKLEKEIILRHPFPGPGLAIRMPGIITDKKIKILQ

SEQ ID NO: 197396 - protein, 94 aa, Unknown
  Bacterial polypetide isolated from the Sargasso Sea
MSSHIEIATKFSEDNILIIDFGSQYTQLIARRVREEGVFCQIIPYNKVSKYIINNNPKGIILSGGPSSVLGIETPRISKEIIDMGKPILGICYG

SEQ ID NO: 197397 - protein, 314 aa, Unknown
  Bacterial polypetide isolated from the Sargasso Sea
GQALLRRFVVDVCGCQTLWTAANIIDDQIARVREQVGDDEVILGLSGGVDSSVVAALLHKAIGDKLTCVFVDTGLLRWQEGDQVMAMFAEHMGVKVIRVNAADRYFSKLEGVSDPEAKRKIIGNLFVDIFDEESNKLSNAKWLAQGTIYPDVIESAGSKTGKAHVIKSHHNVGGLPEHMKLGLVEPLRELFKDEVRRLGVELGLPRSMVYRHPFPGPGLGVRILGEVKREYAELLAKADAIFIDELRKADLYDKTSQAFAVFLPVKSVGVVGDARAYEWVIALRAVETIDFMTAHWAHLPYDFLGTVSNRIINE

SEQ ID NO: 197398 - protein, 265 aa, Unknown
  Bacterial polypetide isolated from the Sargasso Sea
GKKILKNFVRHISGCKGLWNSKNIIDRAVSEIREQVGDQEVLLGLSGGVDSAVVAALLSKAIGNQLTCIFVDNGLLRLNEGDQVMETFKGKFGIKVKRANAGNQFLRDLKGKKDPEQKRKAIGKTFIDVFLKEAKRNTKIQWLAQGTIYPDVIESAGTKNGSAHVIKSHHNVGGLPSYLNLPVIEPLKDLFKDEVRKIGLELGLPKEILLRHPFPGPGLGVRILGEIKRPYIKILQLADDIFISELVKDGYYEKVSQAFAVFLPG

SEQ ID NO: 197399 - protein, 225 aa, Unknown
  Bacterial polypetide isolated from the Sargasso Sea
MNNNLQKILIIDYGSQYTQLIARRIRELEVFCLVYPYHKITNKLLKDIKPSAFILSGGPKSVLDKKSPKLNQSIIRSNKPILAICFGMQLITKSLKGKVKKANNREYGHTLINIKNKSPIFRGIKKNRFKVWMSHGDNIYKIPNYFSISSLSDNNIISSIENIKNKIYCLQFHPEVYHTDNGLKIINNFVFNIVKIKIKFRLNKFIETKILELKNQLKDKKIICG

SEQ ID NO: 197400 - protein, 271 aa, Unknown
  Bacterial polypetide isolated from the Sargasso Sea
PILGICYGLHLLVHHNGGAVNSTGKGEYGFAEVDFTRGNTITEQMSDTSNVWMSHMDQVTKVPDGWQVIATSANGVVAGLINRKQNKIATQFHPEVSHTEEGGQLLKNFIFKIAKCEKNWTPSNFIKEQVKKIKEKSGDENILVGVSGGVDSTVMACLINRSVGNKCTAVLIDNGLLRKAEAKNCVNALKNGLGIDVHLFDESKLFFSRLKGVIDPEQKRKIIGDQFIKSFDRIAAEFGNYKFLGQGTLYPDIIESGVSASKSAHVIKSHH

SEQ ID NO: 197401 - protein, 267 aa, Unknown
  Bacterial polypetide isolated from the Sargasso Sea
MVDTGLMRKDEFKLTYRKFKKRYNLNVKLINASQIFLKKLKNISDPEKKRKIIGNLFIKIFEKEAKKIKNVKFLAQGTLYPDIIESKSSTGSKTSKIKSHHNVGGLPKKMNLQLIEPLKELFKDEVRILGKSLGLSRDINYKHPFPGPGLGIRIIGQITEEKVKILQEADYIYINELLNNNLYDKIWQAYAALLPFRTVGVMGDSRTYEYTCMLRAVISEDGMTADYFNFPRFFLDKVSSKIINNVKGINRVVYDITSKPPSTIELE

SEQ ID NO: 197402 - protein, 316 aa, Unknown
  Bacterial polypetide isolated from the Sargasso Sea
IENFIFKICKIKRNWSMKNHLRNQITEIKHSVHKDQVICGLSGGVDSTVTAAIISKAINKQLTCIYVDTGLMRLNETKEVVKMFKKHFKSRLIVKDSRKTFIKALKGATDPEKKRKIIGNLFIKIFNQEANKIKRAKYLAQGTIYPDVIESQSFHGGPTSVIKSHHNVGGLPKRMKLKLVEPLRELFKDEVRKLGLEMRLPKKFINRHPFPGPGLGIRILGEVTAARVKILQEADNIYIEEIREAGLYDKIWQAFAVLMPIKTVGVMGDHRSYEQVCGLRAVTSVDGMTADFYPFKGEFLSKVSTRIINEVKGINR

SEQ ID NO: 197403 - protein, 162 aa, Unknown
  Bacterial polypetide isolated from the Sargasso Sea
MSQPSSDGQRQPAIVILDFGSQYSELIARRVRETEVFSVVLGYSTTAEELRRIAPKGIILSGGPSSVYAEGAPLCDPSIWELGIPVLGVCYGMQLMVQQLGGVVEAATGKAEYGKAPLEVDDPTDLLTNVDSGSTMWMSHGDSVKALPVGFVRLAHTVNTPE

SEQ ID NO: 197404 - protein, 253 aa, Unknown
  Bacterial polypetide isolated from the Sargasso Sea
LYKLFKSKYKINVKLINAKSLFLKNLQKVKNPEKKRKIIGKLFIKIFEREAKKNKNIKFLAQGTLYPDVIESKSSTGSKTSKIKSHHNVGGLPKKMKLKLVEPLRDLFKDEVRKLGISLGLDKKIVNRHPFPGPGLAIRIIGEVTPEKVKMLQEADYIFMNELKTNKLYSKIWQAYAALLPIKTVGVMGDTRTYEYTCLLRAVVSKDGMTADYFSFPKKFLDNISNKIINNVIGINRVVYDITSKPPGTIELE

SEQ ID NO: 197405 - protein, 335 aa, Unknown
  Bacterial polypetide isolated from the Sargasso Sea
LTFYGLQFHPEVTHTSCGQRIIENFVHDICGCGSDWNPGNIIEKDIKEVQEAVGDDQVLLGLSGGVDSSVVAALLHKAIGDQLACIFVDNGLLRLNEGDQVMETFSEHMNLNVIRVNAEDIFLEKLKGIDDPEDKRKIIGRTFIEVFEDEASKLENVKWLAQGTIYPDVIESAGSKTGKAHVIKSHHNVGGLPEDMKLKLVEPLRDLFKDEVRKIGKELGLTSKLVDRHPFPGPGLGVRILGEVKKEYADLLRLADDIFIEELHKEDLYDKVSQAFAVFLPVKSVGVMGDGRKYEYVIAFRAVETTDFMTANSAKFAYEFLDRVSTRIINEISGI

SEQ ID NO: 197406 - protein, 156 aa, Unknown
  Bacterial polypetide isolated from the Sargasso Sea
FDLVEPLRDLFKDEVRRMGTKLGIPKEMLERHPFPGPGLGVRIIGEITKEKTLILQEADHIFIEELIKADLYDKVSQAFAVLLPVKSVGVVGDERRYAEVIGLRAVETVDFMTARWAHLPYKFLEHVSNRIVNEIEEVSRVVYDISSKPPATIEWE

SEQ ID NO: 197407 - protein, 295 aa, Unknown
  Bacterial polypetide isolated from the Sargasso Sea
RSKKFYGVQSHPEVTHTKNGKKFISNFIFLICRIKKNWSSKDQKKKLIKDVKKQVGGNKVICALSGGVDSSVVAQLLNKAIGKKLYCIFVNTGLLRKNEEKQVIETFKKRLKINLIYVNAEKLFIKRLNNISDPEKKRKIIGNLFIEIFERYAKKIKNVKFLAQGTLYPDLIESKSVTGSHTSKIKSHHNVGGLPKKMKLKLVEPLKFLFKDEVRKLGLELNLSKEIISRHPFPGPGLAIRMPGIITKEKINILKDADHYFIQALKKNNLYNKIWQAYAALLPVKTVGVMGDNRT

SEQ ID NO: 197408 - protein, 247 aa, Unknown
  Bacterial polypetide isolated from the Sargasso Sea
ENMNLNVIKSDSEEIFLRHLEGIEDPEQKRKIIGRTFIDVFDAEAAKLNNIHFLAQGTIYPDVIESSVSESKEARVIKSHHNVGGLPDEMKMKLVEPLKDLFKDEVRRMGIELGLPSEILSRHPFPGPGLGVRILGEITKEKTTILKEADHIFIDELVAADLYKTVSQAFAVYLPIKSVGVVGDERRYAEVIGLRAVETVDFMTARWAHLPYDFLEHVSNRIVNEIEQVSRVVYDISSKPPATIEWE

SEQ ID NO: 197409 - protein, 275 aa, Unknown
  Bacterial polypetide isolated from the Sargasso Sea
VVAQLLNKSVGKQLKCIFVNTGLLRKNEERQVVNTFKKKLKMNLIYVNAEKQFLKKLKNITDPEKKRKIIGNLFIKIFERYSKKIKNVKFLAQGTLYPDLIESKSVTGSQTSKIKSHHNVGGLPKKMKLDLVEPLKFLFKDEVRKLGLELKLSREIISRHPFPGPGLAIRMPGVITKEKIKILKEADFYFIDELKKQNLYDKIWQAYAALLPVKTVGVMGDNRTYEYICLLRAITSSDGMTADYFDFSKKFMQKVSNKIINNIRGINRVVYDVTS

SEQ ID NO: 197410 - protein, 240 aa, Unknown
  Bacterial polypetide isolated from the Sargasso Sea
TYVNAEKEFLRKLSNISDPEKKRKIIGNLFIKIFERYAKKIKNVKFLAQGTLYPDLIESKSVTGSQTSKIKSHHNVGGLPKKMKLKLVEPLKFLFKDEVRKLGLELNLSKEIISRHPFPGPGLAIRMPGIITKEKINILKEADHYFIQALRDHKLYHKIWQAYAALLPVKTVGVMGDNRTYEYLCLLRAITSEDGMTADFYEFKKSFIQEISNKIVNSIRGINRVVYDITSKPPSTIELE

SEQ ID NO: 197411 - protein, 174 aa, Unknown
  Bacterial polypetide isolated from the Sargasso Sea
AKVIKSHHNVGGLPERMNLKLLEPFRMLFKDEVRKIGKAINLPDEIIGRHPFPGPGLGIRIIGEVTKERLDKLREADHIFLSEMKKHNLYNQASQAYAFYLPIKSVGVVGDNRIYADVIGLRSVDTTDFMTANVSNLPNDFIQHVSTRIVNEVEGISRVVYDVTSKPPATIEWE

SEQ ID NO: 197412 - protein, 184 aa, Unknown
  Bacterial polypetide isolated from the Sargasso Sea
IESVSFTGGPSVTIKSHHNVGGLPERMNMELVEPLRELFKDEVRELGKELGIPSHFIERHPFPGPGLAIRLPGEISSEKADILRKADTIYIEEIRKAGLYNEIWQAFAVLLPVQTVGVMGDERTYDFVCALRAVTSLDGMTADYYPFEQEFLANVSTRIINEVKGINRVVYDITSKPPGTIEWE

SEQ ID NO: 197413 - protein, 265 aa, Unknown
  Bacterial polypetide isolated from the Sargasso Sea
VGKVKNSEFSSEFGRAFLKLKKETNLLEGWFINSKEVVWMSHGDHVSKIAPGFEVFAISKNAPHAVVADTKRNFYGVQFHPEVHHTPKGILLFENFLKIAGFNGDWTMQAYKKEMIQNIKDIVKKDRVICGISGGVDSTVTATLLHKAVNKQLTCIFVNHGFLRKYEEKEVLKMFKNNIKIPLIYADESALFMKELQGVADPEIKRKKIGKLFINVFQKYAKKIKNAKYLGQGTLYPDVIESVSVNGQISETIKSHHNVGGLPKK

SEQ ID NO: 197414 - protein, 232 aa, Unknown
  Bacterial polypetide isolated from the Sargasso Sea
MQDFIAVLDFGSQYAHLIAKRIRHIGAYTRIFSPSTNNTSLAKAKGIVLSGGPASVNSSNVPEFNSKLLELDKPILGICYGHQLIAQSFGGSISNTGKGEFGKAILEHKSDSPLWENVSFPNQVWMSHQDSVTKCPQEFDVTAETENGILAALKHRQRPIFTFQFHPEATDSSHGRIMLKNFVNACDVSSKWSMETFIEITIQRLSKEVGNRKVLMFLSGGVDSSVAFALLN

SEQ ID NO: 197415 - protein, 291 aa, Unknown
  Bacterial polypetide isolated from the Sargasso Sea
KEIIDLGKPILGICYGQQVLVQQLGGTVVSSEKSEFGRANIKVVSSCSLTDQVWDKGKKYQVWMSHGDSVVEMPEGFDLVAETEGAAFAVIANEKAKQYGVQFHPEVVHTLDGKNLIHNFVKKISGCKTTWNMGSFIDYKVDILKNQVGLEKVLCGLSGGVDSSVTAALLDKAIGDQLVCVFVDHGLLRGGEAEEICSIFKRRLGPRFINVKAEKVFLDALQGINDPEKKRKIIGNKFIEVFESEAKKLGNIQFLAQGTLYPDVIESVSFSGGPSVTIKSHHNVGGLPEKM

SEQ ID NO: 197416 - protein, 290 aa, Unknown
  Bacterial polypetide isolated from the Sargasso Sea
MNHKKANNFKIFNKYIRGIILSGGPLNVYESNKFKFNKRIFNLNIPILGICFGHQIISKELGGKVQKSEFREFGLAQVKKINDSQLVKNFFNKKNINNVWMSHGDQVSKLPNDFKIIASSKNSKFTIIENYKKKFYGVQFHPEVTHTNKGRVVLKNFLFSICKIKKNWSSKHQKLKLIKDVKEQVGRNKVICALSGGVDSSVVAQLLSKAIGKKLTCIFVNTGLLRKNEERQVINIFKKKLKINLIYVNAKKEFIKKLKNISNPEKKRKIIGNLFIKIFERYAKKIKNIK

SEQ ID NO: 197417 - protein, 208 aa, Unknown
  Bacterial polypetide isolated from the Sargasso Sea
MSLDQNLNKILIVDFGSQFTQLIARRIRELGVFSEIISHKKIKIKDINKSVRGIILSGGPLNVYQINKYSFDKKILDLKLPILGICFGHQILSKLNGGKVKQSKHREFGLAKIYKKKESLLTKNFFGTKKTKKVWMSHSDQVSKLPLNFKVIATSTNSKFAIVENKNKKFFGIQFHPEVTHTESGKKLIRNFIFLICKIKRNWSSKDQ

SEQ ID NO: 197418 - protein, 273 aa, Unknown
  Bacterial polypetide isolated from the Sargasso Sea
IIDFGSQVTKLIARRIREFGVFSEILTINDLYKIRDYKKIKGIVLSGGPSTVTKKKYLKIPKEIFLKKIPVLGICYGLQLITKLFGGSIKSLRKKREFGRAILYKKRKSLLIKNFFDTKKKSVWMSHQDAVTKLPKGFKVVASTKESKLTIIENTKIKIYGVQFHPEVTHTENGKEIFKNFLFSICKMKKKWRVASEANRLINDIRKTVKKDKVICALSGGVDSSVVALLVNKAIKKNLICIMVDTGLMRKNEFKDSYDIFKKKYKLNVKLIN

SEQ ID NO: 197419 - protein, 233 aa, Unknown
  Bacterial polypetide isolated from the Sargasso Sea
MSEKILIIDCGSQYTQLIARRVRELNVYCEIHSFEISLASILKYKPKGIIISGGPDSVYGNSNLNNLGKIFTLEIPVLGICFGMQLIAKFFGGEVQESKTREFGYAEVRLRGHSNLFTGIEDRKNNDGNAFLDVWMSHGDSVVKLPDKFKVIASNKDTPLAGIALEEKKIYGLQFHPEVTHTKKGKLIIKKFISNICDTKQSWFISNFLNQSISEIKKTIKNEKVILGLSGGV

SEQ ID NO: 197420 - protein, 287 aa, Unknown
  Bacterial polypetide isolated from the Sargasso Sea
LYFSSFDFGSQYTQLIARRVRESKVYSEILPWDINDQKIRMLNPKGVILSGGPNSVTESFTPRVPQVIFDLSVPVLGICYGMQTLAEQMGGHVVSVDQKEFGHSSLDVVSNSKIFEGINKKLNVWMSHGDQVQDLPDNFNLIASTSTAPIAVMEHESLPIYGIQFHPEVTHTEQGKKILDNFILNICHAKTEWNIDDVISQRIDDIKEKVKNDKVLLGLSGGVDSSVTATLLHKAIGKNLTCVFVDNGLLRKGEAEDVMQTFKENMSLNVIKSDSEEIFLRHLKNIE

SEQ ID NO: 197421 - protein, 154 aa, Unknown
  Bacterial polypetide isolated from the Sargasso Sea
MSLDKNLNKILIIDFGSQFTQLIARRIRESGVYSEIISHKKVKNKNIDNSIKGIILSGGPLNVYQINKYSFDKRIIENQIPILGICFGHQILSKLNGGRVKQSKYREFGLANIRKKRESILTKNFFNKKNINKVWMSHADQVSKLPKNFSVIAS

SEQ ID NO: 197422 - protein, 265 aa, Unknown
  Bacterial polypetide isolated from the Sargasso Sea
IGKKLYCIFVNTGLLRKNEEVQVVQTFKKRLKMNLIYVNAEKEFLKKLKNVSDPEKKRKIIGNLFIKIFERYAKKIKNVKFLAQGTLYPDLIESKSVTGSQTSKIKSHHNVGGLPKKMNLKLVEPLKFLFKDEVRKLGLELNLSKEIISRHPFPGPGLAIRMPGAITNEKIKILKEADYYFIQALKDHSLYHEIWQAYAALLPVKTVGVMGDNRTYEYLCLLRAITSEDGMTADYYEFKKSFMQSISNKIVNSIRGINRVVYDVT

SEQ ID NO: 197423 - protein, 214 aa, Unknown
  Bacterial polypetide isolated from the Sargasso Sea
IGSTFINVFERVAIEAGGADFLAQGTLYPDVIESISVAGPSVVIKSHHNVGGLPERMDLKLVEPVRELFKDEVRELGRQLNLSELLVGRHPFPGPGLAIRIPGEVTRERADILRRADLIFLEEIRNANLYDEIWQAFAVLLPVRTVGVMGDARTYDHVCALRAITSTDGMTADFYPFDMVFLGRVASRIVNEVRGINRVVYDVTSKPPGTIEWE

SEQ ID NO: 197424 - protein, 196 aa, Unknown
  Bacterial polypetide isolated from the Sargasso Sea
MAKNILADKILIIDFGSQYTQLIARRVRELGVYCEIYNHRASLKSIKDFNAKGIILSGGPETVKQKGSPKIPDKVFDLGIPLLGICYGMQSIAKQLKGKVELADKREFGHADLLLKNKGSGLFKGINNNKIGVWMSHGDHVSKLPKDFKVCATTKNSPIAAFHHPTKKIFGLQFHPEVTHTPQGKKILKNFVRDIS

SEQ ID NO: 197425 - protein, 222 aa, Unknown
  Bacterial polypetide isolated from the Sargasso Sea
DPEKKRKIIGKCFIDTFNKAALKIKEVKFLAQGTIYPDVIESSSKNSKSDIIKSHHNVGGLPKNMKLKLVEPIRDLFKDEVRRIGKQLGLPNSLLERHPFPGPGLAVRILGEVNHIKVNILQEVDSIFLDELRVNGFYNKTDQALCVLIPQKSVGVMGDKRQYGFVVAIRAVNTTDFMTATSTPIPHKLLNNISSRIINEVNGVARVVYDITSKPPGTIEWE

SEQ ID NO: 197426 - protein, 248 aa, Unknown
  Bacterial polypetide isolated from the Sargasso Sea
MSLDQNLDKILIIDFGSQFTQLIARRIRELGVFSEIVSHKKIKNKNINNSIKGLILSGGPMNVYEINKYSFDKKIIENQIPVLGICFGHQILSKLSGGQVKQSKHREFGLANIYKKKDSLLTKKLFDNKKKIKVWMSHADQVSKLPRNFKVIASSQNSKFAIVENKSKKFYGVQFHPEVTHTENGKKIIRNFIFLICRIKKNWSSKDQKIRLIKDIRNQVMNNKVICALSGGVDSSVVAQLLIKLLEK

SEQ ID NO: 197427 - protein, 184 aa, Unknown
  Bacterial polypetide isolated from the Sargasso Sea
IESKTVTGSPSSKIKSHHNVGGLPKKMSLALVEPLSSLFKDEVRKLGKQLLVPKDILLRHPFPGPGLAIRIPGKITKEKVDILKEADFIFINELKKLNLYNKIWQAYAALLPLKTVGVMGDKRTYEYTCLLRAVTSEDGMTADFFSFNKDFFQRISNKIINSVSGINRVVYDITSKPPSTIELE

SEQ ID NO: 197428 - protein, 169 aa, Unknown
  Bacterial polypetide isolated from the Sargasso Sea
SHHNVGGLPDEMKLDLVEPLRDLFKDEVRKMGKELGLPQEMLDRHPFPGPGLGVRIIGEITKEKTKILKEADHIFIQELIKADLYDQVSQAFAVLLPVKSVGVVGDERRYAEVIGLRAVETVDFMTAKWAHLPYDFLELVSNRIVNEIEDVSRVVYDISSKPPATIEWE

SEQ ID NO: 197429 - protein, 294 aa, Unknown
  Bacterial polypetide isolated from the Sargasso Sea
CGLSGGVDSSVAAVLIHEAIGDQLTCIYVDTGLMRENETDEVVNLFRENFNIPLIDVDAGDTFLTRLTGVSDPEEKRKIIGSSFIDIFEEEANKIGGADFLAQGTLYPDVIESVSFTGGPSVTIKSHHNVGGLPERMNMELVEPLRELFKDEVRELGKELGIPSHFIERHPFPGPGLAIRLPGEISSEKADILRKADTIYIEEIRKAGLYNEIWQAFAVLLPVQTVGVMGDERTYDFVCALRAVTSLDGMTADYYPFEQEFLANVSTRIINEVKGINRVVYDITSKPPGTIEWE

SEQ ID NO: 197430 - protein, 264 aa, Unknown
  Bacterial polypetide isolated from the Sargasso Sea
MKKILVIDFGSQYTQLIARRLRELNIYSEVRPWDEVANLEDVKGFVLSGGPESSNIDGNPKIDKSIFDSKKPILGVCYGMQVLAHQEGGEIANEGKKEFGHAEIELKNNSLIFNGIDEKVNVWMSHGDKVKSLPEGYEIIASSNNSPIAAFQNHSKNHFGLQFHPEVTHTKFGTKIIENFVEMCDIQQNWNASNILNQINEEVARTAKNENVLLALSGGVDSTVLAAVLYKILGKRLTCVMVDHGLLRMNEGKNVINNLKEKSV

SEQ ID NO: 197431 - protein, 282 aa, Unknown
  Bacterial polypetide isolated from the Sargasso Sea
NHSIKGIVLSGGPLNVYQINKYSFDKKILQLDVPVLGICFGHQILSKLNGGRVKQSKHREFGLANVYKKNNSLLTTNFFGNKKSKQVWMSHADQVSKLPKNFKVLASSTNSKFAIVENKIKKYYGVQFHPEVTHTQNGKKLISNFIFLICKIKKNWSSKDQKNQLIKDARKQVGNNKVICALSGGVDSSVVAQLLNKAIGKKLYCIFVNTGLLRKNEETQVVQTFKKRLKMNLIYVNAEKEFLKKLRNVSDPEKKRKIIGNLFIKIFERYAKKFKNVKFLAQ

SEQ ID NO: 197432 - protein, 287 aa, Unknown
  Bacterial polypetide isolated from the Sargasso Sea
DSSVVAQLLNKAIGKKLYCIFVNTGLLRKNEEVQVVQTFKKRLKMNLIYVNAEKEFLKKLKNVSDPEKKRKIIGNLFIKIFERYAKKIKNVKFLAQGTLYPDLIESKSVTGSQTSKIKSHHNVGGLPKKMNLKLVEPLKFLFKDEVRKLGLELNLSKEIISRHPFPGPGLAIRMPGIITNEKIKILKEADYYFIQALRDHGLYHKIWQAYAALLPVKTVGVMGDNRTYEYLCLLRAITSEDGMTADYYEFKKSFMQTIANKIVNSIRGINRVVYDVTSKPPSTIELE

SEQ ID NO: 197433 - protein, 150 aa, Unknown
  Bacterial polypetide isolated from the Sargasso Sea
MSHDNYLHKILIVDFGSQFTQLIARRIRELGVFSEIISHKKIKIKDIDKSVKGIILSGGPLNVYEIKKYSFDKRIIQNKLPVLGICFGHQILSKINGGKVKQSKHREFGLANIYRIKESLLTKNLFNKKKFIRVWMSHADQVSKLPKNFS

SEQ ID NO: 197434 - protein, 306 aa, Unknown
  Bacterial polypetide isolated from the Sargasso Sea
ILILDFGSQYSELIARRIRETNVFSLVVSNCISIQDINGINPKGIILSGGPNSVYEQNAPKCDEKIFNLGIPILGICYGMQLMVKELGGSVISATKKAEYGRAPLNIDQESDLLFDVEDKSIMWMSHGDSINCLPDGFNKIAHTENTPHAAISNDEKKLFGVQFHPEVVHSEFGMTVIKNFVYKISCCAADWTTETYIDETIPRIREQVGNKKVLLALSGGVDSSTLAFLLNKAIGNQLTCMFIDQGFMRKGEPEFLMNFFDKKFDIKVEYINARERFIAKLKGITDPEQKRKIIGEEFIRVLRKK

SEQ ID NO: 197435 - protein, 307 aa, Unknown
  Bacterial polypetide isolated from the Sargasso Sea
IKNQASGLFKKIKAKKINVWMSHGDHVSKLPKGFKSCGTTSNSPIAALYHPTKKIFGLQFHPEVTHTPQGKQILKNFVRDISNCKGLWNSKNIITKAVEEIKREVGDQEVLLGLSGGVDSAVVAALLSEAIDDQLTCIFVDNGLLRLNEGDQVMNTFKDRFGIKVKRANAGNQFLKDLKGKKDPEHKRKAIGKTFIDVFLKEAKKNKKIKWLAQGTIYPDVIESAGTKNGTAHVIKSHHNVGGLPSYLNLPVIEPLKDLFKDEVRKIGLELGLPKEILFRHPFPGPGLGERILGEIKRPYIKTLQLA

SEQ ID NO: 197436 - protein, 287 aa, Unknown
  Bacterial polypetide isolated from the Sargasso Sea
LKGKVKRSTNREYGYTLLNIKNRSPIFKGIKKNKFTVWMSHGDNINKIPKHFTISSISDNKIISSIENIKSKIYCLQFHPEVFHTDYGLKIINNFVFNITKIKIKFKIENFIDNKIQELKKQIQDKKIICGLSGGVDSTVTAYLLSKAINKNLYCIFVDHGFLRKNEAIEVSKIFRIKFGKNFIKINASNIFLNKLKNISDPEKKRKIIGKTFIEVFEKEAKKISNVKYLGQGTLYPDVIESLPFFGGPTAKIKSHHNVGGLPKKMKLKIIEPLRELFKDEVRNVGK

SEQ ID NO: 197437 - protein, 301 aa, Unknown
  Bacterial polypetide isolated from the Sargasso Sea
KKLNKSKLTNNFFNKNGINNVWMSHADEVVKLAKGFKIIAKTNSSKFSIIENRSKNFYGIQFHPEVSHTEKGKVIIKNFIFSICKMKRNWTSKNQKHVLIKEVKQKIGKSKVICALSGGVDSSVVAKLIHNAIGKQLFCIFVNTGLLRKNEETQVIKTFKKKFKINLIYVDAKKLFLNKLKNIKDPEKKRKIIGNLFIMIFEKYAKKIKNVKFLAQGTLYPDLIESRSVTGSQTSKIKSHHNVGGLPKKMKLKLVEPLKLLFKDEVRKLGLELKLSKDIVLRHPFPGPGLAIRMPGRNNRK

SEQ ID NO: 197438 - protein, 184 aa, Unknown
  Bacterial polypetide isolated from the Sargasso Sea
MSQPSSDGQRQPAIVILDFGSQYSELIARRVRETEVFSVVLGYSTSAEELRAMQPKGIILSGGPSSVYAEHAPLCDPAIWELGIPVLGVCYGMQLMVQQLGGVVEAASGKAEYGKAPLEVDDPTDLLTNVTGGSTMWMSHGDSVKALPEGFVRLAHTANTPEAAVAHLQRRLYGVQFHPEVVHS

SEQ ID NO: 197439 - protein, 258 aa, Unknown
  Bacterial polypetide isolated from the Sargasso Sea
ELFKLNIPILGICFGHQVISKELGGKVKKAKHREFGLAKLSRIKNSRLTQNFFNKSGSNNVWMSHADEVTKLAKGFKVVAKTETSKFSVIENSSKKLYGIQFHPEVTHTEKGKIILKNFVFSICMIKKNWTSKNQKKILIHDVKKIVGNSNVICALSGGVDSSVVAKLIHNAIGKKLTCIFVNTGLLRKNEEAQVIKTFKKKFKINLIYVDAKSLFLNKLRKVSDPEKKRKIIGNLFIKIFEKYAKKTKNVKYLAQGT

SEQ ID NO: 197440 - protein, 278 aa, Unknown
  Bacterial polypetide isolated from the Sargasso Sea
DKAVKKNLICVMVDTGLMRKNEFKHTYQIFKKKYKLNVKLINASDIFYRKLKNIVDPEQKRRIIGNLFIKVFEKESKKYKKIKYLAQGTLYPDIIESKSATGSKTSKIKSHHNVGGLPKRMNLKLIEPLKELFKDEARLLGKSVGLSQEIVNRHPFPGPGLAIRILGKVTPKKIKILQEIDNIFVKELVKNNLYNKIWQAYAALLPVKTVGVMGDSRTYEYTCLIRAVKSEDGMTADFYNFKKDFLDKISNKIINGVIGVNRVVYDITSKPPGTIELE

SEQ ID NO: 197441 - protein, 214 aa, Unknown
  Bacterial polypetide isolated from the Sargasso Sea
MEKIIVLDFGSQYSHLICRRIREFSVYAELVPYDITPEELKKMNPKGIIFSGGPSSVYNDDSPKPDEELFDFNLPLLGICYGHQLIVNKFGGKVKRANKEYGSSLLSMDKNSVLLDGIGESIRAWMSHGDEAEEIPTNFEVIGHTENSHAAAIANTERTVFGIQFHPEVVHTERGTDILKNFVLNVCKAKQEWTMEGFVEKTVKGISEIDGNVL

SEQ ID NO: 197442 - protein, 302 aa, Unknown
  Bacterial polypetide isolated from the Sargasso Sea
MFGHQILSKYNGGRVKQSKHREFGLAQIFKKKNSLLVKNFFNKKRFNRVWMSHADQVSKLPKNFKVIASTKNSRFAIVENENQNLFGVQFHPEVTHTENGKKILSNFVFLICKIKKNWSPKDQKIQLIKDVREQVGSSKVICALSGGVDSSVVSQLLNKAIGKKLYCIFVNTGLLRKNEETQVIRIFKKKLKLNIIYVNAEKEFLKKLKNVSDPEDKRKIIGNLFIKIFEKHAKKIKDVKFLAQGTLYPDLIESKSVTGSQSSKIKSHHNVGGLPKKMKLKLIEPLKYLFKDEVRKLGLELN

SEQ ID NO: 197443 - protein, 305 aa, Unknown
  Bacterial polypetide isolated from the Sargasso Sea
MINLLGGKVEKGVATAEFGRAFIIPSGKKTDFLIGCFVNGSEEVWMSHGDHVSENAEGFEVFAKSSSAPFAITADLSRKLFGVQFHPEVQHTVNGTKVYENFLNIANFKRDWTMGSYMLEAIQAIRTQVGNEKVICGLSGGVDSSVTAILLHRAIGNNLTCVFVDNGLLRKGESKQVIKMFKDKYQIPLIHVNKKKIFMKALKGTTNPEKKRKIIGKLFVKVFEKVAESLGDVKFLAQGTLYPDIIESVSVSGAPSEKIKSHHNVGGLPKKMRLKLVEPLKALFQDEVRLLGRELALPNNFVERH

SEQ ID NO: 197444 - protein, 293 aa, Unknown
  Bacterial polypetide isolated from the Sargasso Sea
GLSGGVDSAVFAALLSKAIGNQLTCIFVDNGLLRLNEGDQVMETFKGKFGIKVKRANAGNQFLRDLKGKKDPEQKRKAIGKTFIDVFLKEAKRNTKIQWLAQGTIYPDVIESAGTKNGSAHVIKSHHNVGGLPSYLNLPVIEPLKDLFKDEVRKIGLELGLPKEILFRHPFPGPGLGVRILGEIKRPYIKILQLADDIFISELVKDGYYEKVSQAFAVFLPVKSVGVVGDSRRYKYVIALRAVETIDFMTAKSAKLPHTFLEKVSNRIINEIPEVSRVTYDISSKPPATIEWE

SEQ ID NO: 197445 - protein, 274 aa, Unknown
  Bacterial polypetide isolated from the Sargasso Sea
NFTHKISECRSNWTMDSFKKTAIENIRTQVGKGKVICGLSGGVDSSVAAVLIHEAIGDQLTCIYVDTGLMRENETDEVVNLFKENFNIPLIDVDAGDTFITRLTGVSDPEEKRKIIGSSFIDIFEEEANKIGGADFLAQGTLYPDVIESVSFTGGPSVTIKSHHNVGGLPERMNMELVEPLRELFKDEVRELGKDLGIPSHFIERHPFPGPGLAIRLPGEISSEKADILRKADTIYIEEIRKAGLYNEIWQAFAVLLPVQTVGVMGDERTYDFV

SEQ ID NO: 197446 - protein, 251 aa, Unknown
  Bacterial polypetide isolated from the Sargasso Sea
IFPWDIDEKKISQLKPKGIILSGGPNSVTKSFTPRVPQSILNSNVPIFGICYGMQTLAEQMGGHVVSADKKEFGHAELEIVADSKLFKNLNSKINVWMSHGDQVQDLPDEFELTALTSTAPIAAMQHKDLPIYAIQFHPEVTHTENGMTILSNFIFDVCGANNDWKMDDLISSRVEEIKQKVGNNDVLLGLSGGVDSSVTATLLNKAIGKKLTCVFVDNGLLRKGESHQVMQTFKENMNLNVIKSDSQEVF

SEQ ID NO: 197447 - protein, 203 aa, Unknown
  Bacterial polypetide isolated from the Sargasso Sea
MQDRILILDFGSQYTQLIARRVREAGVYSEIYIGDIDFNVIESFKPSGLILSGGPESAFIDDAPKPSKEIYSMGLPILGICYGMQVMTEQLGGKVSPSNEREFGHADAKMEANSRLFEGIETDDEQSVWMSHGDRVESLPQGFQKICTSANSPSAAMANEDKSFYGLQFHPEVTHTSCGQIIIKNFVHNICGCGSDWNPRKYH

SEQ ID NO: 197448 - protein, 269 aa, Unknown
  Bacterial polypetide isolated from the Sargasso Sea
VKRANKEYGSSLFSMDKNSGLLDGIGESIRAWMSHGDEAEEIPSNFEVIGHTENSHAAAIANTDRTVFGIQFHPEVVHTERGTDILKNFVLNVCKAKQEWTMEGFVEKTVKEISEIEGNVLCGVSGGIDSTVAALLIHKAIGDRQTGVFVDNGLLRLDESKEIEDMFKNNFSLNFHRVDASEQFLSKLKGITDPEQKRKIVGEEFIQVFTEFAKQKGPFKWLAQGTLYPDVIESGVSKGPAAVIKSHHNVGGLPEWLNLKNLRTIKRVV

SEQ ID NO: 197449 - protein, 112 aa, Unknown
  Bacterial polypetide isolated from the Sargasso Sea
GALSREKIKILQEADHIYINALKEYDLYDQVWQAGAILLPVKTVGVMGDERTYEYVVCLRAVNSVDGMTADWSLLPHSFLQDVSNKIINEVRGVNRVVYDISSKPPATIEWE

SEQ ID NO: 197450 - protein, 253 aa, Unknown
  Bacterial polypetide isolated from the Sargasso Sea
MLILFKKKLKIKLIYVNAEKEFIKKLKNINNPEKKRKIIGNLFIKIFERYSKKLKNIKYLAQGTLYPDLIESKSVTGSQTSKIKSHHNVGGLPKVMKLKLIEPLKFLFKDEVRRLGLELNLSKEIISRHPFPGPGLAIRIPGIITEEKIKILKEADYYFINELKKNNLYNKIWQAYAALLPVKTVGVMGDNRTYEYICLLRAITSEDGMTADFYNFNNNFMQKISNKIINNIRGINRVVYDITSKPPSTIELE

SEQ ID NO: 197451 - protein, 314 aa, Unknown
  Bacterial polypetide isolated from the Sargasso Sea
IKKKILFKEIKKNVGNSKVICALSGGVDSSVVAKLIHNAIGKQLTCIFVNTGLLRKNEEIQVVKTFRRKFKINLIYVDAKKLFINKLKKITDPERKRKIIGNLFIKIFEKHSKKIKNVKFLAQGTLYPDLIESKSVTGSQTSKIKSHHNVGGLPKKMKLKLVEPLRLLFKDEVRKLGLELKLSKDIVLRHPFPGPGLAIRMPGEISESKIKILQEADHIFISLLIKHNLYKKIWQAYAALLPVKTVGVMGDNRTYEYMCSLRAITSEDGMTADFYYFSREFMQLVSNKIVNNIKGINRVVFDITSKPPSTIELE

SEQ ID NO: 197452 - protein, 295 aa, Unknown
  Bacterial polypetide isolated from the Sargasso Sea
DLGVYSEIITPKDTKKIRDFTLIKGIILSGGPSTVTKQKFQKIPKQIFTKKIPILGICYGLQLIAKIFGGKIKSLNKRREFGRALIFKKNTSLLTKNFFKSQKTVWMSHEDAVIKLPKSFKNIAYTKDSRLTIIESKKHKIYGVQFHPEVTHTDNGKQIFKNFLFLICKIKKKWNVVSQKNKLIKEIKEIVKDDKVICALSGGVDSSVVALLINKAIKKNLICIMVDTGLMRKNEFRYTYKLFRYKYKLNLKLIKASNIFLKKLKNITNPEKKRKIIGNSFIKIFEKESKKIKNV

SEQ ID NO: 197453 - protein, 197 aa, Unknown
  Bacterial polypetide isolated from the Sargasso Sea
MDFGSQYTQLIARRVRECGVYCEIQPFDVEKSYFDERLPRGVILSGGPETVTTGDTPRIPERLLKLEIPILGICYGMQALAAQLGGGVKSSAHREFGPAEIDLQDGSDLLGALDPDKLGKAQVWMSHGDKVTDLPDGFSVTASTGSAPVAAMENPLKRIYAVQFHPEVTHTPNGDHLIDRFAKDICQCDGDGLLKTS

SEQ ID NO: 197454 - protein, 304 aa, Unknown
  Bacterial polypetide isolated from the Sargasso Sea
INELNYKLKNKKVICGLSGGVDSTVTSFLLHKAIKNNLYCIFVDHGLLRYNESNEVVSIFKKKFGKNFIRVDASNIFLSKLKNIKDPEKKRKIIGKTFIKVFEKEARKIKNVQYLAQGTLYPDIIESIPFFGGPTAKIKSHHNVGGLPKNMNLKIVEPLKELFKDEVRLLGKKLKISQDLLSRHPFPGPGLSIRIPGSIDKNKIKILQRVDNLLINYLKQNNIYKDIWQAFAILLPVKSVGVMGDARTYNYSIVIRSVTSVDGMTADFYMYSKKDLTEISNKIISEVKEVNRVLYDFTSKTPGT

SEQ ID NO: 197455 - protein, 283 aa, Unknown
  Bacterial polypetide isolated from the Sargasso Sea
KRANKEYGSSLLSMDKNSGLLDGIGESIRAWMSHGDEAEEIPSNFEVIGHTENSHAAAIANTDRTVFGIQFHPEVVHTERGTDILKNFVLNVCKAKQEWTMEGFVEKTVKEISEIEGNVLCGVSGGIDSTVAALLIHKAIGDRQTGVFVDNGLLRLDESKEIEDMFKNNFSLNFHRIDASEQFLSKLKGITDPEQKRKIVGEEFIQVFTEFAKQKGPFKWLAQGTLYPDVIESGVSKGPAAVIKSHHNVGGLPEWLNLKILEPLRELYKDEVRDVARILGVPE

SEQ ID NO: 197456 - protein, 299 aa, Unknown
  Bacterial polypetide isolated from the Sargasso Sea
KNNSVWMSHQDIVTKIPGGFKKIASTQNSKFAIISNEKRKLYGVQFHPEVTHTENGKILLSNFVLNICHTKKMWSLRKQKDLIINDIKNKVKNEKVICALSGGVDSSVVAFLLNKAIGKKLKCVFINTGLLRKNEEKEVVKTFKKKLKSNLVYVDASKLFLKKLKNVTDPELKRKIIGKLFIKLFEKKAKKIKFLAQGTLYPDLIESRSVTGSPTSKIKSHHNVGGLPKNLKFSLVEPLQTLFKDEVRKLGKELSVPKAILQRHPFPGPGLAIRIPGKISKYKIKVLQEADFIFIDELK

SEQ ID NO: 197457 - protein, 236 aa, Unknown
  Bacterial polypetide isolated from the Sargasso Sea
KYKFDVKLIDASYLYYKKLKNISDPEKKRKIIGNLFVKIFENEAKKIKKVKYLAQGTLYPDVIESRSVTGSKTSKIKSHHNVGGLPKKMNLELIEPLKELFKDEVRKLGYSAGLEKKIINRHPFPGPGLAIRIAGKITPKKVKILQEADHIFINELIKNNLYDKIWQAYAALLPIKTVGVMGDSRTYEYICLLRAVTSEDGMTANYFNFSKDFLDKIANKIINSVVGINRVVYDIT

SEQ ID NO: 197458 - protein, 235 aa, Unknown
  Bacterial polypetide isolated from the Sargasso Sea
QIKEQVGNSKVICALSGGVDSSVVAKLISNAIGKNLTCIFVNTGLLRKNEEKQVVNTFRKKFKLNLIYVNAEKLFISKLKNVTDPEKKRKIIGNLFIKLFEKYAKKIKNVKFLAQGTLYPDLIESKSVTGSQTSKIKSHHNVGGLPKRMKLKLVEPLKYLFKDEVRMLGLELNLSKEIISRHPFPGPGLAIRMPGIITKEKIKILKEADNYFVNALREHNLYHKIWQAYAALLPV

SEQ ID NO: 197459 - protein, 158 aa, Unknown
  Bacterial polypetide isolated from the Sargasso Sea
MKLKLVEPLKLLFKDEVRKLGLELNLSKEIIFRHPFPGPGLAIRMPGIINKEKINILKEADHLFIQGLKDHKLYNKIWQAYAALLPVKTVGVMGDNRTYEYLCLLRAITSEDGMTADFFEFKKSFIQEISNKIVNSIRGINRVVYDITSKPPSTIELE

SEQ ID NO: 197460 - protein, 282 aa, Unknown
  Bacterial polypetide isolated from the Sargasso Sea
MSHADQVTKLPKNFKIIAQSINSKMCIIENIEKKMFGIQFHPEVSHTIKGKLILKNFIFSICKLSKNWSSRYQKKKLINEIRNSVGNSKVICALSGGVDSSVVAKLLSNAIGKKLTCIFVNTGLLRKNEEKQVVNTFKKRFKINLIYVNAEKLFLSKLKNVSDPEKKRKIIGNLFIKIFEKYSNKIKNVKFLAQGTLYPDLIESKSVTGSKTSKIKSHHNVGGLPKKMKLKLIEPLKYLFKDEVRKLGLELGLSNEIISRHPFPGPGLAIRMPGIITEEKIK

SEQ ID NO: 197461 - protein, 146 aa, Unknown
  Bacterial polypetide isolated from the Sargasso Sea
MAGLEGADGRRPAIVILDFGSQYSELIARRIRETEVYSLVLSHTTTVEQLKELSPRGIILSGGPSSVYAADAPVCDTALWDLGIPVLGVCYGMQLMVQQLGGVVEASERGEYGKAPLFVDDPTDLLTNVEDGSTMWMSHGDSVQRL

SEQ ID NO: 197462 - protein, 188 aa, Unknown
  Bacterial polypetide isolated from the Sargasso Sea
GPSTVTNKKFPDIPYNIFSLHIPILGICYGLQLIVKKLKGKVKSFSKRREFGRAILNKNSSSKLTKNFFINKRTEVWMSHQDSVYKLPSGFKKIASTKNSSLTIIENTKKKIYGIQFHPEVTHTINGKILIKNFIFSICKAKKNWNPSHEKKKIIKNIKNIVKKEKVICALSGGVDSSVVALLIHKAI

SEQ ID NO: 197463 - protein, 187 aa, Unknown
  Bacterial polypetide isolated from the Sargasso Sea
PDIIESKSATGSKTSTIKSHHNVGGLPKRMKLKLIEPLKDLFKDEVRNLGKSIGLTKKILHRHPFPGPGLAIRIIGKINFEKVKILQEADHIFINELINLNIYDKIWQAYAALLPVKTVGVMGDSRTYENLCLIRAVKSEDGMTADFYSFKKGVLEEISNKIINRVKGINRVVYDITSKPPGTIELE

SEQ ID NO: 197464 - protein, 140 aa, Unknown
  Bacterial polypetide isolated from the Sargasso Sea
KLVKKLGLPDSLVYRHPFPGPGLAVRIIGDISEERISILQEADKIFIDTLVEDDLYNDIWQAFAILIPIKTVGVMGDQRTYENLIGIRAVTSTDGMTADWYKMPSKTLNKISNRIVNNVRGVNRVVYDITSKPPGTIEWE

SEQ ID NO: 197465 - protein, 315 aa, Unknown
  Bacterial polypetide isolated from the Sargasso Sea
NKEVKGIILSGGPLNVYDSNKFKFNKKILNLKIPILGICFGHQIISKILGGKVKKSKHREFGSAIVKKKNKSKLVKNFFNKTQVNNVWMSHADQVTKLPKDFTIVASTKSSKYTIIENKKKNLFGVQFHPEVTHTNNGKTLLKNFVIKICKAKRNWSSKHQKIKLINDIRKQIGKEKVLCALSGGVDSSVVAQLLSKAIGKNLTCIFVNTGLLRKNEEKQVINTFKNKLKINLIYVNAENEFIKKLENISDPEKKRKIIGKLFIKIFERFANKIKNVKFLAQGTLYPDLIESKSVTGSQTSKIKSHHNVGGCPKK

SEQ ID NO: 197466 - protein, 207 aa, Unknown
  Bacterial polypetide isolated from the Sargasso Sea
MTSNIEIATKFNDDNILIIDFGSQYTQLIARRVREEGVFCQIIPYNKVSKYIINNNPKGIILSGGPSSVLGIETPRISREIIDMGKPILGICYGQQVLVQQLGGTVVSSEKSEFGRANIKVVSSCSLTDKVWNEGKKYQVWMSHGDSVVEMPDGFDLVAETEGAAFAVIANEKAKQYGVQFHPEVVHTLDGKKLIHNFVKNISSCKT

SEQ ID NO: 197467 - protein, 264 aa, Unknown
  Bacterial polypetide isolated from the Sargasso Sea
MSKTNLIENKKKILIIDFGSQVTKLIARRIRELHVYCEIINIKKFNNLKNFKNIKGIILSGGPSTVTNEGFPKISKKIFSLNIPILGICYGLQLIAKLFGGKIKSNIKKREFGKAILIKKSNSILTNNFYINNKSDVWMSHQDGVVKIPKYFKVIASTKSVKFTSIEHKTKKIYGIQFHPEVTHTSRGKEILKNFAIKICKLKKNWKVPSEKNRIIKNLRLKLKDGKVICALSGGVDSSVVALLIHKAIKKNLICLMVDTGLLR

SEQ ID NO: 197468 - protein, 108 aa, Unknown
  Bacterial polypetide isolated from the Sargasso Sea
MSVNKKRIDTILVLDFGSQYTQLIARRIRESNVYSEILPWDIDEKKILDLNPKGVVLSGGPNSVTDSYTPRVPQCVFELNVPILGICYGMQTLAEQMGGQVVSVDKKE

SEQ ID NO: 197469 - protein, 243 aa, Unknown
  Bacterial polypetide isolated from the Sargasso Sea
IKLIYVNAEKEFIKKLKNINNPEKKRKIIGNLFIKIFERYSKKLKNIKYLAQGTLYPDLIESKSVTGSQTSKIKSHHNVGGLPKAMKLKLIEPLKFLFKDEVRRLGLELNLSKEIISRHPFPGPGLAIRIPGIITEEKIKILKEADYYFINELKKNNLYNKIWQAYAALLPVKTVGVMGDNRTYEYICLLRAITSEDGMTADFYNFNNNFMQKISNKIINNIRGINRVVYDITSKPPSTIELE

SEQ ID NO: 197470 - protein, 269 aa, Unknown
  Bacterial polypetide isolated from the Sargasso Sea
GIPVLGICFGHQIISKELGGRVKNSKYREFGLAEVEEVKKSILTKNFFSKGKNNVWMSHADQVTKLPKNFHVLAKSKNSKLCIIENLEKKFFGIQFHPEVSHTNKGKQILKNFVFSICKVKRNWSSIDQKKKLINEVRNLVGNSKVICALSGGVDSSVVAKLLSNAIGKKLTCIFVNTGLLRKNEEIQVVNTFKKRFKINLIYVNAENIFLNKLKNVTDPEKKRKIIGNLFIKIFEKYAKKIKNVKFLAQGTLYPDLIESKSVTGSQTS

SEQ ID NO: 197471 - protein, 307 aa, Unknown
  Bacterial polypetide isolated from the Sargasso Sea
TILNLPESFELTASTSSIPVAGFHIKGTKQYGIQFHPEVTHTTDGLTLLRNFVVGICGAQCDWTPDQFVESTVEELKEKLGDDKVVLGLSGGVDSSVAAELIHLAIGKNLYCIFVDNGLLRKNEFEKVLESYKAMGLNVKGVDAKDKFYEALDGLTEPEAKRKAIGKVFIDVFDEEAHKIENVKWLGQGTIYPDVIESVSVKGPSATIKSHHNVGGLPDYMKLKVVEPLNTLFKDEVRRVGRTIGVPETILGRHPFPGPGLGIRILGDITPEKVRVLQDVDDIFIQGLHDERLYDEVWQAGAMLLPV

SEQ ID NO: 197472 - protein, 290 aa, Unknown
  Bacterial polypetide isolated from the Sargasso Sea
GGVDSSVTATLLHKAIGKKLVCVFVDNGLLRKGEAEQVMQTFKKNMQLNVVKSDSQDTFLRHLKEIEDPEQKRKIIGRTFIDVFDAEAMKLKDIRFLAQGTIYPDVIESSGSESKEARVIKSHHNVGGLPEDMKLDLVEPLRDLFKDEVRKMGIELGIPKEMIERHPFPGPGLGVRILGEVTKEKTKILQNADHIFIEELIRADLYNSVSQAFAVLLPVKSVGVVGDERRYAEVIALRAVETVDFMTARWAQLPYEFLEHVSNRIVNEIEAVSRVVYDISSKPPATIEWE

SEQ ID NO: 197473 - protein, 262 aa, Unknown
  Bacterial polypetide isolated from the Sargasso Sea
NLYALQFHPEVFHTENGLKIFENFFIKELGFIQEWNPESFIDRTVDYLKTKLKNDKVILGLSGGVDSSVASVLLDKAIGDNLYCVFVNNGLLRKGEFDEVLKQYEGMGLNVKGVDSSDLFINALKGVSDPEKKRKIIGNIFVEVFEQESKKIEDAKWLVQGTIYPDVIESISVKGPSATIKSHHNVGGLPEKMNLKVVEPLKTLFKDEVRKIGNSLNMSKDILNRHPFPGPGLGIRIIGEVNYESIRLIQEADKIYIDGLKE

SEQ ID NO: 197474 - protein, 282 aa, Unknown
  Bacterial polypetide isolated from the Sargasso Sea
NFKIIAQSINSKMCIIENVEKKMFGIQFHPEVSHTIKGKLILKNFIFSICKFTKNWSSRDQKKKLINEVRNSVGNSKVICALSGGVDSSVVAKLLSNAIGKKLTCIFVNTGLLRKDEEKQVVNTFKKRFKINLIYVNAENLFLSKLKNISDPEKKRKIIGNLFIKIFEKYSNKIKNVKFLAQGTLYPDLIESKSVTGSQTSKIKSHHNVGGLPKKMKLKLVEPLKYLFKDEVRTLGLELGLSHEIISRHPFPGPGLAIRMPGIISKEKIKILKEADYYFIKS

SEQ ID NO: 197475 - protein, 260 aa, Unknown
  Bacterial polypetide isolated from the Sargasso Sea
KLISNFIFLICKMRKNWSSKDQKIKLIKDAREMVGNNKVICALSGGVDSSVVAQLLNKAIGKNLHCIFVNTGLLRKDEEKQVVATFKKKLKINLTYVNAEKEFLKKLSNISDPEKKRKIIGNLFIKIFERYAKKIKNVKFLAQGTLYPDLIESKSVTGSQTSKIKSHHNVGGLPKKMKLKLVEPLKFLFKDEVRKLGLELNLSKEIISRHPFPGPGLAIRMPGIITKEKINILKEADHYFIQALRDHKLYHKIWQAYAAL

SEQ ID NO: 197476 - protein, 296 aa, Unknown
  Bacterial polypetide isolated from the Sargasso Sea
PILGICYGHQLICKMLGGKISKSKKREFGKTIIRRKSRNQSLFLKDLFKKNIEEVWMSHGDAITELPQGFVELASSDTSSFSIIEDAARKIFGVQFHPEVFHTVNGKKFIENFVNIANVERNWTPIKITESLIERLKAEIGDEKVICGLSGGVDSTVTALLLHRAIDKNLTCIFVDNGLLRKQEAYQIKTLFQTHFKIKLISINAKNHFLKNLKGVTNPEKKRKIIGKLFIDVFEREAKKLNDVSFLAQGTLYPDVIESTSVHGKSAATIKSHHNVGGLPKKMHLKLVEPLKTLLK

SEQ ID NO: 197477 - protein, 302 aa, Unknown
  Bacterial polypetide isolated from the Sargasso Sea
CYGMQLIADYFGGKVSSSQKKEFGHATFKITDRVALFKGIKNKIGFDVWMSHSDKVIKNPVGFKNIGNSNNTKNAAIYNNKKNIYCLQFHPEVTHTKNGEIIIKNFIYEVCRCKKKWTTTNIIKDIISTLQTQVGKKKVILALSGGVDSTVVAALLNKALPKQLTCVFIDTGLMRKDEVKEVQDNISIKLGINLVTVNAKSIFFKKLKGVSSPEKKRKIIGETFIRIFESHSKKLTNIEYLAQGTIYPDVIESSSKDSKSDVIKSHHNVGGLPKSMQFKLVEPIKSLFKDEVRRIGRALKIQ

SEQ ID NO: 197478 - protein, 178 aa, Unknown
  Bacterial polypetide isolated from the Sargasso Sea
MGSKTSKIKSHHNVGGLPKKMNLKLVEPLKEFFKDEVRVLGNSLGLTRNISYKHPFPGPGLGIRIIGNITSEKIKILQEADYIYINELKNSGLYKKIWQAYAALLPIKTVGVMGDSRTYEYTCLLRAVTSEDGMTADYFNFPKTFLDKISNKIVNNVKGINRVLYDISSKPPSTIELE

SEQ ID NO: 197479 - protein, 97 aa, Unknown
  Bacterial polypetide isolated from the Sargasso Sea
MSDIHEHKILILDFGSQYTQLIARRIREIGVYCELWAWDVTEAQIREFAPNGIILAGGPESVTADNSPRAPEYVFNAGVPVLGICYGMQTMSEQLGG

SEQ ID NO: 197480 - protein, 212 aa, Unknown
  Bacterial polypetide isolated from the Sargasso Sea
RAPDAVFELNLPVLGICYGMQTMATQLGGKVEGSNTREFGYAEVRAHGHTKLLEGIEDFATAEGHGMLKVWMSHGDKVTELPPGFKVMASTPSCPIAGMADEARRYYAVQFHPEVTHTVQGQALLNRFVLDICGTQADWIMGDYIEEAVAKIREQVGDEEVILGLSGGVDSSVAAALIHRAIGDQLTCVFVDHGLLRLNESDMVMDMFEGKL

SEQ ID NO: 197481 - protein, 184 aa, Unknown
  Bacterial polypetide isolated from the Sargasso Sea
MQNKVLIVDFGSQYTQLIARRIRELFIYCEISPFNNIPEDLNQYKAIVLSGSPFSVNQENSPEINLKSILGNIPLIAICYGAQLIAKSLNGKVENSNSREYGRANLSFIEKDCKLFHNIKINNQVWMSHGDTITTLPDGARVIASTDSVTNAAYSIDSLNLYALQFHPEVFHTDNGLKYLKTFS

SEQ ID NO: 197482 - protein, 261 aa, Unknown
  Bacterial polypetide isolated from the Sargasso Sea
FLEDKKKILIIDFGSQVTKLIARRIRDLGVYSEVITPTEIKNIKSFNFIKGIILSGGPSSVTKLSFQSIPRNILLKKIPILGICYGLQLISKLNGGKIKSSKKRREFGRAYIFKKKDSLLTKNFFKPKMSVWMSHEDAVVKLPKNFSAVAYTKDSKLTIIENKKQKIYGVQFHPEVTHTHNGEQIFKNFLFSICKLRKNWSVVSQKKRLIKELKNTIKKDKVICALSGGVDSSVVALLINKAIKKNLICIMVDTGLMRKNE

SEQ ID NO: 197483 - protein, 274 aa, Unknown
  Bacterial polypetide isolated from the Sargasso Sea
GIQFHPEVYHSSDGKKLLKNFLVNISDINPNWTASSFVDKTIYDLKNIIGNESVVLGLSGGVDSSVAAVLLNKAIKNNLYCVFIDNGLLRKNEFDSVLKQYEGMGLNVKGVDAKDKFYSALKNIDDPEKKRKVIGKVFVDVFDQESKKIKNVKWLGQGTIYPDVIESISVKGPSATIKSHHNVGGLPDYMKLKVIEPLKMLFKDEVRRVGKELKISDKILKRHPFPGPGLAIRILGDINEEKVKILQDADDIFISELISNNIYDKTWQARCYFT

SEQ ID NO: 197484 - protein, 120 aa, Unknown
  Bacterial polypetide isolated from the Sargasso Sea
MKSNDKILILDFGSQYTQLIARRVREIGVFSEVKPSSISTEEIIKINPSGIILSGGPETVTISSSQKVHKSLLEAKIPILGICYGMQTIANELGGTVVKSDIREFGHAEISHVNQSILFD

SEQ ID NO: 197485 - protein, 266 aa, Unknown
  Bacterial polypetide isolated from the Sargasso Sea
RRQCLLRLNEGDQVMETFSEHMNLNVIRVNAEDIFLERLKGIDDPEDKRKIIGRTFIEVFEDEASKLENVKWLAQGTIYPDVIESAGSKTGKAHVIKSHHNVGGLPEDMKLKLVEPLRDLFKDEVRKIGKELGLTSKLVDRHPFPGPGLGVRILGEVKKEFADLLRSADDIFIEELHKENLYNKVSQAFAVFLPVKSVGVMGDGRKYEYVIALRAVETTDFMTANSSKLPYEFLDHVSTRIINEVSGISRVTLDISSKPPSTIEWE

SEQ ID NO: 197486 - protein, 169 aa, Unknown
  Bacterial polypetide isolated from the Sargasso Sea
SHHNVGGLPKRMKLKLVEPLRELFKDEVRKLGLEMRLPKKFINRHPFPGPGLGIRILGEVTAVRVKILQEADNIYIEEIKEAGLYDKIWQAFAVLMPIKTVGVMGDHRSYEQVCGLRAVTSVDGMTADFYPFKAEFLSKVSTRIINEVKGINRVVYDTTSKPPGTIEWE

SEQ ID NO: 197487 - protein, 261 aa, Unknown
  Bacterial polypetide isolated from the Sargasso Sea
LRKNEANEVSEIFSKKFGNNFIKINASNIFLKNLKNVSDPEKKRKIIGKTFIEVFDKAAKKISNVDYLGQGTLYPDIIESIPFFGGPTAKIKSHHNVGGLPKKMKLKVIEPLRELFKDEVRNVGRELKIDKQLLLRHPFPGPGLAIRIPGVIDKKKILILQEADYIFIQFLKEKKLYNKIWQAFVVLLPVKSVGVMGDERTYNYSVSLRAITSVDGMTADFYMFTNNQLKEISSRIINNVKGINRVLYDFTSKPPGTIEWE

SEQ ID NO: 197488 - protein, 281 aa, Unknown
  Bacterial polypetide isolated from the Sargasso Sea
YLLHKAIGNNLFCIFVDHGFLRYNESFEVSNIFNKKFGKNFIRVNASKIFFQRLKKIKDPEKKRKIIGKTFIEVFEKEAKKIKNIEFLAQGTLYPDIIESVPFFGGPTAKIKSHHNVGGLPKKMKLKIIEPLKELFKDEVRKLGKKLKIHSELLNRHPFPGPGLAIRIPGEINRAKIKILQKVDNIFISYLKENNLYNDIWQAFAILLPIKSVGVMGDERTYSYCVSLRAVTSVDGMTADFFIFKKKHLTEISKRIISETKEVNRVLYDFTSKPPGTIEWE

SEQ ID NO: 197489 - protein, 294 aa, Unknown
  Bacterial polypetide isolated from the Sargasso Sea
KIPVLGICYGLQLITKLFGGSVNQIKTYREFGRSTLLKRNNSLLTKNFFINRKAIVWMSHQDSVTKIPKNFKKIAYTKDSVSTIIANEKRNIYGIQFHPEVTHTERGKIILKNFLFSICKIKKNWKLSNEKNKLIAKIREQVGSNKKVLCALSGGVDSTVVALLLNKAIKKNLKCIMVNTGLMRKNEFEYSSNILRKKYKLNIKIINSNKLFLKRLKNVSDPEKKRKIIGALFIKIFEKEAKKIKNVKFLAQGTLYTDLIESKSATGSKTSKIKSHHNVGGLPKKMNLVLVEPT

SEQ ID NO: 197490 - protein, 330 aa, Unknown
  Bacterial polypetide isolated from the Sargasso Sea
RIWQTLITHIHKSKLFQNFKLINKQHYVWMSHGDKAIRLPNDFTTIAKSKNSKFVGIENKKLNIYGLQFHPEVVHTHQGEKIIKNFIINICKTKPTWSMQNYLKTQVAKIKIKVEKNHVICGLSGGVDSMVTAAIISKAINKQLTCIYVDTGLMRLNETEEVESLFKKHFKSKLITVNAKNRFFSSLKGVSDPEKKRKIIGNLFIKIFNAESSKISKAKFLAQGTIYPDIIESQSFHGGPTSVIKSHHNVGGLPKEMKLGLVEPLQELFKDEVRRLGKELKLPKEFIQRHPFPGPELGIRVLSDITIDKVRMLQHADKIYIDEIKAADLY

SEQ ID NO: 197491 - protein, 249 aa, Unknown
  Bacterial polypetide isolated from the Sargasso Sea
FKKKLKLKIIYIDASKIFTKRLKNIVNPEKKRKIIGKLFIQLFEKHAKKIRKVKFLAQGTLYPDLIESKTVTGSPSSKIKSHHNVGGLPKKMNLSLVEPLSSLFKDEVRKLGQELSLPKELLLRHPFPGPGLAIRIPGKITIEKIDILKEADFIFTNELKKTRLYNKIWQAYAALLPLKTVGVMGDKRTYEYTCLLRAVTSEDGMTADFYSFDKNFFQNVSNKIINSVNGINRVVYDITSKPPSTIELE

SEQ ID NO: 197492 - protein, 309 aa, Unknown
  Bacterial polypetide isolated from the Sargasso Sea
LGICFGHQILSKFCGGKVKQSKYREFGLANIFKKNNSPIIKNFFSHKKKLKVWMSHADQVSKIPKNFKVIASSDNSKYALVESKSRKFFGVQFHPEVTHTENGKKIISNFIFLICKIKKNWSPRDQKVKLIREIKEQVGSSKVICALSGGVDSSVVAQLLNKAIGKKLYCIFVNTGLLRKNEEKQVVKTFKKKLKINLTYVNAENEFLKKLKNISDPEKKRKIIGNLFIKIFEKYSKKIKNVRFLAQGTLYPDLIESRSVTGSQTSKIKSHHNVGGLPKSMKLNLVEPLKFLFKDEVRKLGLELNLSKE

SEQ ID NO: 197493 - protein, 65 aa, Unknown
  Bacterial polypetide isolated from the Sargasso Sea
GDARKYDWVVSLRAVETIDFMTAHWAHLPYDLLGKVSNRIINEINGISRVVYDISGKPPATIEWE

SEQ ID NO: 197494 - protein, 309 aa, Unknown
  Bacterial polypetide isolated from the Sargasso Sea
PYNRFNSKVLINSKLSGIIYSEVPNSVKDLKSPKLDKKILSLKIPILGICYGLQLICKKFKGKIGQSSSREYGHSLINHNNKSLLFKGLKRTSQVWMSHGDHIEREPKGFVVTSFSNKNVISSIENKKKMIFGLQFHPEVYHSIDGKKILSNFLNNICKITTKFKLEDFLNNKINDLKNTLKNKKVICGLSGGVDSTVTSFLLHKAIKNNLYCIFVDHGLLRFNESKEVVSIFKKKFGKNFIRVDASSIFLRKLKKIKDPERKRKIIGKTFIEVFEKEAKKIKNVKFLAQGTLYPDIIESIPFFGGPNC

SEQ ID NO: 197495 - protein, 193 aa, Unknown
  Bacterial polypetide isolated from the Sargasso Sea
MSLDQSLNKILIIDFGSQFTQLIARRVRELGVFSEIVSHKKIKLKDINSSIKGIILSGGPLNVYQINKYSFNKKILQLDLPVLGICFGHQILSKLNGGRVKQSKHREFGLANVYKKNNSLLTSNFFGNKKSKQVWMSHADQVSKLPKNFKVVASSTNSKFAIVENKIKKYYGVQFHPEVTHTENGKKLISNFI

SEQ ID NO: 197496 - protein, 193 aa, Unknown
  Bacterial polypetide isolated from the Sargasso Sea
AQGTIYPDVIESSESESKEARIIKSHHNVGGLPDEMKMTLVEPLRDLFKDEVRRMGALLGLPKEILNRHPFPGPGLGVRILGEINQENISILQEADSIFIEELKKNDLYDEVSQAFCVYLPIKSVGVVGDERRYADVIALRAVKTIDFMTAEWSKLPYDFLGKVSNRIVNELEGVSRVVYDISGKPPATIEWE

SEQ ID NO: 197497 - protein, 231 aa, Unknown
  Bacterial polypetide isolated from the Sargasso Sea
MILIVDFGSQYTLLIAKTLRQVGVYSEVCPYHRMHEVYPQCTDCTGVILSGGPCSVNDSDAPRVEWESLSVPVLGICYGAQLMASCLSGVTVNSSGASSGAEYGEQTLDWTPDSVTDAWCATWSSQTTTSPPFSSATASSGTASSATVWMSHGDHIVVSSILDDADEDKRPSMVPLAYSSAATTSGSSERVLAAFAIRPSGQQPSRYGVQFHPEVTHTSHGASLLHTFATQ

SEQ ID NO: 197498 - protein, 219 aa, Unknown
  Bacterial polypetide isolated from the Sargasso Sea
KRKIIGDQFIKSFDKISDDLGGYKYLGQGTLYPDIIESGISTGNSAHVIKSHHNVGGLPKDFRFKLIEPLKDLFKDEVRAVGNKLGISRALIDRHPFPGPGLGVRIIGEVTKERVSILQNADAIFIRVLNEMGEYENIWQAFAVLVPVKTVGVMGDQRTYENLIALRAVTSIDGMTADWYKMPPEVLSLVSSEIVNNVQGVNRVVYDITSKPPGTIEWE

SEQ ID NO: 197499 - protein, 297 aa, Unknown
  Bacterial polypetide isolated from the Sargasso Sea
LYKIRDYKKIKGIVLSGGPSTVTKKKYLKIPKEIFLKKIPVLGICYGLQLITKLFGGSIKSLRKKREFGRAILYKKRKSLLIKNFFNTKKKSVWMSHQDAVTKLPKGFKVVASTKDSKLTIIENTKIKIYGVQFHPEVTHTENGKEIFKNFLFSICKMKKKWRAASEVNRLINDIRKTVKKDKVICALSGGVDSSVVALLVNKAIKKNLICIMVDTGLMRKNEFKDTYYIFKKKYKLNVKLINASKLFLKKLKNIHNPEKKRKIIGNLFIKIFEKESKKYKSIKYLAQGTLYPEYYR

SEQ ID NO: 197500 - protein, 213 aa, Unknown
  Bacterial polypetide isolated from the Sargasso Sea
FIFKIVDIKNKFRIKKFIENKVSELKNEINNKKIICGLSGGVDSTVTAYLLSKAVNKNLYCIFVDHGLLRKNEANEVSKIFSKKFGNNFTKINASNIFLKKLKNVSDPERKRKIIGKTFIEVFDKAAKKISNVDYLGQGTLYPDIIESIPFFGGPTAKIKSHHNVGGLPKKMKLKIVEPLRELFKDEVRNVGKQLKIDKHLLLRHPFPGPGLA

SEQ ID NO: 197501 - protein, 218 aa, Unknown
  Bacterial polypetide isolated from the Sargasso Sea
MRLEDTLNKILIVDFGSQFTQLIARKIRELGVYCEIISHKKIEKFTKFEKNIKGIILSGGPLNVYESKKVKFNNKILKLGVPVLGICFGHQIISKAMGGSVRSSKHREFGLAEVKETRKSKLTKNFFSNRKNNVWMSHADQVTKLPKNFKIIAQSKNSKMCIIENFEKKMFGIQFHPEVSHTIKGKLILKNFIFSICKLTKDWSSRDQKKKLINEVRN

SEQ ID NO: 197502 - protein, 155 aa, Unknown
  Bacterial polypetide isolated from the Sargasso Sea
MKSSDKILILDFGSQYTQLIARRVREIGVFSEVKPSSISIDKILELNPSGIILSGGPETVTISSSQKVHKSLLELKIPILGICYGMQTIANELGGLVVKSDVREFGHAEISHINQSVLFDDISFDSNTLDVWMSHGDKVEVLPENFEIIASSKDV

SEQ ID NO: 197503 - protein, 276 aa, Unknown
  Bacterial polypetide isolated from the Sargasso Sea
ATKFSEDNILIIDFGSQYTQLIARRVREEGVFCQIIPYNKVSKYIINNNPKGIILSGGPSSVLGIETPRISKEIIDMGKPILGICYGQQVLVQQLGGTVVSSQKSEFGRANIKVVSSCSLTDQVWDEGKKYQVWMSHGDSVVEMPEGFDLVAETEGAAFAVIANEKTKQYGVQFHPEVVHTLDGKKLIHNFVKKISLCKTTWSMESFLDYKVDILKNQVGLKKVLCGLSGGVDSSVTAALLDKAIGDQLVCVFVDHGLLRGGEAEEISSIFKKRLG

SEQ ID NO: 197504 - protein, 286 aa, Unknown
  Bacterial polypetide isolated from the Sargasso Sea
TERGKTILKNFVFTICMIKKNWSSKNQKKILIEDVKKIVGNSRVICALSGGVDSSVVAKLIHNAIGKKLTCIFVNTGLLRKNEEVQVVKTFRRKFRINLIYVDAKNLFLNKLNKVNDPEKKRKIIGNLFIKIFEKYAKKIQNIKYLAQGTLYPDLIESKSVTGSQTSKIKSHHNVGGLPKKMKLKLVEPLRLLFKDEVRKLGLELKLSKDIVLRHPFPGPGLAIRMPGEITKNKIKILKDADDIFINSLKDFNLYDKIWQAYAALLPVKTVGVMGDNRTYEYMCLL

SEQ ID NO: 197505 - protein, 168 aa, Unknown
  Bacterial polypetide isolated from the Sargasso Sea
MVLVLDFGSQYTQLIARRIRELNVFSVILPWDVSPKKIQYLNPKGVILSGGPESVTESNTPRIPKIIFELDVPLLGICYGMQTLAEQFGGQVSSSKNKEFGHAQIFLEKPSLLFDGFSLGSSIDVWMSHGDHVSTLPDEFNLIASTTSAPIAAMEHAQKPIYALQFHP

SEQ ID NO: 197506 - protein, 318 aa, Unknown
  Bacterial polypetide isolated from the Sargasso Sea
PEVVHTERGTDILKNFVLNVCKAKQEWTMEGFVEKTVKEISEIEGNVLCGVSGGIDSTVAALLIHKAIGDRQTGVFVDNGLLRLDESKEIEDMFKNNFSLNFHRVDASEQFLSKLKGITDPEQKRKIVGEEFIQVFTEFAKQKGPFKWLAQGTLYPDVIESGVSKGPAAVIKSHHNVGGLPEWLNLKILEPLRELYKDEVRDVARILGVPEKLLKRHPFPGPGLSVRIMGEITPSKLAICRKASKIVEEELWDAGVYDKVWQAYAAVGDDKAVGVVGDERKYGRIVTVRVVDSIDAMTADWTRLPNGVLEKSVTGLLM

SEQ ID NO: 197507 - protein, 83 aa, Unknown
  Bacterial polypetide isolated from the Sargasso Sea
KVSQAFAVFLPVKSVGVVGDSRRYEYVISLRAVETIDFMTAKSAKLPHVFLEKVSNRIINEIPEVSRVTYDISSKPPATIEWE

SEQ ID NO: 197508 - protein, 167 aa, Unknown
  Bacterial polypetide isolated from the Sargasso Sea
CWRIPDDMEMKLCEPIRELYKDEVRILAEFLDVPVAHRQPFPGPGLAVRVMGEATPKRTEVVRQACHIVETELESASSEGHMEAPWQYFAVLLPVKTVGVQGDVRAYSNTIAVRAVQSYDAMTAQASDVPYPILKNISERITRELKNDVNRVVYDITDKPPGTIEWE

SEQ ID NO: 197509 - protein, 192 aa, Unknown
  Bacterial polypetide isolated from the Sargasso Sea
SFFHERNIKGFILSGGPNSVFEENSPDLPRWVMESKLPILGICYGMQLIAINHQGKVKKTPKREYGNSILNILDSSKLFNGIPKKSNVWMSHGDKVIDLPDDFQIVAKTDNSFCAAFEKDLFYGVQFHPEVDNTDYGKEILKNFALDICNISDNWSAKNFINKSIENIRKEIGNSKVICGISGGVDSSITAT

SEQ ID NO: 197510 - protein, 214 aa, Unknown
  Bacterial polypetide isolated from the Sargasso Sea
MVNDQHNDSILILDFGSQVTQLIARRVRESGIYSEIFPFSKADEAIKKLKPKGIILSGGPASVNNQDAPTIDDKIFDLKIPILGICYGQQIMCSLLGGEVEKSNEREFGRANIKFLKPSPLFEGFDIKGNTEPVWMSHGDKVTKLPKGFEVIAESKNAPFAAISDEIRSFYGVQFHPEVVHTPNGAKLLKNFTHKISGCSGNWTMDSFKKVAIE

SEQ ID NO: 197511 - protein, 208 aa, Unknown
  Bacterial polypetide isolated from the Sargasso Sea
MQKILVVDFGSQYTQLIARRLRELNVYSEVYPWDEMPNLESVDGFVLSGGPESSNIEGNPNISDEIFESNKPILGICYGMQVLAFQEGGEIQNEGKKEFGYAKIDLNNQTSLFTDTSDSIDVWMSHGDKVISLPEGYETLASSDNSPIAAYQNLEKNYFGLQFHPEVTHTDFGLKIIENFINVCGVERNWNADDILKNIHNQAKTEVG

SEQ ID NO: 197512 - protein, 277 aa, Unknown
  Bacterial polypetide isolated from the Sargasso Sea
MSVQPKLDTKSKSIDTILVLDFGSQYTQLIARRIRESDVYSEILPWDVDIKKIEDINPKGIILSGGPESVTDIHTPRAPKIVFDLQVPILGICYGMQTLAEQMGGQVTTSEKKEFGFSTFKIEDESRLLAGSSSEIIDVWMSHGDKVETLPNDFKLIGSTESAPIAAMEHISQSIYALQFHPEVTHTKGGKLILDNFIFEICSCKPDWKLDDLISSRIEEIKNATNGEKVLLGLSGGVDSSVTAALLSKAIGENLVCVFVDNGLLRKNEAEEVVKHQ

SEQ ID NO: 197513 - protein, 269 aa, Unknown
  Bacterial polypetide isolated from the Sargasso Sea
MSLKDSLSKVLIIDFGSQFTQLIARRVRELGVYSEIISHKKFKSKLDKKKIRGIILSGGPLNVYQSKKVKFDKKIFKYNIPILGICFGHQIISKELGGRVKKARHREFGLAKLKRLRKSKLTKNFFKKSGSNKVWMSHADEVTKLANGFKVIAKTETSKFSIVENSSKKFYGIQFHPEVTHTEKGKIILKNFIFSICSFKRNWSLKNQKQILIKNVKQVVGKSKVICALSGGVDSSVVAKLIHNAVGKQLTCIFVNTGLLRKNEETQVV

SEQ ID NO: 197514 - protein, 175 aa, Unknown
  Bacterial polypetide isolated from the Sargasso Sea
TAQTIKTHHNVGGLPEDMNFEIIEPLKMLFKDEVRQVGLTLGLTEDIVFRHPFPGPGLAIRILGEPTKERAQILQKADAIVMEEIKKAGLYRRIWQAFAVLLPVKSVGVMGDQRTYQNTCAIRCVTSDDAMTAKWAQIPYEVLEAMSNRIINEVDGINRVVYDISSKPPATIEWE

SEQ ID NO: 197515 - protein, 103 aa, Unknown
  Bacterial polypetide isolated from the Sargasso Sea
KLREADHIFLTELKSSGFYNKASQAYAFYLPIKSVGVVGDNRIYADVIGLRSVDTSDFMTAKVTNLPNDFVQHVSTRIVNEVQGVSRVVYDITSKPPATIEWE

SEQ ID NO: 197516 - protein, 196 aa, Unknown
  Bacterial polypetide isolated from the Sargasso Sea
MNLKDDLSKILIVDFGSQFTQLIARRIREFGVYSEIISHKKINSRMRRDKIKGIILSGGPLNVYQSKKVKFNREIFKWNIPILGICFGHQLITKELGGKVRQAKHREFGLAKLKRLNKSKLTNNFFKKPGACNVWMSHADEVIRLARGFKVIAKTETSKFSVIENSLMKLYGNSFHPEVSHTENGKKIIFKLYFFL

SEQ ID NO: 197517 - protein, 238 aa, Unknown
  Bacterial polypetide isolated from the Sargasso Sea
ICGLSGGVDSSVAAVLIHKAIGDNLYCLFIDNGLLRSGERDKVEKTFRDNFNINLDVIDASDKFLNKLKGINDPEKKRKSIGNTFIDVFEEEGKRLGDFTFLAQGTLYPDVIESISFKGPSAVIKSHHNVGGLPEKMNLKLLEPFRELFKDEVRELGREMGISDEIINRQPFPGPGLAIRILGNISRKRLKILCAADKIILEEIKKAGLYNDLWQSFAVLLPVKTVGVMGDSRTYENV

SEQ ID NO: 197518 - protein, 211 aa, Unknown
  Bacterial polypetide isolated from the Sargasso Sea
GAPQIDPAIYELDIPILGICYGAQLIAQQLGGTVSQFEAGEYGRTSLRVVGGNLLSDQPNEQDVWMSHFDCITQTPAGFTMTASTKNAPVAAFENQRIFGVQYHPEVSHTAYGQQTIEKWLDLAGIKKTWTMTNVIEEQVAAIRSQVGKERAICGLSGGVDSAVAAALVHKAIGNQLTCVFVDTGLMRKNEGQQVVETFQKTQGIELIHVK

SEQ ID NO: 197519 - protein, 95 aa, Unknown
  Bacterial polypetide isolated from the Sargasso Sea
MTRNRDLILILDFGSQYTQLIARRIRELGIFSLVEPYNISVSKIRELNPKGIVLSGGPNSVNFSKTLRPRRDIFNLKIPILGICYGMQLIAKEFG

SEQ ID NO: 197520 - protein, 269 aa, Unknown
  Bacterial polypetide isolated from the Sargasso Sea
NKLTSIFVDNGLLRKGESEDVMNFLKNNLGLNIIKVDARENFLNKLKNIIDPEKKRKIIGKEFIDVFEKEAKKIDDVKYLAQGTLYSDIVESAVTKNGHQVVIKSHHNVGGLPEKMNLKLLEPLKLHFKDEVRDIGYELGIDKEIIERHPFPGPGLAIRIIGKITKQKLNILREADHIFIDEIKKAELYDEIWQAFAVLTNIQSVGVMGDNRTYQNCIAIRAVNSKDAMTADWSKIPYEVLSSISSRIINEVDGINRVVYDITSKPPGT

SEQ ID NO: 197521 - protein, 213 aa, Unknown
  Bacterial polypetide isolated from the Sargasso Sea
MSQEFLKKERDPSILILDFGSQYSELIARRIRETNVFSLVVSNCISIENINDINPKGIILSGGPNSVYEQNSPKCDKKIFDLGIPILGICYGMQLMVNELGGSVTAATKKAEYGRAPINIDLECELLSDVNDKSIMWMSHGDSINCLPDGFNKIAHTENTLHAAISNDKKKLFGVQFHPEVVHSEQGMTVIKNFVYKISHCKADWTTETFLDE

SEQ ID NO: 197522 - protein, 296 aa, Unknown
  Bacterial polypetide isolated from the Sargasso Sea
MSTKIAGCTGDWTMANFREEEIAKVRKQVGDGNVICGLSGGVDSSVAAVLIHEAIGEQLTCIFVDHGLLRQGEAEQVVETFRDRFNIKLVHRDASELFISELEGKGDPEEKRKIIGRLFIEVFEEEAQKTGGADFLAQGTLYPDVIESVSFTGGPSVTIKSHHNVGGLPERMNMELVEPLRELFKDEVRDLGRELGIPEDIVGRHPFPGPGLAIRLPGGITREKLDILRQADAIYIEEIRNAGLYDTIWQAFAVLLPVRTVGVMGDDRTYDYACTLRAVTSTDGIRADYYPFEHEF

SEQ ID NO: 197523 - protein, 256 aa, Unknown
  Bacterial polypetide isolated from the Sargasso Sea
MIKEIRDQVGQNKVICALSGGVDSSVVAQLLNKAIGKKLYCIFVNTGMLRKYEEKQVVKTFKKRLKINLIYVNAENEFIKKLKNISDPEKKRKIIGNLFIKIFERYAKKIKNVKFLAQGTLYPDLIESRSVTGSQTSKIKSHHNVGGLPKKMKLKLVEPLKFLFKDEVRKLGLELNLSKEIVLRHPFPGPGLAIRMPGHITKDKIKILKDADFYFIQALKDHKLYHKIWQAYAALLPVKTVGVMGDNRTYEYLCLL

SEQ ID NO: 197524 - protein, 281 aa, Unknown
  Bacterial polypetide isolated from the Sargasso Sea
ALLIQKAIGDRLTGVFVDNGLLRLDESKEIEDMFKNNFSLNFHRIDASEQFLSKLKGITDPEQKRKIVGEEFIQVFTEFAKQKGPFKWLAQGTLYPDVIESGVSKGPAAVIKSHHNVGGLPEWLNLKILEPLRELYKDEVRDVARILGVPEKLLKRHPFPGPGLSVRIMGEITPSKLAICRKASKIVEEELWDAGVYDKVWQAYAAVGDDKAVGVVGDERKYGRIVTVRVVDSIDAMTADWTRLPNGVLEKISNRITNEIDEVTWVSYVISSKPPATIEPQ

SEQ ID NO: 197525 - protein, 256 aa, Unknown
  Bacterial polypetide isolated from the Sargasso Sea
FGYAKINLSNQTSLFINTSDSIDVWMSHGDKVISLPEGYETLASSDNSPIAAYQNLEKNYFGLQFHPEVTHTDHGLKIIENFINVCGVNRNWNADDILKSINNQVKNEVGDGKVLLALSGGVDSTVLASVLHKNLGDRLVCVMVDHGLLRKDEANNVVTNLKEKIGLKVNLINAQAAFLKKLEGIKDPEEKRKIIGNTFIEVFEAEAKKLEGIEWLAQGTIYPDVIESAGNSKSKAKVIKSHHNVGGLPERMNLKL

SEQ ID NO: 197526 - protein, 229 aa, Unknown
  Bacterial polypetide isolated from the Sargasso Sea
FFNKLKNVSDPELKRKIIGKLFIKLFEKKAKKIKFLAQGTLYPDLIESKSVTGSPTSKIKSHHNVGGLPKKLKFSLIEPLKTLFKDEVRKLGKELSVPKNILQRHPFPGPGLAIRIPGKISKYKIKILQEADFIFIDELKKSNLYNKIWQAYAALLPLKTVGVMGDSRTYEYTCMLRAVTSHDGMTADFYNFKKNFIQKVSNRIINSVNGINRVLYDVTSKPPSTIELE

SEQ ID NO: 197527 - protein, 237 aa, Unknown
  Bacterial polypetide isolated from the Sargasso Sea
MSANLSSTSKIIDTILVLDFGSQYTQLIARRVRESNAYSEILPWDIDEKKIKSINPRGIILSGGPDSVTESYTPRIPQIIFDLNVPILGICYGMQTLAEQFGGQVISSEFKEFGYSELKVKTDSILFSNLNNTLNVWMSHGDQVQDLPDNFDLLASSTSAPIAAMQHLTEPIYALQFHPEVTHTDDGKTILDNFIFKICKVNSDWKMDDLIDQRIREIKDKVQNNKVLLGLSGGVDS

SEQ ID NO: 197528 - protein, 130 aa, Unknown
  Bacterial polypetide isolated from the Sargasso Sea
MQFQNKKDLVLIIDFGSQVTKLIARRVRDLGVYSEILTPSQINKITDFEKIKGIILSGGPSTVTKKSFQSIPKHILKKKIPILGICYGLQLIAKLHGGRIKSSKKKREFGRAFIFKQKNSLLTKNFFNGK

SEQ ID NO: 197529 - protein, 194 aa, Unknown
  Bacterial polypetide isolated from the Sargasso Sea
MDLNNNLNKILIIDFGSQFTQLIARRIRELGVFSEIISHTKLSSKLNKTDVKGIILSGGPLNVYQSKKVKFSKDIFKWKIPTLGICFGHQVISKELGGNVKKAKSREFGLAKLKRLSRSILTDNFFDKKGSSNVWMSHADEVTKLAKGFKAIAKTETSKFSIVENSSRKLYGIQFHPEVTHTEKGKIILKNFLF

SEQ ID NO: 197530 - protein, 189 aa, Unknown
  Bacterial polypetide isolated from the Sargasso Sea
LYPDIIESKSATGSKTSKIKSHHNVGGLPKKMNLKLIEPLKEFFKDEVRVLGASLGLNKSINFKHPFPGPGLGIRIVGKITSDKLKILQEADDIYIKELTKSGHYNKIWQAYAALLPIKTVGVMGDSRTYEHICLLRAVTSEDGMTADYYSFPKKFLDNISNKIINNVKGINRVVYDITSKPPSTIELE

SEQ ID NO: 197531 - protein, 280 aa, Unknown
  Bacterial polypetide isolated from the Sargasso Sea
LLGLSGGVDSSVVAALLARSIGKRLVCVFVNNGLLRLDEVEQVQKMVKTGFGSGISFEFRIVDAESIFLDRLAGTDDPEEKRKIVGNTFIEVFEQEAKKLKDIHFLAQGTIYPDVIESAEGKGSKAHVIKSHHNVGGLPRNMSLKLIEPLRQLFKDEVRQLGRQLGLPSTMIDRHPFPGPGLAVRILGEVRKEFLTVLRRADKIFMDELHSHELYEKVSQAFVVFLPVKSVGVVGDSRRYDYVVSLRAVETLDFMTATWARLPHEFLDLVSRRIMNEVEE

SEQ ID NO: 197532 - protein, 155 aa, Unknown
  Bacterial polypetide isolated from the Sargasso Sea
KLVEPLRDLFKDEVRKIGKELGLTSKLVDRHPFPGPGLGVRILGEVKKEYADLLRLADDIFIEELHKENLYDKVSQAFAVFLPVKSVGVMGDGRKYEYVIALRAVETTDFMTANSAKLPYEFLDRVSTRIINEVSGISRVTLDISSKPPSTIEWE

SEQ ID NO: 197533 - protein, 245 aa, Unknown
  Bacterial polypetide isolated from the Sargasso Sea
DSARLLAKLEGVTDPEKKRKTIGAQFIEVFKEYKDDVEKKTGVRPKFLVQGTLYPDVIESCPPPGSDQKHSHTIKSHHNVGGLPKELGFELVEPLRMLFKDEVRKLGLLMDVPQAFISRHPFPGPGLAVRVLGDVCAEGALDTIRAVDEIYINAIKDAGLYDKIWQAFAVFLPIKSVGVQGDQRTHSHVVGLRAITSSDGMTADWYQFEPKFLQEVSAKICNEVKSVNRVVYDITSKPPSTVEWE

SEQ ID NO: 197534 - protein, 212 aa, Unknown
  Bacterial polypetide isolated from the Sargasso Sea
LFIKIFEQESKKYKSIKYLAQGTLYPDVIESRSATGSQSSKIKSHHNVGGLPRKMNLKLIEPLKEFFKDEVRVLGKSIGLDNSIRNKHPFPGPGLAIRIIGNITSQKIKILQEADHIYINELTKHKLYKKIWQAYAGLLPMKTVGVMGDARTYEYTCLLRAVVSEDGMTADYFSFPKDFLDKISNKIVNGVPGINRVVYDITSKPPSTIELE

SEQ ID NO: 197535 - protein, 196 aa, Unknown
  Bacterial polypetide isolated from the Sargasso Sea
MVLDFGSQYTQLIARRVRESDVYSEILPWDIPEEKISNLKPKGIILSGGPNSVTESFTPRVPKCVFDMGVPILGICYGMQTLAEQMGGQVISADQKEFGHTELEIASDSILFAGLEKKINVWMSHGDQVQDLPDEFNLTALTATAPIAAMEHISLPIYAIQFHPEVTHTDHGQKILDNFIFNICHAKTDWKMDDLI

SEQ ID NO: 197536 - protein, 251 aa, Unknown
  Bacterial polypetide isolated from the Sargasso Sea
KTFKKRLKMNLIYVNAEREFLKKLKNVTEPEKKRKIIGNLFIKIFERYAKKIKNVKFLAQGTLYPDLIESKSVTGSQTSKIKSHHNVGGLPKKMNLKLVEPLKFLFKDEVRKLGLELNLNKEIISRHPFPGPGLAIRMPGIITNEKIKILKEADYYFIQALRDHGLYNKIWQAYAALLPVKTVGVMGDNRTYEYLCLLRAITSEDGMTADYYEFKKSFLQTVSNKIVNSIRGINRVVYDVTSKPPSTIELE

SEQ ID NO: 197537 - protein, 260 aa, Unknown
  Bacterial polypetide isolated from the Sargasso Sea
NQNVRGIVLSGGPLNVYQIQKYSFDKKILELNIPILGICFGHQILSKLHGGRVKQSRHREFGLANIFKKRDSLLTKNFYGLKKTKQVWMSHADQVSKLPKNFKVIASSTNSKYAIVENKQKKFYGVQFHPEVTHTENGKKLISNFVFLICKIKRNWSSRDQKIKLIREIRDRVGINKVICALSGGVDSSVVAQLLNKAIGKKLYCIFVNTGLLRKNEETQVIQTFKKRLKMNLIYVNAEKEFLGKLKNISDPEKKRKIIG

SEQ ID NO: 197538 - protein, 174 aa, Unknown
  Bacterial polypetide isolated from the Sargasso Sea
MVTIKSHHNVGGLPERMNMELVEPLRELFKDEVRELGKELGIPSHFIERHPFPGPGLAIRLPGEISSEKADILRKADTIYIEEIRKAGLYNEIWQAFAVLLPVQTVGVMGDERTYDFVCALRAVTSLDGMTADYYPFEQEFLANVSTRIINEVKGINRVVYDITSKPPGTIEWE

SEQ ID NO: 197539 - protein, 297 aa, Unknown
  Bacterial polypetide isolated from the Sargasso Sea
PWDEIPVMDDVEGFILSGGPESSNLEGNPTIDDLLFNSNKPILGICYGMQVLAHQEEGQIINEGKKEFGYAKINIKADTVLFKNISDSLDVWMSHGDKVQSLPDGYAITATSDNSPIAAYENISKKYFGLQFHPEVTHTENGIAIIKNFLDICGIEQNWSSDDILQQIDAVVAAEVKDEEVLLALSGGVDSTVLAAVLHRTLGNRLTCVMVDHGLLRKDEAQNVVTGLKDKLGLLVNLVNAQDIFLSKLEGVTDPEQKRKIIGNTFIEVFESESKKLNDTKWLAQGTIYPDVIESAR

SEQ ID NO: 197540 - protein, 270 aa, Unknown
  Bacterial polypetide isolated from the Sargasso Sea
PNAPYAIIGDTERHFYAVQFHPEVHHTPNGQTLFENFISIAGINQNWTMEAYREITIAKIREEVGSKRVICGLSGGVDSSVAAVLIHEAVGDQLTCVFVDHGLLRKGEAEEVVTMFRENYNIALIHADESELFLENLEGQSDPETKRKTIGRLFIDVFQKYANTIENANFLAQGTLYPDVIESVSFKGGPSVTIKSHHNVGGLPEKMGLKLLEPLRELFKDEVRTLGRELKLPENFINRHPFPGPGLAIRCPGKITRNKLEILRNADAVY

SEQ ID NO: 197541 - protein, 270 aa, Unknown
  Bacterial polypetide isolated from the Sargasso Sea
KAIILSGGPDSVTRDGSPRAHSVIFDIGVPLLGICYGQQLMMQQLGGEVKSGVGTAEFGKAFVERKNSSDFIKGWFVDQKEQVWMSHGDHVSKIAPGFEVFGFSPNAPYAIIGDAKRHYYAVQFHPEVYHTPNGQTLFENFISIAGIDQNWTMEAYREIAIRKIRNEVGSKRVICGLSGGVDSSVAAVLIHEAIGDQLTCVFVDHGLLRQGEAKEVVTMFRENYKISLIHADESELFLGELEGQSDPETKRKIIGRLFIDVFQKYANQIE

SEQ ID NO: 197542 - protein, 292 aa, Unknown
  Bacterial polypetide isolated from the Sargasso Sea
TLGQENLLGLYINNGFMRKHESEGILKRYSQLGYKNIQSRNYSSFFLDALTGQVDPQIKRQIIGKTFIKMRDRFLNELNLNPKDWMLGQGTLYPDIIESGGTEYAEIIKIHHNRVKEVLDLENSGKVVEPLKDLYKDEVRKVGTLLGLPESILWRHPFPGPGLSINVLCARGDESFPQIEKSIRKVRDCLKDCECSFHILPVRSVGVQGDQRTYASPVALINTPRNWDWLESQATRITNEVKTVNRVVILLGSNIKDSSAQFNFHKAFCSKDRLDLLREADYKATKFWKNTD

SEQ ID NO: 197543 - protein, 304 aa, Unknown
  Bacterial polypetide isolated from the Sargasso Sea
GRKLISNFIFLICKIKRNWSSKDQKNQLIKDVRKQVGSSKVICALSGGVDSSVVAQLLNKAIGKKLYCIFVNTGLLRKNEEVQVVQTFKKRLKINLIYVNAEKEFLKKLKNVSDPEKKRKIIGNLFIKIFERYAKKIKNVKFLAQGTLYPDLIESKSVTGSQTSKIKSHHNVGGLPKKMNLKLVEPLKFLFKDEVRKLGLELNLSKEIISRHPFPGPGLAIRMPGIITNEKIKILKEADYYFIQALKDCGLYHKIWQAYAALLPVKTVGVMGDNRTYEYLCLLRAITSEDGMTADYFEFKKSFM

SEQ ID NO: 197544 - protein, 150 aa, Unknown
  Bacterial polypetide isolated from the Sargasso Sea
MSQSSSDGQRQPAIVILDFGSQYSELIARRVRETEVFSVVLGYSTSAEELRAIQPKGIILSGGPSSVYAEHAPLCDPEIWELGIPVLGVCYGMQLMVQQLGGVVEAASGKAEYGKAPLEVDDPTDLLTNVTGGSTMWMSHGDSVKALPEG

SEQ ID NO: 197545 - protein, 158 aa, Unknown
  Bacterial polypetide isolated from the Sargasso Sea
MKLKLVEPLRLLFKDEVRKLGLELKLSKEIVLRHPFPGPGLAIRMPGEITQQKIKILKDADDIFIKALRDYDLYNKIWQAYAALLPVKTVGVMGDNRTYEYMCLLRAITSEDGMTADTFNFNKDFMQFVSNKIINNIKGINRVVYDITSKPPSTIELE

SEQ ID NO: 197546 - protein, 266 aa, Unknown
  Bacterial polypetide isolated from the Sargasso Sea
MCIYKPGLLRKNEEKEVVKTFKKKLKSNLIYVDASKIFLNKLKNVTDPEYKRKIIGRLFIKLFEKNAKKVKFLAQGTLYPDLIESKSVTGSPTSKIKSHHNVGGLPKKMKFSLVEPLKTLFKDEVRKLGKELSVPTNILQRHPFPGPGLAIRIPGRISKYKIKVLQEADFIFIDELKKSKLYDKIWQAYAALLPLKTVGVMGDSRTYEYTCMLRAVTSHDGMTADFFNFEKTFIQKVSNRIINSVNGINRVLYDVTSKPPSTIELE

SEQ ID NO: 197547 - protein, 284 aa, Unknown
  Bacterial polypetide isolated from the Sargasso Sea
KNWSPKDQKIKLINNIKKQVGSSKVICALSGGVDSSVVAQLLNKAIGKKLYCIFVNTGLLRKNEENQVINNFKKKLKINLIYVNAEKEFLKKLNNVSDPEKKRKIIGNYFIKIFESYAKKIKNVKFLAQGTLYPDLIESKSVTGSESSKIKSHHNVGGLPKKMKLKLIEPLKFLFKDEVRKLGLELNLSKSIISRHPFPGPGLAIRIPGLITKEKLKILKDADYYFIKALKDHGFYHKIWQAYAALLPVKTVGVMGDNRTYEYICLLRAITSEDGMTADFYDFK

SEQ ID NO: 197548 - protein, 159 aa, Unknown
  Bacterial polypetide isolated from the Sargasso Sea
RMNMELVEPLRELFKDEVRELGKELGIPDYFIERHPFPGPGLAIRLPGEISPEKADILRKADTIYIEEIRKAGLYNEIWQAFAVLLPVQTVGVMGDERTYDFVCALRAVTSLDGMTADYYPFEQEFLANVSTRIINEVKGINRVVYDITSKPPGTIEWE

SEQ ID NO: 197549 - protein, 306 aa, Unknown
  Bacterial polypetide isolated from the Sargasso Sea
WMSHGDKVISLPEGYETLASSDNSPIAAYQNLEKNYFGLQFHPEVTHTDFGLKIIENFINVCGVERNWNADDILKNIHNQAKTEVGEGKVLLALSGGVDSTVLASVLHKTLEDRLVCVMVDHGLLRKDEANNVVTNLKEKIGLEVNLVNAQETFLEKLKGIKDPEEKRKIIGNTFIEVFEAEAKKIQGIEWLAQGTIYPDVIESAGNSKSKAKVIKSHHNVGGLPERMNLKLLEPFRMLFKDEVRKIGKAINLPDEIIGRHPFPGPGLGIRIIGEVTKERLDKLREADHIFLSEMKKHNLYNQASQ

SEQ ID NO: 197550 - protein, 109 aa, Unknown
  Bacterial polypetide isolated from the Sargasso Sea
MSLKYGLSKILIVDFGSQFTQLIARRIRELGVYSEIISHKKLKSKIDKKSIKGIILSGGPLNVYQSKKVKFNNVILKWGIPILGICFGHQVISKQLGGRVNKQKAENLD

SEQ ID NO: 197551 - protein, 195 aa, Unknown
  Bacterial polypetide isolated from the Sargasso Sea
YLAQGTLYPDIIESKSVTGSGTSKIKSHHNVGGLPKRMKLKLVEPLRDLFKDEVRSLGASLGLDKKILNRHPFPGPGLAIRIVGKITPEKIKILREADNIFMYELKKYNLYSKIWQAYAALLPIKTVGVMGDTRTYEYTCLLRAVTSKDGMTADHFSFPKNFLDNISNKIINNVIGINRVVYDITSKPPGTIELE

SEQ ID NO: 197552 - protein, 251 aa, Unknown
  Bacterial polypetide isolated from the Sargasso Sea
MIYIVDFGSQVTQLIARRVREASVYCEIVSNKNLFHKIKDTKPTGIIFSGGPASVHKSRTPKIDKKIFSLNIPILGICYGMQLIVHQLGGRVEISKEREFGKTLITHTHKSKLFQNIKLKNKQHYVWMSHGDKAIKLPNDFTTIAKSKNSKFVGIENKKLNIYGLQFHPEVVHTDQGEKIIKNFIINICKTKPTWSMQNYLKTQVAKIKIKVKKNHVICGLSGGVDSMVTAAIISRAINKQLTCIYVDTGL

SEQ ID NO: 197553 - protein, 281 aa, Unknown
  Bacterial polypetide isolated from the Sargasso Sea
FLLNKIIKQNLICVYIDTGFMRMGETQEICNIFKKRFKNNFYYLNKKKIFINALKGVIDPEKKRKIIGETFIKIFEKFTKEKKNIRFLAQGTLYPDLIESQSYSGSKTSIIKSHHNVGGLPKKMKLKLVEPFKEMFKDEVRILGKQLGIDRKILLRHPFPGPGLAIRIPGEINEKKIKILQYADSILIKELKKRNIYDKIWQAFTVLIPIKTVGVMGDERTYDYICGIRAVTSVDGMTADYYKFNHKDLSEISTKIVNETNGINRVVYDVTSKPPGTIEWE

SEQ ID NO: 197554 - protein, 277 aa, Unknown
  Bacterial polypetide isolated from the Sargasso Sea
MEKIIVLDFGSQYSHLICRRIREFSVYAELVPYDISPEELKKMNPKGIIFSGGPSSVYNDDAPKPDEELFNFDLPLLGICYGHQLIVNKFGGKVKRANKEYGSSLLSMDKNSALLDGIGESIRAWMSHGDEAEEIPTNFEVIGHTENSHAAAIANTDRTVFGIQFHPEVVHTERGTDILKNFVLNVCKAKQEWTMEGFVDKTVKEISEIDGNVLCGVSGGIDSTVAALLIHKAIGNRLTGVFVDNGLLRLNESEEIEDMFKNNFELNFHRIDASEQF

SEQ ID NO: 197555 - protein, 253 aa, Unknown
  Bacterial polypetide isolated from the Sargasso Sea
MQTQMLVDEAIGELKSRIDDTAIIACSGGIDSTVAAVLAHKAVGSLLHCVYVDTGLMRKDETSEVSEMFSEMGIKLQVVDASARFFESLSGVTDPEEKRKIIGEQFIRVFEEEQGSCAAKYLVQGTIAPDWIESGGGDRDVIKSHHNVGGLPEDVDMTIVEPLREFYKDEVREIARSLGIESSERQPFPGPGLAVRVLGEVTPERVDACREACHIVESRIRESASRGECDLPWQYFATLLPVRSVGVHGDVRV

SEQ ID NO: 197556 - protein, 162 aa, Unknown
  Bacterial polypetide isolated from the Sargasso Sea
LPERMNMELVEPLRELFKDEVRELGKELGIPDHFIERHPFPGPGLAIRLPGEISPEKADILRKADTIYIEEIRKAGLYNEIWQAFAILLPVQTVGVMGDERTYDFVCALRAVTSLDGMTADYYPFEQEFLANVSTRIINEVKGINRVVYDITSKPPGTIEWE

SEQ ID NO: 197557 - protein, 233 aa, Unknown
  Bacterial polypetide isolated from the Sargasso Sea
TFLTRLIGISDSEEKRKIIGSSFIDIFEEEANKIGGADFLAQGTLYPDVIESVSFTGGPSVTIKSHHNVGGLPERMNMELVEPLRELFKDEVRELGKELGIPSHFIERHPFPGPGLAIRLPGEISSEKADILRKADTIYIEEIRKAGLYNEIWQAFAVLLPVQTVGVMGDERTYDFVCALRAVTSLDGMTADYYPFEQEFLANVSTRIINEVKGINRVVYDITSKPPGTIEWE

SEQ ID NO: 197558 - protein, 313 aa, Unknown
  Bacterial polypetide isolated from the Sargasso Sea
MEAYREIAIKKIREEVGSKRVICGLSGGVDSSVAAILIHEAIGDQLTCVFVDHGLLRQGEAEEVVTMFRENYNIPLIHADESELFLDNLEGQSDPETKRKIIGRLFIDVFQKYANGIENAEFLAQGTLYPDVIESVSFKGGPSVTIKSHHNVGGLPKKMGLKLVEPLKELFKDEVRALGRELKLPTNFINRHPFPGPGLAIRCPGKITRHKLEILRKADAVYIDQIHKYGLYNEIWQAFIAILPVRTVGVMGDSRTYDYACTLRAVTSVDGMTADYYPFSHEFLSDTATRIINEVEGINRVTYDITSKPTGTI

SEQ ID NO: 197559 - protein, 112 aa, Unknown
  Bacterial polypetide isolated from the Sargasso Sea
MSSHIEIASKFSEDNILIIDFGSQYTQLIARRVREEGVFCQIIPYNKVSKYIINNNPKGIILSGGPSSVLGIETPRISKEIIDMGKPILGICYGQQVLVQQLGGTVVSSEKS

SEQ ID NO: 197560 - protein, 188 aa, Unknown
  Bacterial polypetide isolated from the Sargasso Sea
MLKIDQDKIVILDFGSQYTQLIARRIREIGVLSEIVSCEISPKELLKLNPKGIIFSGGPESVNSKFKPKFNPKILEINQPILGICYGMQLLANQYKGKVDLSAKREFGHSKLAFNKNILFKGVTGKKTKMDVWMSHGDKVVKLPKQFKRIASSTNSKIAAFASNDKQRLWRAISSRGLSHRSRTKNIK

SEQ ID NO: 197561 - protein, 268 aa, Unknown
  Bacterial polypetide isolated from the Sargasso Sea
LKNFVLNVCKAKQEWTMEGFVEKTVKDISQIDGNVLCGVSGGIDSTVAALLIHKAIGNRLTGVFVDNGLLRLDESKEIEDMFKNNFSLNFHRIDASEQFLSKLKGITDPEQKRKIVGEEFIQVFTDFAKQKGPFKWLAQGTLYPDVIESGVSKGPAAVIKSHHNVGGLPEWLNLKILEPLRELYKDEVRDVARILGVPEKLLKRHPFPGPGLSVRIMGEITPSKLAICRKASKIVEEELWDAGVYDQVWQAYAAVGDDKAVGVVGDER

SEQ ID NO: 197562 - protein, 127 aa, Unknown
  Bacterial polypetide isolated from the Sargasso Sea
MVLDFGSQYTQLIARRVRESNVYSEIFPWDINEKKILDLNPKGVILSGGPNSVTDSFTPRIPQCIFELNVPILGICYGMQTLAEQMGGQVVSADKKEFGHTNLEIENESILFKGIDKKINVWMSHGD

SEQ ID NO: 197563 - protein, 303 aa, Unknown
  Bacterial polypetide isolated from the Sargasso Sea
RQRPIFTLQFHPEVTDTSHGRIMLKNFVKVCGIISRWSMENFLEDITKSLNNEVGRKKVLMFLSGGVDSSVAFALLNKVLGQDNLLGLYVNNGFMRKHESEVILKTYLQLGYKNIQSRNYSSFFLDAIKTQFEPQIKRKIIGATFIKMRDRFLNELNLNPEDWMLGQGTLYPDIIESGGTKHSEVIKFHHNRVQEVLVLDTLGHVIEPLKNLYKDEVRKLGTLLGLPESIVWRHPFPGPGLSINVLCSNGNDSFPETDITLKKLQNCLKDCECDHEILPVRSVGVQGDQRTYASPVALLNHPR

SEQ ID NO: 197564 - protein, 245 aa, Unknown
  Bacterial polypetide isolated from the Sargasso Sea
FLIIDFGSQVTQLIARRLREAGVFTEILPCTADSEKIKAVSPNGIILSGGPNSVALANTPRAPEIVFDLEVPVLGICYGQQTMCVQLGGRVEPGTSREFGRALLNITAPSPLFEGFWQVGEQHAVWMSHGDHVASLPDGFSVVATSSGAPFAAVADESRHYYGVQFHPEVVHTQNGTDLLKRFALNICGCTSSWSMATYRRRAIEAIQKQVGDERVICGLSGGVDSSVAAVLIHQAIGDQLTCVF

SEQ ID NO: 197565 - protein, 224 aa, Unknown
  Bacterial polypetide isolated from the Sargasso Sea
MQEKVLILDFGSQYTQLIARRVRELNIYCEIFPFDSKKYLFNQYKAVILSGSPYSVRADNSLKLDLSSVKGKIPLLGICYGAQLLANNYLGEVKASNKREYGRANLTSIIQSELLDGVINGSQVWMSHADTIFKLPTNSKRIASTADVENAAFKFNNENTYGIQFHPEVYHSIDGKKILYNFLINISKIKQCWTASSFVESTIGELRSKIKDEKVILGLSGGVD

SEQ ID NO: 197566 - protein, 298 aa, Unknown
  Bacterial polypetide isolated from the Sargasso Sea
DFNSIRGIILSGGPSTVTKEKFERVPIEIFSKKIPILGICYGLQLIAKLYGGKIKSSKRKREFGRAFIFKKRHSELTKNFFKGKGSVWMSHEDAVVKLPRNFKVIAYTKDSRLTIIENKKKNIYGVQFHPEITHTDNGKQIFKNFLFSICKIKKRWSVVSQKNKLIDDVKNIVQKDKVLCALSGGVDSSVVALLINKAIKKNLICIMVDTGLMRKNEFKYNYKIFRKKYKLNVKLINASKIFLKKLKNVTNPEKKRKIIGNLFIKIFEKESKKFQNIKYLAQGTLYPDVIESKSSTGE

SEQ ID NO: 197567 - protein, 314 aa, Unknown
  Bacterial polypetide isolated from the Sargasso Sea
QYTQLIARKIREQSVYCVVHPYIKIRSIDLNSNNLSGIILSGGPNSVKDRQSPKLDKKILKLNIPILGICYGLQLLCNAFNGSIGKSISREYGHSSILLKNSSELFYGIKNGNQVWMSHGDHIEKKPNKFKVTSVSTNKIISSIENQNKKIYGLQFHPEVYHTENGQKILFNFLHKICKINKKFRLENYLSNQIKILKKQLKNKKVICGLSGGVDSTVTSYLLHKAIGKNLFCIFVDNGLLRLNESENIENIYKKKFGINFIKVDSSKIFLKRLKKITNPEMKRKIIGKTFIEVFDKEAKRIKDVNYLAQGTLY

SEQ ID NO: 197568 - protein, 256 aa, Unknown
  Bacterial polypetide isolated from the Sargasso Sea
ESKEIEDMFKNNFSLNFHRIDASEQFLSKLKGITDPEQKRKIVGEEFIQVFTEFAKQKGPFKWLAQGTLYPDVIESGVSKGPAAVIKSHHNVGGLPEWLNLKILEPLRELYKDEVRDVARILGVPEKLLKRHPFPGPGLSVRIMGEITPSKLAICRKASKIVEEELWDAGVYDKVWQAYAAVGDDKAVGVVGDERKYGRIVTVRVVDSIDAMTADWTRLPNGVLEKISNRITNEIDEVTWVSYVISSKPPATIEPQ

SEQ ID NO: 197569 - protein, 230 aa, Unknown
  Bacterial polypetide isolated from the Sargasso Sea
MENKKSNLILIIDFGSQYTQLIARRVRESGVYSIVKSNTISKKDFSQLNPKGIILSGGPNSVVNKSKYKLPSFVFSSGIPILGICYGMQLVADYFGGIVTPSSKKEFGHATFKINNPTILFENIKDNDEFNVWMSHSDKVTKNPPGFKKIGSSNNTKNAAIYNLKKNIYCLQFHPEVTHTKNGQIIINNFVYKVCGCIKTWTTKNIIKDITKKLQDQVGKKNIILALSGG

SEQ ID NO: 197570 - protein, 247 aa, Unknown
  Bacterial polypetide isolated from the Sargasso Sea
QAIGKNLICVFVDNGLLRKNEAEDVENLFKDKMNLNLLVVDAKKVFYRHLKGISDPEQKRKIIGRTFIDIFDNEAAKLKDNINFLAQGTIYPDVIESSESESKEARVIKSHHNVGGLPNDMKMKLLEPLRDLFKDEVREIGSELGLPLEMLNRHPFPGPGLGVRILGEISQEKVSILQNADAIFIEELIKAGLYDQVSQAFCAFLPIKSVGVVGDERRYSYVIAIRAVETVDFMTATWARLPYDFLA

SEQ ID NO: 197571 - protein, 227 aa, Unknown
  Bacterial polypetide isolated from the Sargasso Sea
KNISEPEKKRKIIGNLFIKIFENESKKYKGIKFLAQGTLYPDIIESRSATGSQSSKIKSHHNVGGLPKKMKLKLIEPLKDFFKDEVRILGKSLGLIDKIYDKHPFPGPGLAIRIIGQITPYKIKILQEADYIFINELIKHNLYHKIWQAYAGLLPMKTVGVMGDSRTYEYTCLLRAVVSEDGMTADYFNFPKDFLDNISNKIVNGVPGINRVVYDITSKPPSTIELE

SEQ ID NO: 197572 - protein, 87 aa, Unknown
  Bacterial polypetide isolated from the Sargasso Sea
MQDRILILDFGSQYTQLIARRVREAGVYSEIYIGDVDFNAIESFQPSGLILSGGPESAFNDDAPRPSQEIYSMGLPILGICYGMQVM

SEQ ID NO: 197573 - protein, 248 aa, Unknown
  Bacterial polypetide isolated from the Sargasso Sea
KNEMDLNLFKVDAQKIFLRHLKGIEDPEQKRKIIGRTFIDVFDAEAAKLENIDFLAQGTIYPDVIESSESESKEARVIKSHHNVGGLPEEMKLKLVEPLRDLFKDEVRRLGSQLDLPEIILNRHPFPGPGLGVRILGEVNEKKIKILQEADSIFIEELRKADLYDSVSQAFAVFLPIKSVGVVGDERRYSEVIALRAVETVDFMTANWAYLPHEFLDKVSRRIVNEIEDVSRVVYDISGKPPATIEWE

SEQ ID NO: 197574 - protein, 301 aa, Unknown
  Bacterial polypetide isolated from the Sargasso Sea
KGMSSNYVWMSHGDKVISLPNDFRSIASSSNTKYAAVENKKKSYYGLQFHPEVVHTPNGHKIIENFIFKICKVKRNWSMKNHLRNQITEIKYSVHKNQVICGLSGGVDSTVTAAIISKAINKQLTCIYVDTGLMRLDETKEVVKMFKKHFKSRLIVKDSRKTFIKALKGVKDPEKKRKIIGNLFIKIFNQEASKIKHAKYLAQGTIYPDVIESQSFHGGPTSVIKSHHNVGGLPKRMKLKLIEPLRELFKDEVRKLGLEMRLPKKFINRHPFPGPGLGIRIIGEVTAERVKVLQAADNIYI

SEQ ID NO: 197575 - protein, 286 aa, Unknown
  Bacterial polypetide isolated from the Sargasso Sea
YANCCGGKISKSEKREFGKTIIRRNTRNQSPLLKGLFKKKIEEVWMSHGDAVTELPKGFVELASSDTSSYSIIGDPTKRVFGVQFHPEVFHTINGKKFLENFVNIANIKRNWTPVKITESLIEKLKNEIGDEKVICGLSGGVDSTVTALLLHRAIKKNLTCIFVDNGLLRKKEADQIEYLFKKHFKIKLISVNAKQLFLQNLKGVGDPEKKRRIIGKLFIKIFEKEAKKQKNVSFLAQGTLYPDVIESTSVHGKASATIKSHHNVGGLPKKMKLKLVEPLRTLFKD

SEQ ID NO: 197576 - protein, 256 aa, Unknown
  Bacterial polypetide isolated from the Sargasso Sea
EVQVVQTFKKRLKMNLIYVNAENEFLSKLKNVSDPERKRKIIGNLFIKIFERYAKKIKHVKFLAQGTLYPDLIESKSVTGSQTSKIKSHHNVGGLPKKMNLKLVEPLKFLFKDEVRKLGLELNLSHEIISRHPFPGPGLAIRMPGIITNEKIKILKEADHYFIQALRDHGLYHKIWQAYAALLPVKTVGVMGDNRTYEYLCLLRAITSEDGMTADFYEFKKSFMQTISNKIVNSIRGINRVVYDITSKPPSTIELE

SEQ ID NO: 197577 - protein, 107 aa, Unknown
  Bacterial polypetide isolated from the Sargasso Sea
RYCDILRRADAIFIEELHKAELYHKVSQAFAVFLPVKSVGVMGDARKYDWVVSLRAVETIDFMTAHWAHLPYDLLGKVSNRIINEINGISRVVYDISGKPPATIEWE

SEQ ID NO: 197578 - protein, 165 aa, Unknown
  Bacterial polypetide isolated from the Sargasso Sea
VGGLPKKMNFKLIEPLKELFKDEVRVLGKSLGLSKDISNRHPFPGPGLAIRIIGNITQEKIKILQEADQIYIKELNKNKLYDKIWQAYAALLPIKTVGVMGDSRTYEYTCLIRAVTSEDGMTADYFNFPKEFLDKISNKIVNNVKGINRVVYDISSKPPSTIELE

SEQ ID NO: 197579 - protein, 134 aa, Unknown
  Bacterial polypetide isolated from the Sargasso Sea
MKKVLVVDYGSQYTQLIARRLRELNIYSEVTPWDEISNDDEVAGFILSGGPETSNIKGNPTINQLIFDSKKPILGICYGMQVLAHQEGGKIINDGKKEFGNAKLTIKDWFSLFNNLPNQIDVWMSHGDKVVALP

SEQ ID NO: 197580 - protein, 233 aa, Unknown
  Bacterial polypetide isolated from the Sargasso Sea
EFIKRLTNVSDPEKKRKIIGNLFIEIFERYAKKIKNVKFLAQGTLYPDLIESKSVTGSQTSKIKSHHNVGGLPKKMKFKLVEPLKFLFKDEVRKLGLELNLSKEIISRHPFPGPGLAIRMPGIITKEKINILKDADHYFIQALKKNNLYHKIWQAYAALLPIKTVGVMGDNRTYEYICLLRAITSEDGMTADFFEFKKSFLQMISNKIVNSIRGINRVVYDVTSKPPSTIELE

SEQ ID NO: 197581 - protein, 100 aa, Unknown
  Bacterial polypetide isolated from the Sargasso Sea
LADDIFISELVKGGYYERVSQAFAVFLPVKSVGVVGDARRYEYVIALRAVETIDFMTAKSAKLPHTFLEKVSNRIINEIPEVSRVTYDISSKPPATIEWE

SEQ ID NO: 197582 - protein, 129 aa, Unknown
  Bacterial polypetide isolated from the Sargasso Sea
LVDRHPFPGPGLGVRILGEVKKEYADLLRLADDIFIEELHKEDLYDKVSQAFAVFLPVKSVGVMGDGRKYEYVIALRAVETTDFMTANSAKLPYEFLDHVSTRIINEVSGISRVTLDISSKPPSTIEWE

SEQ ID NO: 197583 - protein, 248 aa, Unknown
  Bacterial polypetide isolated from the Sargasso Sea
ADHMGVRVLRVDAEDHFLSRLAGEADPEKKRKIIGNTFIDIFDAEAAKLKNAHWLAQGTIYPDVIESAASKTGGAHVIKSHHNVGGLPEHMKLKLVEPLRELFKDEVRKIGLELGLPYDMVYRHPFPGPGLGVRILGEVKKEYADTLRLADHIFIQELHAAGLYHKTSQAFAVFLPVKSVGVVGDARRYEYVVALRAVETIDFMTARWAHLPYEFLEKVSSRIINEIPGISRVTYDISSKPPATIEWE

SEQ ID NO: 197584 - protein, 305 aa, Unknown
  Bacterial polypetide isolated from the Sargasso Sea
QLGGKVKISKKREFGKTLVKPSKKSVLFSGFQKGMSMNYVWMSHGDKVISLPRDFKSIASSSNTKFAAVENKKKSYYGLQFHPEVVHTPNGHKIIENFIFKICKVKRNWSMKNHLRNQITEIKHSVHKDQVICGLSGGVDSTVTAAIISKSINKQLTCIYVDTGLMRLNETKEVVKMFKKHFKSRLIVKDSRKTFIKALKGATDPEKKRKIIGNLFIKIFNQEANKIKRAKYLAQGTIYPDVIESQSFHGGPTSVIKSHHNVGGLPKRMKLKLVEPLRELFKDEVRKLGLEMRLPKKFITDTHSR

SEQ ID NO: 197585 - protein, 277 aa, Unknown
  Bacterial polypetide isolated from the Sargasso Sea
KAIKKNLICIMVDTGLMRKNEFNSSYDIFKKKYKLNVKLINASKLFIKKLKGVTNPEKKRKIIGNLFINVFEKEAKKYNNIKYLAQGTLYPDIIESRSSTGSKTSKIKSHHNVGGLPKLMKLKLIEPLKEFFKDEVRVLGKSLNLVNEINYKHPFPGPGLGIRIVGEITLEKIKILQEADQIYIEELIRENLYGKIWQAYAALLPIKTVGVMGDSRTYENICLLRAVTSSDGMTADYYNLPKAFLDRISSKIVNNVKGINRVVYDITSKPPSTIELE

SEQ ID NO: 197586 - protein, 247 aa, Unknown
  Bacterial polypetide isolated from the Sargasso Sea
NKVKNEKVICALSGGVDSSVVAFLLNKAIGKKLKCVFINTGLLRKNEEKEVVKTFRKKLKSNLIYLNASKIFLNKLKNITDPEIKRKIIGNLFIKLFEKKAKKIKFLAQGTLYPDLIESRSVTGSPTSKIKSHHNVGGLPKKMNFSLVEPLKTLFKDEVRKLGKELSVPINILQRHPFPGPGLAIRIPGKISKYKIKILQEADFIFMDELKKSNLYNKIWQAYAALLPLKTVGVMGDSRTYEYTCML

SEQ ID NO: 197587 - protein, 270 aa, Unknown
  Bacterial polypetide isolated from the Sargasso Sea
KIKNFSKNREFGKATVFLDKSSKITQNFFNRGKNIVWMSHQDAVIKLPKGFTKVAHSKNSSNTIIENQKKKIYGIQFHPEVTHTNRGIILLKNFVIHICKSKKQWKIKNQKNLIIKKIKKIVGKNKVVCALSGGVDSAVVALLLKRAINKNLKCIMVNTGLLRKNEFNYTYKIMRNKYKINVKVVNAESKFLYSLKNISDPEKKRKIIGKLFINIFEKEAKKIKKINFLAQGTLYPDVIESISPSGAKSSKIKSHHNVGGLPKKMKLKLV

SEQ ID NO: 197588 - protein, 278 aa, Unknown
  Bacterial polypetide isolated from the Sargasso Sea
VLAHKAVGSLLHCVYVDTGLMRKGETSEVSEMFSEMGIKLQVVDASDRFFESLSGVTDPEEKRKIIGEQFIRVFEEEKGTCAAKYLVQGTIAPDWIESGGGDRDVIKSHHNVGGLPEDVDMTIVEPLREFYKDEVREIARSLGIKSSERQPFPGPGLAVRVLGEVTPERVDSCREACHIVESRIRESAARGECDLPWQYFATLLPVRSVGVHGDVRVHGETVVVRAVASLDGMSARYSPLPHGLLAEISTEITNSLKGQVNRVVYDITHKPPGTIEWE

SEQ ID NO: 197589 - protein, 304 aa, Unknown
  Bacterial polypetide isolated from the Sargasso Sea
GGPYSLSDKDAPKIEKEIIHMGVPVLGICYGMQLMTEMLGGTVKTSNQREYGAANLFIDNNFDLFEGLWLEMSSWMSHGDTVEVPPPGFKVLAHTQSCKVAAIGNSEKKYYGLQFHPEVSHTQRGQELIRNFMFNICEMEPNWYADTFIDKTLKEIKNKVEDEQVLCALSGGIDSTVVAVLLQKAISKNLTCMFIDHGLMRKDEGKNIKQIFEKEYNMNLIYVDAQDRFYKKLKGITDPEKKRKCIGEEFIRVFEEESKKLKGDIKFLAQGTLYPDVIESAIGDVSKTAVTIKSHHNVGGLPED

SEQ ID NO: 197590 - protein, 222 aa, Unknown
  Bacterial polypetide isolated from the Sargasso Sea
MEAKRKIFGATFIDVFEEEAQKIGGANFLAQGTLYPDVIESVSFTGGPSVTIKSHHNVGGLPERMNMSLVEPLRELFKDEVRELGKELGLPDQLVGRHPFPGPGLAIRMPGEITKERLEILRKADEIYIDEIQKAGLYDDIWQAFAVLLPVKTVGVMGDARSYDYVCALRAVTSTDGMTADTYPFEHQFISKVATRIINEVRGINRVTYDITSKPPGTIEWE

SEQ ID NO: 197591 - protein, 176 aa, Unknown
  Bacterial polypetide isolated from the Sargasso Sea
MQKILVVDFGSQYTQLIARRLRELNVYSEVYPWDEIPVLESVDGFVLSGGPESSNIEGNPNIFNEIFESNKPILGICYGMQVLAFQEGGEIQNEGKKEFGYAKIDLNNQTSLFADTSDSIDVWMSHGDKVISLPEGYETLASSDNSPIAAYQNLEKNYFGLQFHPEVTHTDFGLKI

SEQ ID NO: 197592 - protein, 299 aa, Unknown
  Bacterial polypetide isolated from the Sargasso Sea
IPDGWELLAYSSNGIISAIVNKSQNRYATQFHPEVDHTQGGDLIISNFLFKIAKCSPSWNTKNFIADKISSIRKLVNKDRVLVGVSGGVDSSVVAALLYKAIGDRMCAVLIDHGLMRKKEAAECKQFLHDGLAIDINLYDESKLFFSKLRGVVNPEQKRKIIGKQFIESFERISKEQNDIKFLAQGTLYPDVIESGISNSNTAHVIKSHHNVGGLPEEMKFDLIEPLRELFKDEVRNIGRELGLNKLLVNRHPFPGPGLGVRIIGEVTLERVKILQNSDSIYIDILHEDGLYDEIWQAL

SEQ ID NO: 197593 - protein, 284 aa, Unknown
  Bacterial polypetide isolated from the Sargasso Sea
GPAILLHEAIGDQLTCVFVDHGLLRLNEATEVVKMFRESYNLNLIHADESELFLGKLEGVSDPETKRKIIGGLFIDVFQKYANDIEGAEFLAQGTLYPDVIESVSFSGGPSVTIKSHHNVGGLPEKMGLKLVEPLRELFKDEVRALGHELGLPASFIGRHPFPGPGLAIRCPGEITREKLKILQQADAVYIDQIRKHGLYDEIWQAFAAILPMRTVGVMGDGRTYDYALALRAVTSVDGMTADYYPFTHEFLGETMTRIINEVDGINRVFYDVTSKPPGTIELE

SEQ ID NO: 197594 - protein, 282 aa, Unknown
  Bacterial polypetide isolated from the Sargasso Sea
SEVGNRNVLMFLSGGVDSSVAFALLNKTLGQEKVLGLYINNGFMRKNESDEILTRYSQLGYKNIQYRNYSSFFLDALTGQFEPQIKRQIIGATFIKMRDKFLNELNLNQHDWMLGQGTLYPDIIESGGTENSEVIKYHHNRVKEVLELESTGNVVEPLKDLYKDEVRQVGTLLGLPESIVWRHPFPGPGLSINVLCSREDEFFQEIETTLKEVRDCMKDFECDNMVLPVRSVGVQGDKRTYASPVVLLNTPRDWDWLESQAIRIINEVRTVNRVVLLLGSNT

SEQ ID NO: 197595 - protein, 264 aa, Unknown
  Bacterial polypetide isolated from the Sargasso Sea
MKNEKVLIVDFGSQYTQLIARRVRENKVYSEIITYSKNLNLDLTTVKGIILSGGPSSVKDTFDKKFLNVLINSNIPMLCICYGMQAVAKFYQSSVKSKKIREYGKADLRILKESNIFRGCNNNFQVWMSHGDSVIDVNPHFDVIASSGNNNISAIKHKTKELYGLQFHPEVTHTKDKGKIIKNFLINICKFRKTWNSKNIISDTISEIKSQIGKDRVILGLSGGVDSSVAAALINKAIGKNLICIFINNGLLRQNEENEVKQAF

SEQ ID NO: 197596 - protein, 202 aa, Unknown
  Bacterial polypetide isolated from the Sargasso Sea
EKIGGADFLAQGTLYPDVIESVSPFGGPSATIKSHHNVGGLPERMNMELVEPLRELFKDEVRDLGRELGIPHEIVGRHPFPGPGLAIRVPGTFERDKLDILRQADAIYLDEIRKAGLYDQIWQAFAVLLPVRTVGVMGDARTYDHVCALRAVTSTDGMTADSYPFEHTFVAGVATRIINEVRGINRVVYDVTSKPPGTIEWE

SEQ ID NO: 197597 - protein, 222 aa, Unknown
  Bacterial polypetide isolated from the Sargasso Sea
PEKKRKIIGNLFIKIFERYAKKIKDVKFLAQGTLYPDLIESKSVTGSQTSKIKSHHNVGGLPKKMNLKLVEPLKFLFKDEVRKLGLELKLSKEIISRHPFPGPGLAIRMPGNITNEKIKILKEADYYFIQALKDHGLYHKIWQAYAALLPVKTVGVMGDNRTYEYLCLLRAITSEDGMTADFFEFRKSFMQTISNKIVNSIRGINRVVYDVTSKPPSTIELE

SEQ ID NO: 197598 - protein, 206 aa, Unknown
  Bacterial polypetide isolated from the Sargasso Sea
MQTQMLVDEAIGELKSRIDDTAIIACSGGIDSTVAAVLAHKAVGSLLHCVYVDTGLMRKGETSEVSEMFSEMGIKLQVVDASARFFESLSGVTDPEEKRKIIGEQFIRVFEEEKGTCAAKFLVQGTIAPDWIESGGGDRDVIKSHHNVGGLPEDVDMTIVEPLREFYKDEVREIARSLGIKSSERQPFPGPGSSRQSTLEKSLQNV

SEQ ID NO: 197599 - protein, 239 aa, Unknown
  Bacterial polypetide isolated from the Sargasso Sea
MLGLSGGVDSSVVAFLMHAAIGEQLTCVFVDNGLLRKNEAVEVMRTFSENMGLNVLHVDARGIFYKALEGISDPEEKRRVIGHTFIDVFDQEASKIKGVKWLAQGTIYPDVVESAATKTGKGRVIKSHHNVGGLPEQLPFDLIEPLRELFKDEVRRVGLELGLPKKMIFRHPFPGPGLGVRILGEVTEEKAETLRNADSIFIEELNTQGLYDTVSQAFAVFLPVRSVGVKGDARTYEHV

SEQ ID NO: 197600 - protein, 290 aa, Unknown
  Bacterial polypetide isolated from the Sargasso Sea
GQSDNAPYAVIADLNRRIYGVQFHPEVHHTPMGKKLLENFSKISGFKYDWTVESFRDKAISEIKTRVGENKVICGLSGGVDSSVTALLIHKAIGNKLTCIFVDHGLLREGEAESVVKMFKDNFKIKLIHLKEDKLFLNALEGVSDPEKKRKIIGNLFIEVFEKKAKEIKDVTFLAQGTLYPDVIESVSPTGGPSAKIKSHHNVGGLPKKMKLKLLEPLRELFKDEVRALGKEIGLPKEFVSRHPFPGPGLAIRCVGEINQEKVDLLRKVDNVFIDQIRKHGLYDEIWQAL

SEQ ID NO: 197601 - protein, 293 aa, Unknown
  Bacterial polypetide isolated from the Sargasso Sea
IRDIRKQVGKSRVICALSGGVDSSVVAQLLNKAIGKNLYCIFVNTGLLRKNEEKQVVETFKKKLRINLIYVNAENEFIRKLKNITDPEKKRKIIGNLFIKIFEGYAKKIKRVKYLAQGTLYPDLIESKSVTGSKTSKIKSHHNVGGLPKKMKLSLVEPLKFLFKDEVRKLGLELNLSKEIISRHPFPGPGLAIRMPGMITREKIKILKEADYYFIKGLKDHKLYDKIWQAYAALLPVKTVGVMGDNRTYEYLCLLRAITSEDGMTADFFQFKKTFIQEISNKIVNSIRGINRV

SEQ ID NO: 197602 - protein, 227 aa, Unknown
  Bacterial polypetide isolated from the Sargasso Sea
KGVSDPELKRKIIGNLFIEVFTKYSEKFGDIEYLAQGTLYPDVIESVSFTGGPSETIKSHHNVGGLPKKMKLKLVEPLRELFKDEVRQLGFELGLPKEFIGRHPFPGPGLAIRCPGEVTSHKIDILRKADSIFIDQIKKYNLYDKIWQAFVVLLPVRSVGVMGDGRTYDFVCSLRAVTSVDGMTADFYPFDNDFLGETSNKIINEVKGINRVTYDITSKPPGTIEWE

SEQ ID NO: 197603 - protein, 216 aa, Unknown
  Bacterial polypetide isolated from the Sargasso Sea
SQLIARRVREQGVYCEIISHKNPFKVISKSKTKGIILSGGPASVHVSNTPKLDKRVYNLGVPILGICYGMQLLVSQLGGKVSISKKREFGKTLIKTDYKNLLFRSLKQKGEKSFNVWMSHGDKVVKLPKGFNSIASSYNTKYAAIENVEQKFYGLQFHPEVVHTVDGSKIIKNFIFKIAKCKKNWSMKNHLQTQKRLIKDIVGCNHVICGLSGGVD

SEQ ID NO: 197604 - protein, 121 aa, Unknown
  Bacterial polypetide isolated from the Sargasso Sea
VLDWELEFLGEISQEKVSILQDADAIFIEELTKAGLYDQVSQAFCAYLPIKSVGVVGDERRYADVIAIRAVETVDFMTATWARLPYEFLAHVSNRIVNELEGVSRVVYDISSKPPATIEWE

SEQ ID NO: 197605 - protein, 146 aa, Unknown
  Bacterial polypetide isolated from the Sargasso Sea
DPEKKRKKIGNLFIDIFEKYAKRNKGINYLAQGTLYPDVIESKTVTGSKTSKIKSHHNVGGLPKKMKLKLIEPLKFLFKDEVRRLGLELKISKEIIMRHPFPGPGLAIRMPGYISSEKLDILREADNIFINELKSNKLYSKIWQAY

SEQ ID NO: 197606 - protein, 289 aa, Unknown
  Bacterial polypetide isolated from the Sargasso Sea
CKGLWNSKNIIDRAVSEIREQVGDQEVLLGLSGGVDSAVVAALLSKAIGNQLTCIFVDNGLLRLNEGNQVMETFKGKFGIKVKRANAGNQFLRDLKGKKDPELKRKAIGKTFIDVFLKEAKRNKKIQWLAQGTIYPDVIESAGTKNGSAHVIKSHHNVGGLPSYLNLPVIEPLKDLFKDEVRKIGLELGLPKEILFRHPFPGPGLGVRILGEIKRPYIQTLQLADDIFISELVKGGYYEKVSQAFAVFLPVKSVGVVGDARRYEYVIALRAVETIDFMTAKSAKLPHTF

SEQ ID NO: 197607 - protein, 312 aa, Unknown
  Bacterial polypetide isolated from the Sargasso Sea
YPFNIITLSFIKRLNPKAIILSGGPATVLDDCSPKIPYEVYSLSIPILGICYGQQLMANQLGGKVSKGIGRGEFGRSLVRQSEKESEIVKGWFLKGEEQVWMSHGDSVSELPNNFKIIGVSKKAPFAIIANEKKKFYGVQFHPEVNQTTKGNLLFKNFVQISGFSQDWNMSSYKQHAIQTIRKKVGKEHVICAISGGVDSSVVGVLLHEAIGDQLTCIFVDHGLLRAGESKEVLKMFRQNYNIKVIHANEKELFVKALSGIIDPELKRKKIGNLFIEVFEKYAKSLGKVRFLAQGTLYPDVMKVRLPREPLS

SEQ ID NO: 197608 - protein, 182 aa, Unknown
  Bacterial polypetide isolated from the Sargasso Sea
SSGSESKEARVIKSHHNVGGLPEEMKLKLVEPLRDLFKDEVRRLGSQLDLPEIILNRHPFPGPGLGVRILGEVNEKKIKILQEADFIFIEELRKADLYESVSQAFAVFLPIKSVGVVGDERRYSEVIALRAVETVDFMTANWAYLPHDFLDKVSRRIVNEIEDVSRVVYDISGKPPATIEWE

SEQ ID NO: 197609 - protein, 314 aa, Unknown
  Bacterial polypetide isolated from the Sargasso Sea
VYAGVPVLGICYGMQTMAEQLGGKVQGSDLREFGYAQVEVVAENDLFAKIEDHVGSNGNALLDVWMSHGDKVVQIPQGFITCASTSTCPHAGMVDEARQFYGVQFHPEVTHTRQGLRMLEHFVVDICGCDKLWTPASIIEDAVIRLKQQIGDDQVILGLSGGVDSSVVAMLLHRAIGKKLTCVFVDNGLLRLNEGKQVMDMFGDHFGLNIIKVDAEERFLSALAGENEPEAKRKIIGRVFVEVFDEQAQKLANAKWLAQGTIYPDVIESAGSATGKAHVIKSHHNVGGLPEHMKLGLVEPLRELFKDEVRKVGL

SEQ ID NO: 197610 - protein, 87 aa, Unknown
  Bacterial polypetide isolated from the Sargasso Sea
MEGADGRRPAIVILDFGSQYSELIARRIRETEVFSLVLSHTTTVEQLKELAPRGIILSGGPSSVYATDAPLCDPSLWELGIPVLGRL

SEQ ID NO: 197611 - protein, 237 aa, Unknown
  Bacterial polypetide isolated from the Sargasso Sea
MLKKNSLRKLNNVSHPEKKRKIIGNLFIKIFERYAKRIKNVKFLAQGTLYPDLIESKSVTGSQTSKIKSHHNVGGLPKNMKLKLVEPLKFLFKDEVRKLGLELKLSKEIISRHPFPGPGLAIRMPGLISKEKIKILKEADNYFIQALRDHNLYDKIWQAYAALLPVKTVGVMGDNRTYEYLCLLRAITSEDGMTADFYDFKKSFIQIISNKIVNSIRGINRVVYDVTSKPPSTIELE

SEQ ID NO: 197612 - protein, 224 aa, Unknown
  Bacterial polypetide isolated from the Sargasso Sea
MILNKKEKLCGRTFIDVFDAEAIKLKDIKYLAQGTIYPDVIESSGSESKEARVIKSHHNVGGLPEEMKLELIEPLRDLFKDEVRKMGIELGISKEMIERHPFPGPGLGVRIIGEITKDKTEILQEADHIFIEELIKAKLYDKVSQAFAVLLPVKSVGVVGDERRYAEVIGLRAVETVDFMTARWAHLPYDFLEHVSNRIVNEIQDVSRVVYDISSKPPATIEWE

SEQ ID NO: 197613 - protein, 90 aa, Unknown
  Bacterial polypetide isolated from the Sargasso Sea
MIFIVDFGSQVTQLIARRVREAGVYCEIVSSKSLYRQILNRGCSGIVFSGGPASVHKSNTPKIDKRIFNLNIPILGICYGMQLLCYQLGG

SEQ ID NO: 197614 - protein, 196 aa, Unknown
  Bacterial polypetide isolated from the Sargasso Sea
MQDRILILDFGSQYTQLIARRVREAGVYSEIYIGDIDFNAIESFKPSGIILSGGPESAFIDDAPKPSKEIYSMGLPILGICYGMQVMTEQLGGKVSPSNEREFGHADAKMEANSRLFEGIETDDEQPVWMSHGDRVESLPEGFQKICTSANSPSAAMANEDTTFYGLQFHPEVTHTSCGQRIIKNFVHNICGCGND

SEQ ID NO: 197615 - protein, 254 aa, Unknown
  Bacterial polypetide isolated from the Sargasso Sea
MSLDLNLDKILIIDFGSQFTQLIARRIRELGVFSEIISHKKIKSFQIKSNIKGIILSGGPLNVYQLNDNLFDKKILKLGIPTLGICFGHQILSKFNGGKVKKSKHREFGLASINKKNNSQLIKNFFNKKRKKVWMSHSDQVTKLPKTFKVIASSENSKFAIVESKITKFFGVQFHPEVTHTENGKKIISNFIFLICRIKKNWSSKDQKIKLIKEIKQQVGNNKVICALSGGVDSSVVAQLLNKAIGKKLFCIFV

SEQ ID NO: 197616 - protein, 230 aa, Unknown
  Bacterial polypetide isolated from the Sargasso Sea
MQDRILILDFGSQYTQLIARRVREAGVYSEIYIGDIDFNAIESFKPSGIMLSGGPESAFIDDAPKPSKEIYSMGLPILGICYGMQVMTEQLGGKVSPSNEREFGHADAKMEANSCLFEGIETDDEQPVWMSHGDRVESLPEGFQKICTSANSPSAAMANEDNSFYGLQFHPEVTHTSCGQRIINNFVHNICGCGNDWNPGNIIEKDIKEVQEAVGDDLVLLGLSGGVDSS

SEQ ID NO: 197617 - protein, 212 aa, Unknown
  Bacterial polypetide isolated from the Sargasso Sea
KSLFRCLQTCKNKKVHFKWLAQGTLYPDVIESGVSKGPAAVIKSHHNVGGLPDWLNLKILEPLRELYKDEVRDVARILGVPEKLLKRHPFPGPGLSVRIIGDITPSKLSICRKASKIVEEELWDAGVYDKVWQAYAAVGDDKAVGVVGDERKYGRIVTVRVVDSIDAMTADWTRLPNGVLEKISNRITNEIEEVTWVSYVISSKPPATIEPQ

SEQ ID NO: 197618 - protein, 183 aa, Unknown
  Bacterial polypetide isolated from the Sargasso Sea
EQIWLLGSQTSKIKSHHNVGGLPKKMNLKLVEPLKFLFKDEVRKLGLELNLSKEIISRHPFPGPGLAIRMPGIITNEKIKILKEADYYFIQALKDHGLYHKIWQAYAALLPVKTVGVMGDNRTYEYLCLLRAITSEDGMTADYYEFKKSFMQTISNKIVNSIRGINRVVYDVTSKPPSTIELE

SEQ ID NO: 197619 - protein, 256 aa, Unknown
  Bacterial polypetide isolated from the Sargasso Sea
NGEEEVWMSHGDHVSSLAPGFEVYGTSSNAPFAIIADKKRHFYAVQFHPEVHHTPSGKKLFENFVEISGVKRDWTMIAFRTRAIEAIRRQVGKKKVICALSGGVDSSVTAILVHEAIGDQLTCVFVDHGLLRKNEGQQVTEMFKEHYRIPLIHAKEQNMFLAALEGQSDPETKRRIIGKLFIDVFQKHANKIHGVEFLAQGTLYPDVIESVSVNGGPSVTIKSHHNVGGLPEKMGMTLIEPIRELFKDEVRELGRE

SEQ ID NO: 197620 - protein, 199 aa, Unknown
  Bacterial polypetide isolated from the Sargasso Sea
MIENYKKKLFGIQFHPEVTHTKNGKKLLSNFVFSICKLKRNWSSKQQKIKLIKQVKNQVKNSKVICALSGGVDSSVVAKLLKEAIGKKLICIFVNTGLLRKDEEKQVVSTFKKKFKINLIYVNAKNMFLSKLKNVSDPEKKRKIIGNLFVKIFEKHARKIKKINFLAQGTLYPDLIESKSVTGSQTSKIKSHHNVGGLP

SEQ ID NO: 197621 - protein, 280 aa, Unknown
  Bacterial polypetide isolated from the Sargasso Sea
MIARRVRELGVYSEIVSHKKKVNLKRDDIIGFILSGGPLNVYQTKKVSFDKQILDLGIPILGICFGHQIISKELGGKVKESKHREFGLAQIKQIKNSALTKNFFNKKRNNNVWMSHSDQVTKLPRSFETVASSTNSKFCIIQNKSKHFYGIQFHPEVTHTKNGIRIIRNFLFSICKAKKNWSPKKQKDKIIEEIKLKVGSSKVICALSGGVDSSVVAKVIHKAIGKNLICIFVNTGLLRKNEEKQVIQTFKKRLKIKLIYINAKDIFIKKLKLVKDPEKK

SEQ ID NO: 197622 - protein, 192 aa, Unknown
  Bacterial polypetide isolated from the Sargasso Sea
MKNEKVLIVDFGSQYTQLIARRVRENKVYSEIITYSKNLNLDLTTVKGIILSGGPSSVKDTFDKKFLNVLINSNIPMLCICYGMQAVAKFYQSSVKSRKIREYGKADLRILKESNIFKGCNNNFQVWMSHGDSVIDVNSHFDIIASSGNNNISAIKHKTKELYGLQFHPEVTHTKDKGKIIKNFLINICKFR

SEQ ID NO: 197623 - protein, 82 aa, Unknown
  Bacterial polypetide isolated from the Sargasso Sea
VSQAFAVLLPVKSVGVVGDERRYAEVVGLRAVETVDFMTARWAHLPYKFLEHVSNRIINEIEEVSRVVYNISSKPPATIEWE

SEQ ID NO: 197624 - protein, 262 aa, Unknown
  Bacterial polypetide isolated from the Sargasso Sea
IILSGGPESVTNIHTPRAPKIVFDLQVPILGICYGMQTLAEQMGGQVTTSEKKEFGFSTFKIEDESRLLAGSSSEIIDVWMSHGDKVETLPNDFKLIGSTESAPIAAMEHISQSIYALQFHPEVTHTKGGKLILDNFIFEICSCKPDWKLDDLISSRIEEIKHATNGEKVLLGLSGGVDSSVTAALLSKAIGDNLICVFVDNGLLRKNEAEEVVQTFKNEMDLNLIKVDAQKIFLRHLKGVEDPEQKRKIIGRTFIDVFDAE

SEQ ID NO: 197625 - protein, 324 aa, Unknown
  Bacterial polypetide isolated from the Sargasso Sea
YMKFVIVCTNGLPSNIASEAIKEVKAKVGDGEVLLGLSGGVDSSVVAAILHNAIGSQLTCVFVDHGLLRFNEGDQVMKTFKENLGVNVIRVNAADRFFEALEGIKDPEEKRKIIGRLFVEVFDEEAKKLNHIEYLAQGTIYPDVIESAGASTGKAHVIKSHHNVGGLPENMRMKLIEPLKELFKDEVRKIGIELGLPEKMVYRHPFPGPGLGVRVLGEVLPEYVKLLQLADDIFISELIDNDLYGSTSQAFAVFLPVKSVGVMGDGRRYDYVVALRAVETVDFMTARWARLPYEFLERVSLRIINEVEGISRVTYDISGKPPST

SEQ ID NO: 197626 - protein, 271 aa, Unknown
  Bacterial polypetide isolated from the Sargasso Sea
NSVKDKKSPKLDGKIIALGVPILGICYGMQLVCNEFGGKIGKSKLREYGHSIITLKHKSVLFEKIKIKNQVWMSHGDHVEKKPDEFFITSLSNNKIISSIEHKNKKIFGLQFHPEVYHSLQGKKILSNFLFKICKIKNKFKLENFLSHKIKNLRDNLKKTKVICGLSGGVDSTVTSFLLHKAIKNNLFCIFVDHGMLRLNESNEVESIFKKKFGKNFIKVNASSIFLKKLKNIKDPEKKRKIIGKTFIEVFEKEAKKIKGVQYLAQRNSLS

SEQ ID NO: 197627 - protein, 71 aa, Unknown
  Bacterial polypetide isolated from the Sargasso Sea
MSLDQNLDKVVIIDFGSQFTQLIARRIRELGVFSEIVSHKKIKTSDINQSVRGIILSGGPLNVYQINKYSF

SEQ ID NO: 197628 - protein, 252 aa, Unknown
  Bacterial polypetide isolated from the Sargasso Sea
CYGMQLLCYQLGGKVKISKKREFGKTLIKPSKKSVLFSGFRNGKSSNYVWMSHGDKVISLPRDFKSIASSSNTKFAAVENKKKSYYGLQFHPEVVHTPNGHKIIENFIFKICKIKRNWSMKNHLRNQITEIKYSVHKDQVICGLSGGVDSTVTAAIISKAINKQLTCIYVDTGLMRLNETKEVVKMFKKHFKSRLIVKDSRNTFIKALKGATDPEKKRKIIGNLFIKIFNQEANKIKRAKYLAQGTIYPDVI

SEQ ID NO: 197629 - protein, 125 aa, Unknown
  Bacterial polypetide isolated from the Sargasso Sea
MSLDNSLNKILIVDFGSQFTQLIARRIRELGVFSDIVSHKKIKLNKINQSIKGIILSGGPLNVYQINKYSFDKKILDLNIPVLGICFGHQILSKLNGGRVRQSKHREFGLANVIKKNSSLLTNNF

SEQ ID NO: 197630 - protein, 317 aa, Unknown
  Bacterial polypetide isolated from the Sargasso Sea
SCVNTDSKLTIIENTKTKIYGVQFHPEVTHTENGKEIFKNFLFSICKMKKKWRAASEANRLINDIRKTVKKDKVICALSGGVDSSVVALLVNKAIKKNLICIMVDTGLMRKNEFKDSYYIFKKKHKLNVKLINASKLFLKKLKNIHNPEKKRKIIGNLFIKIFEKESKKYKSIKYLAQGTLYPDIIESRSATGSQSSKIKSHHNVGGLPKKMNLKLIEPLKEFFKDEVRVLGKSLGLKDIIRNKHPFPGPGLAIRIIGNITPQKIRVLQEADHIYINELIKHGLYKKIWQAYAGLLSMKTVGVMGDFRTYEYTCLLR

SEQ ID NO: 197631 - protein, 147 aa, Unknown
  Bacterial polypetide isolated from the Sargasso Sea
LFKDEVRKVGAALGLPDEIIKRHPFPGPGLAIRILGEVNNEKLDCLRDADWIVRDEIKKADLYNDIWQAFAVLLPVKTVGVMGDKRTYAWPIVLRCVSSEDGMTADWSKIPFQILERIANRIVNEVSSVNRVVYDITSKPPGTIEWE

SEQ ID NO: 197632 - protein, 237 aa, Unknown
  Bacterial polypetide isolated from the Sargasso Sea
DICNISDNWSAKYFINKSIENIRKEIGNSKVICGISGGVDSSITATLIHKAIGNNLTSIFVDNGLLRKGESEDVMNFLQKGLGLNIVKVNASENFLYKLRNIIDPEEKRKIIGKEFINVFEKEAKKIKNVKYLAQGTLYSDVVESAVIKSGHQAVIKSHHNVGGLPDKMKLKLIEPLRLHFKDEVREIGYELGINKEIIERHPFPGPGLAIRIMGEITEEKLNILREADHIFIDEIK

SEQ ID NO: 197633 - protein, 289 aa, Unknown
  Bacterial polypetide isolated from the Sargasso Sea
IILTPLEVKKIKDFNNIKGIILSGGPSSVTNIKYQTIPRQIFKRKIPVLGICYGLQLISKVFGGKVKSSKKKREFGRAFIFKKKKSLLTKNFFKTKISVWMSHEDAVVRLPKNFKNIAYTRNSRLTIIENTQEKIYGVQFHPEVTHTDNGKIIFKNFLFSICKIKKNWNLTSQKIKLIKEVKKIVKNKKVLCALSGGVDSSVVALLINKAIKKRLICIMVDTGLMRKNEFKYTYKIFKNKYKLNVKLLNVSNKFFKGLKNVINPEKKRKIIGKLFIKVFEKESKKYKNL

SEQ ID NO: 197634 - protein, 275 aa, Unknown
  Bacterial polypetide isolated from the Sargasso Sea
IKLPKNFINIASTNNSKFTAIQHKTKKIYGIQFHPEVTHTEKGKEILNNFVYKICKIKKNWLLSIEKNRIIKDLKDKIKNEKVICALSGGVDSSVVAVLINNAIKKNLKCIMVDNGLLRKNEFKSSYKLFKKKYKMNVKLINAKKIFYRKLKNISDPEKKRKIIGNQFIKIFEKEARKFKQVKYLAQGTLYPDIIESKSSTGSKTSKIKSHHNVGGLPKKMKLRLVEPLKELFKDEVRSLGKSLGLDNSILQKHPFPGPGLAIRIVGTITEKKIK

SEQ ID NO: 197635 - protein, 309 aa, Unknown
  Bacterial polypetide isolated from the Sargasso Sea
MTVIKNFVYKISCCAADWTTETYIEETIPRIREQVGNKKVLLALSGGVDSSTLAFLLNKAIGNQLTCMFIDQGFMRKGEPEFLMNFFDKKFHIKVEYINARERFIAKLKGITDPEQKRKIIGEEFIRVFEEESNRLGPFQYLAQGTLYPDVIESAGTNIDPKTGERIAVKIKSHHNVGGLPKDLQFKLVEPLRKLFKDEVRKVGAALGLPDEIIKRHPFPGPGLAIRILGEVNNEKLDCLRDADWIVRDEIKKAGLYNDIWQAFAVLLPVKTVGVMGDKRTYAWPIVLRCVSSEDGMTADWSKIPFQIL

SEQ ID NO: 197636 - protein, 191 aa, Unknown
  Bacterial polypetide isolated from the Sargasso Sea
GTLYPDLIESKSVTGSQTSKIKSHHNVGGLPKKMKLKLVEPLKFLFKDEVRKLGLELNLSKEIISRHPFPGPGLAIRMPGVITSEKIKILKEADYYFIKALKEHGLYHKIWQAYAALLPVKTVGVMGDNRTYEYLCLLRAITSEDGMTADFFEFKKSFSQMISNKIVNSIRGINRVVYDITSKPPSTIELE

SEQ ID NO: 197637 - protein, 299 aa, Unknown
  Bacterial polypetide isolated from the Sargasso Sea
NRKEKIIIIDFGSQVTKLIARRIRDLGVFSEIITIKDLYKVKDFSEIKGIILSGGPSTVTKKNFLKIPKKILLKKIPILGICYGLQLIAKLFGGTIKSLKKQREFGRASLVKRQNSVLIKNFFKGKKSLVWMSHQDAVTKLPKNFKIIASTKESKLTIIENTKNKIYGIQFHPEVTHTQNGKEIFKNFLFSICNIKKRWHVFNEKKRLIEEIKTIVKKDKVICALSGGVDSSVVALLVHKAIKTRLVCIMVDTGLMRKNEFKHSYNLFKKKYKLNVKLINASKLYFKNLKNISNPEKKR

SEQ ID NO: 197638 - protein, 123 aa, Unknown
  Bacterial polypetide isolated from the Sargasso Sea
VRILGEVKKDYADLLRRADAIFIEELRNFRDEATGKTWYDLTSQAFTVFLPVKSVGVMGDGRTYDYVVALRAVQTSDFMTADWAELPYALLKKVSGRIINEVRGINRVTYDVSSKPPATIEWE

SEQ ID NO: 197639 - protein, 289 aa, Unknown
  Bacterial polypetide isolated from the Sargasso Sea
GVDSSVTAALLHKAIGKKLVCVFVDNGLLRKGEAEQVMQTFKENMQLNVVKSDSQDTFLRHLKEIEDPEQKRKIIGRTFIDVFDAEAMKLKDIRFLAQGTIYPDVIESSGSESKEARVIKSHHNVGGLPDDMKLDLVEPLRDLFKDEVRKMGIELGIPKEMIERHPFPGPGLGVRILGEVTKEKTKILQNADHIFIEELIRADLYNSVSQAFAVLLPVKSVGVVGDERRYAEVIALRAVETVDFMTARWAQLPYEFLEHVSNRIVNEIEAVSRVVYDISSKPPATIEWE

SEQ ID NO: 197640 - protein, 305 aa, Unknown
  Bacterial polypetide isolated from the Sargasso Sea
MGDKVETLPNDFKLIASTESAPIAAMEHSSKPIYALQFHPEVTHTKGGKLILDNFIFEICSCKPDWKLDDLISSRIQEIKDITNGEKVLLGLSGGVDSSVTAALLSKAIGENLVCVFVDNGLLRKNEAEEVVQTFKNEMDLNLIKIDAQKIFLRHLNGIEDPEQKRKIIGRTFIDVFDAEAAKLENIDFLAQGTIYPDVIESSESESKEARVIKSHHNVGGLPEEMKLKLVEPLRDLFKDEVRRLGSQLDLPEIILNRHPFPGPGLGVRILGAVNEKKIKILQEADFIFIEELRKANLYDSVSQA

SEQ ID NO: 197641 - protein, 183 aa, Unknown
  Bacterial polypetide isolated from the Sargasso Sea
ESAGSKTGKAHVIKSHHNVGGLPEDMKLKLVEPLRDLFKDEVRKIGKELGLTSKLVDRHPFPGPGLGVRILGEVKKEYADLLRLADDIFIEELHKENLYDKVSQAFAVFLPVKSVGVMGDGRKYEYVIALRAVETTDFMTANSAKLPYEFLDHVSTRIINEVSGISRVTLDISSKPPSTIEWE

SEQ ID NO: 197642 - protein, 289 aa, Unknown
  Bacterial polypetide isolated from the Sargasso Sea
KKNSQVWMSHGDHIEKVPSKFIITSLSNDRIIASIEDKKCKIYGLQFHPEVYHSLEGKKILSNFLLKICKIKKKFKLDDFLKNKINELKNVLKNKKVICGLSGGVDSTVTSFLLHKAIKNNLYCIFIDHGLLRFNESNEVVSIFKKKFGKNFIRIDASSIFLSNLKNIKDPEKKRKIIGKTFIKVFEKEAKKIKKVEYLAQGTLYPDIIESIPFFGGPTAKIKSHHNVGGLPKKMNLKIIEPLKELFKDEVRFLGKKLKINSELLNRHPFPGPGLSIRIPGVIDKKKIN

SEQ ID NO: 197643 - protein, 164 aa, Unknown
  Bacterial polypetide isolated from the Sargasso Sea
MSKNKFIEKIIIIDYGSQFTQLIARKIRELGVYSEIINFNQIKNLKKNHLIKGIILSGGPLTITNKNSSSLNNYIIKLNIPILGICYGHQILAKKFGGKVKISKKREFGHAIVKSRSKSTITKSFFKKKNNTVWMSHQDIVSKLPNGFKKVASSNNSKYAIIAN

SEQ ID NO: 197644 - protein, 286 aa, Unknown
  Bacterial polypetide isolated from the Sargasso Sea
KNIKFRNYSSFFLEALEGQFNPQIKRQIIGSTFIRMREKFLNELNLDPQDWMLGQGTLYPDIIESGGTENAEIIKFHHNRVQEVLDLESAGHVVEPLKDLYKDEVRQVGTLLGLPESIVWRHPFPGPGLAINILCSRGNESFPQIKKTIKEVENCLQDCECEHLILPVRSVGVQGDKRTYTSPVLLLNAKRDWNWLESKATQIVNEVRTVNRVVFLLGSNTNFSDDKFNLHKAFCNKDRLDLLREADYRTTKILKKHESMQRIFQLLVILLPISKNGKEESLVLRP

SEQ ID NO: 197645 - protein, 232 aa, Unknown
  Bacterial polypetide isolated from the Sargasso Sea
QFLSKLKGITDPEQKRKIVGEEFIQVFTEFAKQKGPFKWLAQGTLYPDVIESGVSKGPAVVIKSHHNVGGLPEWLNLKILEPLRELYKDEVRDVARILGVPEKLLKRHPFPGPGLSVRIMGEITPSKLAICRKASKIVEEELWDAGVYDKVWQAYAAVGDDKAVGVVGDERKYGRIVTVRVVDSIDAMTADWTRLPNGVLEKISNRITNEIDEVTWVSYVISSKPPATIEPQ

SEQ ID NO: 197646 - protein, 84 aa, Unknown
  Bacterial polypetide isolated from the Sargasso Sea
NDIWQAFAVLLPVKTVGVMGDKRTYAWPIVLRCVSSEDGMTADWSKIPFHILERISNRIVNEVDSINRVVYDITSKPPGTIEWE

SEQ ID NO: 197647 - protein, 298 aa, Unknown
  Bacterial polypetide isolated from the Sargasso Sea
YGPANLLIDNNFDLFEGLWLEMSVWMSHGDSVIRMPEGFQRIGHTETCDIAAMSHTKRKIFGLQFHPEVAHTPKGKEILQNFVFNACGCKENWTPTSFIKSSIIDINNKVKNEKVLCALSGGVDSTVVAALLKKAIGNRLTCMFIDQGYMRKDEGQRIKKVFAEEFNINLIYVDASKRFVEKLKGISDPETKRKKIGEEFIRVFEEESKKISGEVKFLAQGTLYPDVIESAVGDVSETAVTIKSHHNVGGLPEDIDFEIIEPLRLLFKDEVRKVGTELGLPDELVHRHPFPGPGLAIR

SEQ ID NO: 197648 - protein, 315 aa, Unknown
  Bacterial polypetide isolated from the Sargasso Sea
VWMSHGDRVEALPDGFKQIASSNNAPIAGMADVQNQIYGVQFHPEVTHTENGQLIIERFVHEICGCPGYWTPKNIINEHIERVRDKVGTEHVLLGLSGGVDSSVVAALLHAAIGDQLICVFVDNGLLRLNEGDQVMETFAEHLGVNVIRVNAEDKFLSALDGEEDPEKKRKIIGRNFIEVFEEQASILNDIQWLAQGTIYPDVIESAGASTGKAHVIKSHHNVGGLPETMHLKLIEPLRDLFKDEVRKIGVELGLSHQLVDRHPFPGPGLGVRILGSVKKEYADLLRRADDIFISELREQGLYDKVSQAFAVFYR

SEQ ID NO: 197649 - protein, 159 aa, Unknown
  Bacterial polypetide isolated from the Sargasso Sea
MSPQKKDKILIIDFGSQVTKLIARRVRELGVYSEVITPKELSFIKDYKSIKGIVLSGGPSTVTKKKFQTIPKKILFKGIPILGICYGLQLIAKLFGGKIKSSFKKREFGRAFILKKKKSDLIKNFFKKKEKAVWMSHQDAVVKLPKGFKAIASTSESKL

SEQ ID NO: 197650 - protein, 117 aa, Unknown
  Bacterial polypetide isolated from the Sargasso Sea
MNDIDKEKIIVVDFGSQVTKLIARRVRELGVFSEVLTLNQLKKIKSFEKIKGIILSGGPATVTKKSSPKIPMYIFSKNIPILGICYGLQLIAKSFGGKVKFGNKKREFGRAILKKNK

SEQ ID NO: 197651 - protein, 269 aa, Unknown
  Bacterial polypetide isolated from the Sargasso Sea
SGGVDSSTLAFLLNKAIGNQLTCMFIDQGFMRKGEPEFLMEFFDKKFNIKVEYINARERFIHKLNGVIDPEQKRKIIGGEFIRVFEEESNRLGPFQYLAQGTLYPDVIESAGTNLDPKTGERIAVKIKSHHNVGGLPKDLQFKLVEPLRKLFKDEVRKLGKALGLPDEIIKRHPFPGPGLAIRILGEVSNEKLNCLRHADWIVRDEIKKAGLYNNIWQAFAVLLPVKTVGVMGDKRTYAWPIVLRCISSEDGMTADWSRIPYETLERIS

SEQ ID NO: 197652 - protein, 228 aa, Unknown
  Bacterial polypetide isolated from the Sargasso Sea
LKGVNDPEEKRKIIGRTFIEVFEDEASKLENVKWLAQGTIYPDVIESAGSKTGKAHVIKSHHNVGGLPEDMKLKLIEPLRDLFKDEVRKIGKELGLNSKLVDRHPFPGPGLGVRILGAVKKEYADLLRLADDIFIEELHKENLYDKVSQAFAVFLPVKSVGVMGDGRKYEYVIALRAVETTDFMTANSAKLPYEFLDHVSTRIINEVPGISRVTLDISSKPPSTIEWE

SEQ ID NO: 197653 - protein, 283 aa, Unknown
  Bacterial polypetide isolated from the Sargasso Sea
MVLDFGSQYTQLIARRVRELDVYSEILPWDIDEEKISKINPIGVILSGGPNSVTKSFTPRVPQKIFDLNVPILGICYGMQTLAEQMGGNVISADKKEFGHVELEIVADSKLFRNLNSKINVWMSHGDQVQDLPDDYELTALTSTAPIAAMQHKKLPIYAIQFHPEVTHTENGMTLLSNFIFDECGANNDWKMDDLISSRVEEIKQKVGNNKVLLGLSGGVDSSVTAALLNEAIGKKLTCVFVDNGLLRKGENHQVMQTFKENMNLNVIKSDSQDIFFRHLENI

SEQ ID NO: 197654 - protein, 285 aa, Unknown
  Bacterial polypetide isolated from the Sargasso Sea
ESLKTELTGKAIIAASGGVDSTVAAVLAAKAVGDNLLAIYVDTGYMRLDESKFVSSMLEDLGVQHKVIDASERFYEGLKGVIDPEEKRKIIGELFIRVFEEESKKYGGKFLVQGTIAPDWIESGGGIRDTIKSHHNVGGLPDDMEMELCEPIRELYKDEVRSLAEYLKVSVAQRQPFPGPGLAVRVMGEATPKRTEIVRQACHIVEDELELAASEGKMELPWQYFAVILPVKTVGVQGDVRAYGNTIAVRAVQSYDAMTAQALEIPYPVLKKISERITRELKSES

SEQ ID NO: 197655 - protein, 128 aa, Unknown
  Bacterial polypetide isolated from the Sargasso Sea
VYRHPFPGPGLGVRVFGEVLPEYVKLLQLADDIFINELIENDLYNSTSQAFAVFLPVKSVGVMGDGRRYDYVVALRAVETVDFMTARWARLPYEFLERVSLRIINEVEGISRVTYDISGKPPSTIEWE

SEQ ID NO: 197656 - protein, 237 aa, Unknown
  Bacterial polypetide isolated from the Sargasso Sea
MSHSDQVTKLPQSFETIASSTNSKFCIIQNKSKHFYGIQFHPEVTHTKNGIRIIKNFLFSICKAKKNWSPKKQKDKIIEEIKLQVGSSKVICALSGGVDSSVVAKIIHKAIGKNLICIFVNTGLLRKNEEKQVIQTFKKRLKMKLIYINAKDIFIKKLKLINDPEKKRKIIGNLFIKIFEKYSKTVSKVKFLAQGTLYPDLIESRSVTGSQTSKIKSHHNVGGLPKKMKLKLVEPVK

SEQ ID NO: 197657 - protein, 96 aa, Unknown
  Bacterial polypetide isolated from the Sargasso Sea
MSLERSLDKILIIDFGSQFTQLIARRIRELGVFSAIVSHKKIKVKDINNSIKGIILSGGPLNVYEINKYSFDKKILEKGLPVLGICFGHQIISKIN

SEQ ID NO: 197658 - protein, 263 aa, Unknown
  Bacterial polypetide isolated from the Sargasso Sea
GGVDSMVTAAIISKAINKQLTCIYVDTGLMRLNETEEVQNLFKKHFKSKLITVNAKNRFFTSLKGVSDPEKKRKIIGNLFIKIFNAESSKISKAKFLAQGTIYPDIIESQSFHGGPTSVIKSHHNVGGLPKEMKLGLVEPLQELFKDEVRKLGKELKLPKEFIQRHPFPGPGLGIRVLSDITIDKVRMLQHADKIYIDEIKAANLYNEIWQAFAVLLPVRTVGVMGDQRSYEFVCGLRAVTSVDGMTADFYPFSGEFLSKVST

SEQ ID NO: 197659 - protein, 139 aa, Unknown
  Bacterial polypetide isolated from the Sargasso Sea
VGAALGLPDEIIKRHPFPGPGLAIRILGEVNNEKLDCLRDADWIVRDEIKKAGLYNDIWQAFAVLLPVKTVGVMGDKRTYAWPIVLRCVSSEDGMTADWSKIPFQILERIANRIVNEVISVNRVVYDITSKPPGTIEWE

SEQ ID NO: 197660 - protein, 194 aa, Unknown
  Bacterial polypetide isolated from the Sargasso Sea
LAQGTLYPDVIESVSFTGGPSVTIKSHHNVGGLPERMNMELVEPLRELFKDEVRELGKELGIPSHFIERHPFPGPGLAIRLPGEISSEKADILRKADTIYIEEIRKAGLYNEIWQAFAVLLPVQTVGVMGDERTYDFVCALRAVTSLDGMTADYYPFEQEFLANVSTRIINEVKGINRVVYDITSKPPGTIEWE

SEQ ID NO: 197661 - protein, 265 aa, Unknown
  Bacterial polypetide isolated from the Sargasso Sea
MTNIHNDKILILDFGAQYTQLIARRIRELGVYCEIWAWDHNPAEIAGFGAKGIILSGGPESTTLPGAPAAPQEVFDSGLPIFGICYGMQTLAAQLGGATEAADQREFGHAEVNVINPDALFKGLSDHGGEPKLNVWMSHGDHVSVAPPGFTITATTDRIPVAAMANEEKRWYGVQFHPEVTHTLQGQALLRRFVVDVCGCQTLWTAANIIDDQIARVRDQVGDDEVILGLSGGVDSSVVAALLHKAIGEKLTCVFVDTGLLRWQE

SEQ ID NO: 197662 - protein, 297 aa, Unknown
  Bacterial polypetide isolated from the Sargasso Sea
LNVYEDKKINFNKKILNLKVPILGVCFGHQLISKHYGGKVITAKNREFGLAIIKKRSNSKLTKNFFNNLKQRNVWMSHADHVTRLPKGFKATASTKGSKFTIIENDVIKRYGVQFHPEVTHTEKGILLLKNFVFGICKSKKNWSTDHQKKTLIKNVQNQIGDKKIICALSGGVDSSVVAQLLNKAVGKQLHCIFVNTGLLRLNEEKQVINTFKKKLKMNLIYVNAADEFLKKLKNITEPEKKRKIIGNLFIKIFERYAKKLKNVKFLAQGTLYPDLIESKSVTGSQTSKIKSHHNVG

SEQ ID NO: 197663 - protein, 157 aa, Unknown
  Bacterial polypetide isolated from the Sargasso Sea
NCPVMSPLKDLFKDEVRKIGLELGLPKEILFRHPFPGPGLGVRILGEIKRPYIKTLQLADDIFISELIKEGYYDKVSQAFAVFLPVKSVGVVGDSRRYEYVINLRAVETIDFMTAKSAKLPHSFLEKVSNRIINEIPEVSRVTYDISSKPPATIEWE

SEQ ID NO: 197664 - protein, 280 aa, Unknown
  Bacterial polypetide isolated from the Sargasso Sea
MDSGKIIFNFVNNICKSKAEWTTKNIIARQINSIKEKVKTDHVILGLSGGVDSSVAAAIIHKAIQDQLTCIFIDNGLLRLNEKIKVQNSFKHFNMNIKYVDSSAIFLERLKGITDPEEKRKIIGKTFIDVFQTEAKKIKNVKWLAQGTIYPDVIESAASSDNAHLIKSHHNVGGLPKDMDLKLLEPLRELFKDEVRKLGIDIGVESRLINRHPFPGPGLAVRILGEVKVEYANILRKADDIFIEMLNEKKLYNNVSQAFAVFMPVKSVGVTGDGRSYGNV

SEQ ID NO: 197665 - protein, 227 aa, Unknown
  Bacterial polypetide isolated from the Sargasso Sea
IGVDDPEAKRKIIGNTFIEIFDREAEKLSSIKWLAQGTIYPDVIESAGSKTGKAHVIKSHHNVGGLPDDMKLSLVEPLKELFKDEVRRIGVELGLASEMVYRHPFPGPGLGVRILGEVKKEFCEILREADAIFIEELHRTEWYNKVSQAFAVFLPVKSVGVVGDARRHSYVIALRAVETVDFMTAKWARLDPALLELVSNRIMNEIPEVSRVAYDISSKPPATIEWE

SEQ ID NO: 197666 - protein, 100 aa, Unknown
  Bacterial polypetide isolated from the Sargasso Sea
EADHIFIEELIIADLYDKVSQAFAVLLPVKSVGVVGDERRYAEVIGLRAVETVDFMTARWAHLPYEFLEHVSNRIVNEIEDVSRVVYDISSKPPATIEWE

SEQ ID NO: 197667 - protein, 275 aa, Unknown
  Bacterial polypetide isolated from the Sargasso Sea
KTREFGPSKLKKISNSKLLKNIKNNEISWMSHGDTIVKLPNKIKAIAKSEFGSISLFSSSDFMIVGTQFHPEVAHTAFGQQFLKNFLVDIVGCKQNWKPEKLVNQKIKEIKELVGKDIAISAISGGVDSSVSSVLVSKAIGRRLKCFIVDTGLMRYNEVKEILPVLKSLGVKPKVINAGPLFLARLKGIVDPEKKRKIIGKTFIELFDKESRKVSNATFLVQGTLYPDVIESVNVSGPSAVIKSHHNVGGLPKNMKLSLIEPLRDLFKDEVRDLG

SEQ ID NO: 197668 - protein, 294 aa, Unknown
  Bacterial polypetide isolated from the Sargasso Sea
KIREQVGNQEVLLGLSGGVDSAVVAALLTKAIGKQLTCIFVDNGLLRLNEGDQVMETFKGKFGIKVKRANAGNQFLKDLKGKKDPELKRKAIGKTFIDVFLKEAKRNKKIQWLAQGTIYPDVIESAGTKNGSAHVIKSHHNVGGLPSYLNLPVIEPLKDLFKDEVRKIGLELGLPKEILFRHPFPGPGLGVRILGEIKRPYIKTLQLADDIFISELVKGGYYEKVSQAFAVFLPVKSVGVVGDARRYEYVIALRAVETIDFMTAKSAKLPHTFLEKVSNRIINEIPEVSPGDLR

SEQ ID NO: 197669 - protein, 188 aa, Unknown
  Bacterial polypetide isolated from the Sargasso Sea
YPDIIESRSSTGSKTSKIKSHHNVGGLPKKMKLKLVEPLKEFFKDEVRALGKSLGLSDSIIKKHPFPGPGLAIRIIGKITQDKIKILQEADDIFIKDLIKNNLYDEIWQAYAALLPVKTVGVMGDSRTFEYTCLLRAVTSEDGMTAAKFNFSNEYLTNISNKIINRVSGINRVVYDVTSKPPSTIELE

SEQ ID NO: 197670 - protein, 77 aa, Unknown
  Bacterial polypetide isolated from the Sargasso Sea
AVLLPVKSVGVVGDERRYAEVVALRAVETVDFMTARWAHLPYEFLENVSNRIVNEIEQVSRVVYDISSKPPATIEWE

SEQ ID NO: 197671 - protein, 276 aa, Unknown
  Bacterial polypetide isolated from the Sargasso Sea
MIIDFGSQFTQLIARKVRELGVYCEIISHHKSNNIKILDKNVSGLILSGGPLNVYQSKKVKFNKNLLNSNIPVLGICFGHQIISKELGGKVKQSKSREFGLAKVKKVKESTLTKDFFTNKENNVWMSHADEVTKLPKDFKVIGKTNNAKFCIVENSKKKLFGIQFHPEVTHTNRGKIILRNFVFKICKIKRNWSSKDQKLKLIDQVKTQVGNSKVICALSGGVDSSVVAKLLSNAIGNRLTCIFVNTGLLRKDEEKQVIHTFKKRFKINLVYVNAE

SEQ ID NO: 197672 - protein, 306 aa, Unknown
  Bacterial polypetide isolated from the Sargasso Sea
VWMSHADQVTKLPKKFKIIAQSKNSKMCVIENVEKKIFGIQFHPEVSHTIKGKLILKNFIFSICKLTKNWSSRDQKKKLINEVRNSVGNSKVICALSGGVDSSVVAKLLSTAIGKKLTCIFVNTGLLRKNEEKQVVNTFKKKFKINLIYVNAENLFLSKLKNVVDPEKKRKIIGNLFIKIFEKYSNKIKNVKFLAQGTLYPDLIESKSVTGSQTSKIKSHHNVGGLPKKMKLKLVEPLKYLFKDEVRKLGLELGLSNEIISRHPFPGPGLAIRMPGIISREKIKILKEADYYFIKSLKENNLYDKI

SEQ ID NO: 197673 - protein, 191 aa, Unknown
  Bacterial polypetide isolated from the Sargasso Sea
GTLYPDLIESKSVTGSQTSKIKSHHNVGGLPKKMNLNLIEPLKFLFKDEVRKLGLELKLSKEIISRHPFPGPGLAIRMPGLITKEKIKILKEADHYFIQALRKHNLYNKIWQAYAALLPVKTVGVMGDNRTYEYLCLLRAITSQDGMTADFYEFKKSFIQEISNKIVNSIRGINRVVYDITSKPPSTIELE

SEQ ID NO: 197674 - protein, 158 aa, Unknown
  Bacterial polypetide isolated from the Sargasso Sea
MKLKIIEPLRELFKDEVRNLGKKLKISNNLLFRHPFPGPGLAIRIPGVINEEKIKLLQNIDEIFINYLKERKLYNNIWQAFAILLPVRSVGVMGDERTYNYSCCLRAVTSIDGMTADFYMFSKNDFNNISSRIINEIKGVNRVLYDFTSKPPGTIEWE

SEQ ID NO: 197675 - protein, 213 aa, Unknown
  Bacterial polypetide isolated from the Sargasso Sea
SSFIDIFEEEAKKIGGADFLAQGTLYPDVIESVSFTGGPSVTIKSHHNVGGLPERMNMELVEPLRELFKDEVRELGKELGIPSHFIERHPFPGPGLAIRLPGEISSEKADILRKADTIYIEEIRKAGLYNEIWQAFAVLLPVQTVGVMGDERTYDFVCALRAVTSLDGMTADYYPFEQEFLANVSTRIINEVKGINRVVYDITSKPPGTIEWE

SEQ ID NO: 197676 - protein, 243 aa, Unknown
  Bacterial polypetide isolated from the Sargasso Sea
IKVKRANAGNQFLKDLKGKKDPEQKRKAIGKTFIDVFLKEAKRNKKIQWLAQGTIYPDVIESAGTKNGSAHVIKSHHNVGGLPSYLNLPVIEPLKDLFKDEVRKIGLELGLPKEILFRHPFPGPGLGVRILGEIKRPYIKTIQLADDIFISELVKGGYYEKVSQAFAVFLPVKSVGVVGDARRYEYVIALRAVETIDFMTAKSAKLPHIFLEKVSNRIINEIPEVSRVTYDISSKPPATIEWE

SEQ ID NO: 197677 - protein, 171 aa, Unknown
  Bacterial polypetide isolated from the Sargasso Sea
QKRKVIGSIFIDVFENQSQKIQDAKWIAQGTIYPDVIESISVKGPCSTIKSHHNVGGIREKMNLKIIEPLKMLFKDEVRRIGESLDIDKNILNRHPFPGPGLGIRILGEVDEESIRLVQEADKIYIDSLKKWDLYDKIWQAGSILLPVRSVGVMGDERTYERCVSLRAVVS

SEQ ID NO: 197678 - protein, 310 aa, Unknown
  Bacterial polypetide isolated from the Sargasso Sea
IGNNANLFGIQFHPEVVHTPQGKEILDNFLFQVCGILPDWTPGNFVNETVEKIREQVGEGKVICALSGGVDSAVAATLVHKAVGDQLTCIFVNNGLMRKEEPERVQITFEKYMKVNFIFSESSERFIRKLKDVTDPESKRKIIGEEFINVFDEEANRLGEVDFLTQGTLYPDVIESSDSSVSATIKTHHNVGGLPDHMKLKLIEPLRYLFKDEVRQVGLELGLSEEMVFRQPFPGPGLAIRILGEVTEEKLDILRAADWIVMDEIKANNLYQELWQTFAVLTGAKSVGVTGDFRTYGHVIAIRAVTSDDA

SEQ ID NO: 197679 - protein, 227 aa, Unknown
  Bacterial polypetide isolated from the Sargasso Sea
MSKLSVSNKKIDTILVLDFGSQYTQLIARRVRESFVYSEILPWDISEEKIIKLNPKAVILSGGPNSVTESFTPRISKCVFDINVPILGICYGMQTLAEQMGGSVISSNQKEFGHSELEIVNDSTLFKNLPKNLNVWMSHGDQVQDLPDEFNLIASTQTAPVAAMQHKSLPIYALQFHPEVTHTKNGKAILENFIFDIAKVKPEWMMDDLISSRINEIKDQVGDKKVF

SEQ ID NO: 197680 - protein, 155 aa, Unknown
  Bacterial polypetide isolated from the Sargasso Sea
NLVEPLRDLFKDEVRKMGAAMGISSSMINRHPFPGPGLGVRILGEVTKEKVKVLQEADNIFIEELIKADHYNKVSQAFAVLLPIKSVGVVGDERRYAEVIGLRAVETVDFMTARWAHLPYEFLEHVSNRIVNEIEDVSRVVYDISSKPPATIEWE

SEQ ID NO: 197681 - protein, 227 aa, Unknown
  Bacterial polypetide isolated from the Sargasso Sea
MSTKYLSEHKNKIIIIDFGSQVTKLIARRIRELEIYCEIINQNELKKITNFNNIKGIILSGGPSTVTKNTYPSIPKDVFKKNIPILGICYGLQLIAKVFGGKIKKSKKKREFGEAILFEKSKSVLFKNFFTNKKTSVWMSHQDAVYKIPKGFENLASTDNSKYTAIQNKDKNIYGIQFHPEVTHTKKGFKVIKNFVLNICRVKKNWMIGIEKNRIISDLKNKIKGDK

SEQ ID NO: 197682 - protein, 263 aa, Unknown
  Bacterial polypetide isolated from the Sargasso Sea
ERLLELEIPILGICYGMQALAAQLGGGVKSSAHREFGHAEIDLHGGSELLGTLDPDRHGKAQVWMSHGDKVTDLPEGFSVTASTESAPVAAMENPSKRIYAVQFHPEVTHTPNGDHLIDRFTKDICQCDGDWTIENIAEEAIRRTKEQVGDDEVVLGLSGGVDSSVVAAILSRAIGDQLTCIFVDNGLLRKDETEEVEKAFGLEAGTGNVLPIKIKTVDARSEFLNKLVGVVDPEDKRKIIGNTFIDVFEREADKLSNVKWLA

SEQ ID NO: 197683 - protein, 249 aa, Unknown
  Bacterial polypetide isolated from the Sargasso Sea
MLNTWGINVIRIDAESRFLKVLKGVSDPEEKRKIIGVEFIKIFEEQAKSLEDTKWLAQGTIYPDVIESAGVETGKAHVIKSHHNVGGLPDNMKMELVEPLRELFKDEVRKIGIELGLPKSLVYRHPFPGPGLGVRILGEVKKEYADLLRLADNIYIEELREHDLYDDVSQAFSVFLPVRSVGVMGDTRKYDYVIALRAVVTVDFMTAHWAHLPYEFLEKVSNRIINEVEGISRVTYDISGKPPATIEWE

SEQ ID NO: 197684 - protein, 290 aa, Unknown
  Bacterial polypetide isolated from the Sargasso Sea
NSLNLPDNILKLKKPILGICYGHQILAKKFGGSVKISKTREFGFAQIKSDKRCPLTKNFFNNEKNSVWMSHQDIVTRIPSGFKKIASTQNSKFAIIANEKKKFYGVQFHPEVTHTKNGKIILKNFVLNICQTKRMWSLRKQKDLIINDIKKRVKNEKVICALSGGVDSSVVAFLLNKAIGKKLKCVFINTGLLRKNEEKEVIKNFKKKLKSNLIYLDASKLFLNKLKNVTDPELKRKVIGKLFIKLFENKAKKIKFLAQGTLYPDLIESRSVTGSPTSKIKSHHNVRGLP

SEQ ID NO: 197685 - protein, 285 aa, Unknown
  Bacterial polypetide isolated from the Sargasso Sea
NAILENKRNNIYTCQFHPEVYHTKNGKMILKNFVKFICKCKSNWSNKNKIKQISSYIKKHVGKHKVLCALSGGVDSSVLAFLLNKIIKKNLICVYIDTGFMRKGETEEICFIFKKSFSNNFYYLNKKKIFINALKGVVDPEKKRKIIGKTFIKVFENFTKSKKNIKFLAQGTLYPDLIESKSFSGSKTSIIKSHHNVGGLPNKMKFKLVEPFKEMFKDEVRILGKQLGINKKILSRHPFPGPGLAIRIPGEINEKKIKILQYADSILINELKKRNIYDKIWQAFT

SEQ ID NO: 197686 - protein, 283 aa, Unknown
  Bacterial polypetide isolated from the Sargasso Sea
VAKLIHNAIGRKLTCIFVNTGLLRKNEEIQVIKTFKKKFKINLIYVNAKNLFLRNLKKVEDPEKKRKIIGNLFIKIFEKYAKKIRNVKYLAQGTLYPDLIESKSVTGSQTSKIKSHHNVGGLPKKMKLKLVEPLRLLFKDEVRKLGLELKLSKEIVLRHPFPGPGLAIRMPGEITQQKIKILKDADDIFIKALRDYDLYNKIWQAYAALLPVKTVGVMGDNRTYEYMCLLRAITSEDGMTADTFNFNKDFMQFVSNKIINNIKGINRVVYDITSKPPSTIELE

SEQ ID NO: 197687 - protein, 258 aa, Unknown
  Bacterial polypetide isolated from the Sargasso Sea
NEEHEVIKNFKKRLKLRLIYIDASSIFLSKLKNVNNPELKRKIIGKLFIQLFDKIAKKIKNVKFLAQGTLYPDLIESKTVTGSPSSKIKSHHNVGGLPKKMKLNLIEPLNTLFKDEVRKLGKELSLSKDLLLRHPFPGPGLAIRIPGKITKEKICILKEADYIFINELKNSNLYNKIWQAYAALLPLKTVGVMGDKRTYEYTCLLRAVTSKDGMTADFFPFNKNFIQKVSSKIINSVSGINRVVYDITSKPPSTIELE

SEQ ID NO: 197688 - protein, 74 aa, Unknown
  Bacterial polypetide isolated from the Sargasso Sea
LPVKSVGVVGDARRYEYVIALRAVKTIDFMTAKSAKLPHTFLEKVSNRIINEIPEVSRVTYDISSKPPATIEWE

SEQ ID NO: 197689 - protein, 235 aa, Unknown
  Bacterial polypetide isolated from the Sargasso Sea
KNIFLSKLKNVSDPEKKRKIIGNLFIKIFEKNAKKLKKIKFLAQGTLYPDLIESKSVTGSQTSKIKSHHNVGGLPKKMKLQLVEPLKYLFKDEVRKLGLELKLGKEIVLRHPFPGPGLAIRMPGIITNKKIKILQEADHIYITELKKHNLYNKIWQAYAALLPVKTVGVMGDNRTYEYICLLRAITSEDGMTADFFNFNKKFMQLVSNKIINNIRGINRVVYDVTSKPPSTIELE

SEQ ID NO: 197690 - protein, 246 aa, Unknown
  Bacterial polypetide isolated from the Sargasso Sea
MRKGESERIKNLFADKFDVNLIQINASERFYKKIKGITDPEEKRRRIGEEFIRVFEEESQKLKKDFIYLAQGTLYPDIIESATRDTASTATKIKTHHNVGGLPEKMKFKILEPLKRLFKDEVRKVGLELGIPEEIVMRQPFPGPGLAIRILGEVSQERVEILQNADVIIMEIIKKEGLYKKLWQSFGVLLPIRTVGVQGDARTYLNTLAIRAVTSEDAMTASWAKLPYDILEMISSRIINEVPEIN

SEQ ID NO: 197691 - protein, 229 aa, Unknown
  Bacterial polypetide isolated from the Sargasso Sea
MSLDLNLDKILIIDFGSQFTQLIVRRIRELGVFSELISHKKIKTSQIKTNVKGIILSGGPLNVYQLNDNLFDDKILKLGIPILGICFGHQILSKFNGGKVKQSKHREFGLTNIHKRNNSLLIKNFFNKKTKKVWMSHADQVTKLPKNFRVVASSENSKFSIVENKIKNFFGVQFHPEVTHTENGKKIISNFIFLICKIKRNWSSKDQKKKLIKEIKQQVGTDKVICALS

SEQ ID NO: 197692 - protein, 211 aa, Unknown
  Bacterial polypetide isolated from the Sargasso Sea
FIDVFDAEAIKLKDIKFLAQGTIYPDVIESSGSESNEARVIKSHHNVGGLPEEMELDLVEPLRDLFKDEVRRMGLELGIPKEMLERHPFPGPGLGVRIIGEITVEKTLILQEADNIFIEELIKADLYDKVSQAFAVLLPVKSVGVVGDERRYAEVIGLRAVETVDFMTARWAHLPYEFLEHVSNRIVNEIEQVSRVVYDISSKPPATIEWE

SEQ ID NO: 197693 - protein, 267 aa, Unknown
  Bacterial polypetide isolated from the Sargasso Sea
HLICRRIREFSVYAELVPYDISPEEIKKMNPKGIIFSGGPSSVYNDDAPKPDEELFNFDLPLLGICYGHQLIVNKFGGKVKRANKEYGSSLLSMGTNNSGLLDGIGESIRAWMSHGDEAEQIPSDFEVIGHTENSHAAAIANTNRTVFGIQFHPEVVHTERGTDILKNFVLNVCKVKQEWTMEGFVEKTVEEISKIEGDVLCGVSGGIDSTVTALLIHKAIGNRLTGVFVDNGLLRLKESEEIEDMFKNNFSLNFHRIDASEQFLTK

SEQ ID NO: 197694 - protein, 202 aa, Unknown
  Bacterial polypetide isolated from the Sargasso Sea
MQTVVIMDFGSQYSRLIARRIRELNTYCEILPHDAGSEILETQDVIGIILSGGPNSVYESGAPMAPSWVYEAGVPLLGICYGMQLIAHQLGGTVEPGTQREYGHAVIHKDGQDNVLFEGLDTEVPVWMSHGDRIEELPPGFRAMAYSENSPIAVMGDDKGTCFGIQFHPEVAHTPQGVEILRNFISGVCKGSGDWTPANFVS

SEQ ID NO: 197695 - protein, 232 aa, Unknown
  Bacterial polypetide isolated from the Sargasso Sea
FLRKLSNISDPEKKRKIIGNLFIKIFELYAKKIKNVKFLAQGTLYPDLIESKSVTGSQTSKIKSHHNVGGLPKKMKLKLVEPLKFLFKDEVRKLGLELNLSREIITRHPFPGPGLAIRMPGIITKEKINILKEADHYFIQALRDHNLYHKIWQAYAALLPVKTVGVMGDNRTYEYLCLLRAITSEDGMTADFYEFKKSFIQEISNKIVNSIRGINRVVYDITSKPPSTIELE

SEQ ID NO: 197696 - protein, 298 aa, Unknown
  Bacterial polypetide isolated from the Sargasso Sea
MSGGPLNVYQSKKVKFRKEIFKWNVPILGICFGHQVISKELGGRVKQAKQREFGFAKLTSLSKSRLTKNFFNKKGSNSVWMSHADEVTKLAKGFKVIAKTETSKFSIVENSSKKFYGIQFHPEVTHTEKGKIILRNFVFEICMLKKNWSPSNQKKLLIEDVKKIVGNSKVICALSGGVDSSVVAKLIHNAIGRKLTCIFVNTGLLRKNEEIQVIKTFRKKFKINLIYVNAKNLFLRNLKKVEDPEKKRKIIGNLFIKIFEKYAKKIRNVKYLAQGTLYPDLIESKSVTGSQTSKIKSH

SEQ ID NO: 197697 - protein, 257 aa, Unknown
  Bacterial polypetide isolated from the Sargasso Sea
TKNGKKLIKNFIFNICKSKKNWSPKKQKDKIIKEIREQVGSSKVICALSGGVDSSVVAKIIHNAIGKNLTCIFVNTGLLRKNEETQVIETFKKRLKIKLIYINAKDKFIKKLKNISDPEKKRKIIGNLFIKIFEKYSKKIYKAKFLAQGTLYPDLIESKSVTGSQTSKIKSHHNVGGLPKQMKLKLVEPVKYLFKDEVRKLGKELKLNNEILNRHPFPGPGLAIRIPGEIDDYKINILKEADDIFIKSLFKYKIYHK

SEQ ID NO: 197698 - protein, 286 aa, Unknown
  Bacterial polypetide isolated from the Sargasso Sea
MQFHNVKEKVLIIDFGSQVTKLIARRVRDLGIFSEIITPKEIKRVKDFNSIKGIILSGGPSTVTKEKFERVPIEIFSKKIPILGICYGLQLIAKLYGGKIKSSKRKREFGRAFIFKKRHSELTKNFLKSKSSVWMSHEDAVVKLPKNFQVIAYTKDSRLTIIENKKKKIYGVQFHPEITHTDNGKQIFKNFLFSICKIKKRWNVASQKTKLINDVKNIVKKDKVLCALSGGVDSSVVALLINKAIKKNLICIMVDTGLMRKNEFKYNCKIFRKKYKLNVKLINASE

SEQ ID NO: 197699 - protein, 129 aa, Unknown
  Bacterial polypetide isolated from the Sargasso Sea
MVDRHPFPGPGLGVRILGAVKKEYADLLRLADDIFIEELHKENLYDKVSQAFAVFLPVKSVGVMGDGRKYEYVIALRAVETTDFMTANSAKLPYEFLDHVSTRIINEVPGISRVTLDISSKPPSTIEWE

SEQ ID NO: 197700 - protein, 250 aa, Unknown
  Bacterial polypetide isolated from the Sargasso Sea
YGMQTMAEQLGGKVEGSELREFGYARVDVVGKSRLLDGIEDHIDADGLFGLDVWMSHGDKVTKMPEDFHILASTPSCPIAGMFSDERRYYGVQFHPEVTHTKQGGRILSRFILDICECEALWTPSKIAEDAIAQVRAQVGTDNVLLGLSGGVDSSVVAALLHKAIGDQLTCVFVDNGLLRLHEGEQVMAMFAENMGVKVIRANAEDQFLNNLAGESDPEKKRKIIGRTFIDVFDAESNKLDNIKYLAQGT

SEQ ID NO: 197701 - protein, 154 aa, Unknown
  Bacterial polypetide isolated from the Sargasso Sea
LVEPLRKLFKDEVRKVGAALGLPDEIIKRHPFPGPGLAIRILGEVNNEKLDCLRDADWIVRDEIKKAGLYNDIWQAFAVLLPVKTVGVMGDKRTYAWPIVLRCVSSEDGMTADWSKIPFQILERIANRIVNEVDSVNRVVYDITSKPPGTIEWE

SEQ ID NO: 197702 - protein, 230 aa, Unknown
  Bacterial polypetide isolated from the Sargasso Sea
MIYIVDFGSQVTQLIARRVRESGVYCEIVSSKSILNLVNKNKTYGIIFSGGPASVHRSNTPSIDRKIYKLGIPILGICYGMQLMVHQLGGKVQMSKKREFGKTAINSSYKSLILRGFNKGKKSCNVWMSHGDKVISIPEGFKSIASSLNTKFAAIESKKLNFYGLQFHPEVVHTSNGNRIIQNFIFKTCKCKKNWSMKNHLIVQKNLIKKIVSNNHVICGLSGGVDSTVT

SEQ ID NO: 197703 - protein, 147 aa, Unknown
  Bacterial polypetide isolated from the Sargasso Sea
LFKDEVRRIGKSINIPNEILGRHPFPGPGLGIRILGDITKEKVKILQDVDDIFIKGLKNHGLYDEVWQAGAMFLPVQSVGVMGDERTYENAVALRAVSSTDGMTADWCHLPYDFLAKVSNDIINQVKGINRVTYDISSKPPATIEWE

SEQ ID NO: 197704 - protein, 220 aa, Unknown
  Bacterial polypetide isolated from the Sargasso Sea
MNIKSYDCLLIVDFGSQVTQLIARRLREINVYCEIHPYQNLNESLLSQLSPKAIILSGGPDSVTRDGSPRAHSAIFDIGVPLLGICYGQQVMMQQLGGEVKSGVGTAEFGKAFVERKNSSELLKGWFLDQKEQVWMSHGDHVSKIAPGFEVFGYSPNAPYAIIGDPKRHYYAVQFHPEVYHTPNGQTLFENFISIAGLDRNWTMEAYRETIIREIREKVG

SEQ ID NO: 197705 - protein, 254 aa, Unknown
  Bacterial polypetide isolated from the Sargasso Sea
KVICALSGGVDSSVVAKIIHKAIGKNLTCIFVNTGLLRKNEEIQVIKIFKQKLRIKLIYVNAKNLFIKKLKKVNDPEKKRKIIGSLFIKIFEKYSKKIPNIKYLAQGTLYPDLIESRSVTGSQTSKIKSHHNVGGLPKKMKLKLVEPVKFLFKDEVRKLGNELGLSKEILNRHPFPGPGLAIRIPGNVDENKINILKEADNIFIKSLYKYNLYHKIWQAYAALLPVKTVGVMGDNRTYEYICLLRAITSEDGMT

SEQ ID NO: 197706 - protein, 315 aa, Unknown
  Bacterial polypetide isolated from the Sargasso Sea
DNSHDIFYNVPSEINTWMSHMDQVTKIPLNWRIVARSTNEIIAAVSNHDSSRIGLQFHPEVIHSEYGKNILRNFLINIAHCSNDWNANNYVKDQILNIKNEVGNDKLIIGVSGGVDSTVAAALIHKAIGNQSTAILIDHGLMRKNEAKKCVSDLKKSLDVNIHSFDESNIFLSRLEGVNDPEEKRKIIGNQFIKSFEKISKEFGDIPFLAQGTLYPDVIESGFGIGGKSQIIKSHHNVGGLPKDMNFKLVEPLRDLFKDEVRKVGIELGLPAKLVQRHPFPGPGLGVRIIGDISKERIEILQEADKILLIFFMRI

SEQ ID NO: 197707 - protein, 282 aa, Unknown
  Bacterial polypetide isolated from the Sargasso Sea
ATLLHKAMIKNLICVFVNNGLLRKGEANSVMKTFKDNMNLNVIKSESADIFLRHLKGETDPEQKRKIIGRTFIDVFDSEATKLKDIKYLAQGTIYPDVIESSGSESNETRVIKSHHNVGGLPEEMKLDLVEPLRDLFKDEVRRMGIELGLPEEMINRHPFPGPGLGVRILGEVTKNKTLILQEADHIFIEELIKADLYDQVSQAFAVLLPVKSVGVVGDERRYAEVIGLRAVETVDFMTARWAHLPYDFLEHVSNRIVNEIQDVSRVVYDISSKPPATIEWE

SEQ ID NO: 197708 - protein, 288 aa, Unknown
  Bacterial polypetide isolated from the Sargasso Sea
MVSDVKNKVKNEKVLLGLSGGVDSSVVAMLLQKAIGNNLICIFVNHGLLRLGEVDEVMSTFEALDIDIRLVDASELFLSKLIGVTDPEQKRKIIGNTFIDVFENEAKKIKDVDWLAQGTIYPDVIESSSDDHNSSVIKSHHNVGGLPERMNLKLLEPIRELFKDEVRKIGAELNTPQHILQRHPFPGPGLGIRVMGEITQKRIDILQKADKIFIDELKAEKLYDSLSQAFVVYLPIKSVGVVGDERRYEDVLALRAVETVDFMTANWAHLPYDFIGKVSNRIVNEIPL

SEQ ID NO: 197709 - protein, 284 aa, Unknown
  Bacterial polypetide isolated from the Sargasso Sea
MSQTSLKKERDPSILILDFGSQYSELIARRIRETNVFSLVVSNRISVADISDINPKGIILSGGPNSVYEQNAPKCDEKIFNLGIPILGICYGMQLMVKELGGSVISATKKAEYGRAPLNIDKESDLLSDVEDKSIMWMSHGDSINCLPAGFNKIAHTENTLHAAISNDRKKLFGVQFHPEVIHSEFGMTVIKNFVYNISCCAKDWTTETFLEETIPRIRDQVGNKKVLLALSGGVDSSTLAFLLNKAIGNQLTCMFIDQGFMRKGEPEFLMNFFDKKFHIKVEY

SEQ ID NO: 197710 - protein, 266 aa, Unknown
  Bacterial polypetide isolated from the Sargasso Sea
MFIKKKNSLLTKNFFNNKKMNKVWMSHADQISKLPKNFSVVASSQNSRFAIIENIHKKFYGVQFHPEVTHTKNGKKLIRNFIFLICGMKKNWSSKDQKIKLIKDIRHQVKNNKVICALSGGVDSSVVAQLLNKAIGKKLFCIFVNTGLLRKNEEKQVIDTFKKKLKINLIYINAEKEFLKKLLNISDPEKKRKIIGNLFIKIFERYAKKIKNVKFLAQGTLYPDLIESKSVTGSKTSKIKSHHNVGGLPKKMKLELVEPLKFLFKD

SEQ ID NO: 197711 - protein, 320 aa, Unknown
  Bacterial polypetide isolated from the Sargasso Sea
SYRNGKKLISNFVFLICKIKKNWSSKDQKRQLIKDVRDQVGDNKVICALSGGVDSSVVAQLLNKAIGKKLYCIFVNTGLLRKNEEVQVVQTFKKRLKMNLIYVNAEKEFLSKLKNVPDPEKKRKIIGNLFIKIFERYAKKIKNVQFLAQGTLYPDLIESKSVTGSQTSKIKSHHNVGGLPKKMNLKLVEPLKFLFKDEVRKLGLELNLSHEIISRHPFPGPGLAIRMPGVITNEKIKILKEADHYFVQALRDHGLYHKIWQAYAALLPVKTVGVMGDNRTYEYLCLLRAITSEDGMTADFYEFKKSFMQTISNKIVNSIR

SEQ ID NO: 197712 - protein, 298 aa, Unknown
  Bacterial polypetide isolated from the Sargasso Sea
NLSKIIIIDFGSQFTQLIARRIRELGVYCELINHKQINKINHFGKIKGIILSGGPLNVYETKKIKFNASILKKKIPILGICFGHQLISKTLGGKVKKAKQREFGLVRIKKVSNSPLIINFFKKNLKNNVWMSHADEVIKLAKNFKVIAKSENAKFCMIENSKEKFYGIQFHPEVTHTNNGKIILKNFVYRICRIKKNWSSKNQKMILINEVKKQVGNSKVICALSGGVDSSVVAKLLSNAIGKKLTCIFVNTGLLRKNEEQQVINTFKKKFKINLVYINAENLFLKKLKKMFLILKKK

SEQ ID NO: 197713 - protein, 312 aa, Unknown
  Bacterial polypetide isolated from the Sargasso Sea
IRELGSYSEIINLKNIFKLRNDTSVKGIILSGGPLSITTNKGISLDSFLIKKKIPILGICYGHQILAKKFGGKIKVSKHREFGKAILKAKSNSILTKNFFKSKKSLVWMSHQDIVQKLPKGFKTVASSLNSKFAVIANEKFKYYGVQFHPEVSHTENGKILIKNFIFNICKIKKNWNSKNQKKIFISNIKDTVKNDKVICALSGGVDSSVVALLLKKAIGNNLTCIFVNTGLLRKNEASDIKKIFRKKIKLNLVYVDASKTFLKKLINIDNPEKKRKIIGSLFIKIFEKYAKKVKNAKYLAPRNLVPRHDES

SEQ ID NO: 197714 - protein, 277 aa, Unknown
  Bacterial polypetide isolated from the Sargasso Sea
GGVDSTVTAVLVHKAIEDKLKCVFVDTGLMRKNEVEIIKNLFIKNYNISLDVIDASEIFLKKLKGISDPEKKRKIIGKQFIEVFERYSKKKRDIKFLAQGTLYPDIIESLSQVGNSKVTIKSHHNVGGLPKKINFKLLEPLRELFKDEVRKLGKELAISKEFVDRHPFPGPGLGIRILGEISKKKIKILQEADSIYLNLIKKHGLYDKIWQAFCVLLPTKTVGVMGDGRSYEQICVLRAVTSVDGMTAEAYKFSNNFLEICSNEIINKVKGINRVCY

SEQ ID NO: 197715 - protein, 194 aa, Unknown
  Bacterial polypetide isolated from the Sargasso Sea
MNINSYDCLLIVDFGSQVTQLIARRLREINVYCEIHPYQNVNESLLSQLSPKAIILSGGPDSVTRDGSPRAHLAIFDIGVPLLGICYGQQVMMQQLGGEVKSGVGTAQFGKAFVERKKSSDLIKGWFVDQKEQVWMSHGDHVSKIAPGFEVFGFSPNAPYALVGDTKRHYYAVQFHPEVYHTPNGQTLFENFIS

SEQ ID NO: 197716 - protein, 249 aa, Unknown
  Bacterial polypetide isolated from the Sargasso Sea
FKRKLKMNLIYVNAEKEFLGKLKNVSDPEKKRKIIGNLFIKIFERYAKKIKNVKFLAQGTLYPDLIESKSVTGSQTSKIKSHHNVGGLPKKMNLKLVEPLKFLFKDEVRKLGLELKLSKEIISRHPFPGPGLAIRMPGIITNQKIKILKEADYYFIQALREHGLYHKIWQAYAALLPVKTVGVMGDNRTYEYLCLLRAITSEDGMTADFFEFRKSFMQTISNKIVNSIRGINRVVYDVTSKPPSTIELE

SEQ ID NO: 197717 - protein, 214 aa, Unknown
  Bacterial polypetide isolated from the Sargasso Sea
EFIRVFEEKSAEIGQDFPFLAQGTLYPDVIESATIGVAGTAKTIKTHHNVGGLPEDMQFDVVEPLRKLFKDEVRRVGLELGLPEEVVFRQPFPGPGLAIRILGEVTKDRVSLLQDADEIVLEEVKAAGLYRELWQSFAVLLPVKSVGVMGDKRTYEYTIAIRAVTSVDAMTADWARLPYDVIDKISSRIMNEVHGVNRVVYDVTSKPPATIEWE

SEQ ID NO: 197718 - protein, 226 aa, Unknown
  Bacterial polypetide isolated from the Sargasso Sea
NVSDPEKKRKIIGNLFVKIFEKHARKIKKINFLAQGTLYPDLIESKSVTGSQTSKIKSHHNVGGLPKKMKLQLVEPLKYLFKDEVRKLGLELKLGKEIILRHPFPGPGLAIRMPGVITDEKIKILQEADHIYIEELKKHNLYNKIWQAYAALLPVKTVGVMGDNRTYEYICLIRAITSEDGMTADFFNFSKKFMQIVSNKIINNIRGINRVVYDVTSKPPSTIELE

SEQ ID NO: 197719 - protein, 273 aa, Unknown
  Bacterial polypetide isolated from the Sargasso Sea
IYKQILNRGCSGIVFSGGPASVHKSNTPKIDKRIFNLNIPILGICYGMQLLCYQLGGKVKISKKREFGKTLIKPSKKSVLFSGFRKGMSSNYVWMSHGDKVISLPKDFKSIASSSNTKFAAFENEKKSFYGLQFHPEVVHTPNGHKIIENFIFKICKVKRNWSMKNHLRNQITEIKHSVHKDHVICGLSGGVDSTVTAAIISKAINKQLTCIYVDTGLMRLNETKEVVKMFKKHFKSRLIVKDSRKTFIKALKGATDPEKKRKIIGNLFIKIF

SEQ ID NO: 197720 - protein, 323 aa, Unknown
  Bacterial polypetide isolated from the Sargasso Sea
IPHDTPLSEINKKGVIKGIILSGGPSSIFNENAPKCDPEIFRSNIPTLGICYGMQLMAHELGGEVEQGKTHEYGKANLFIDNNLDLFEGLWLETIIWMSHGDSVLRMPDGFNRIGHTETASISAMANPSKKQYGVQFHPEVYHTTKGTEIIRNFVHNICDCKPNWTPDSFIKTTIDDIKSKVNNDKVLCALSGGVDSTTVAALLKKAIGDKLTCVYIDQGFMRKGESDRIKELFSGDFKINLIYVDAKERFFKKVKGVTDPEEKRKKIGEEFIRVFEEKAKELNSEFPYLAQGTLYPDIIESATVGVNDTAVKIKTHHNVGGL

SEQ ID NO: 197721 - protein, 294 aa, Unknown
  Bacterial polypetide isolated from the Sargasso Sea
MEKIIVLDFGSQYSHLICRRIREFSVYAELVPYDISPEELKKMNPKGIIFSGGPSSVYNDDAPKPDEELFNFDLPLLGICYGHQLIVNKFGGKVKRANKEYGSSLLSMDKNSALLDGIGESIRAWMSHGDEAEEIPTNFEVIGHTENSHAAAIANTDRTVFGIQFHPEVVHTERGTDILKNFVLNVCKAKQEWTMEGFVDKTVKEISEIDGNVLCGVSGGIDSTVAALLIHKAVGSRLTGVFVDNGLLRLNESEEIEDMFKNNFELNFHRIDASEQFLFKLKGVTDPEQKRKIV

SEQ ID NO: 197722 - protein, 273 aa, Unknown
  Bacterial polypetide isolated from the Sargasso Sea
MEDSNITNKFNSDGILVVDFGSQYTQLIARRVREEGVFCQIIPFNSVENYLSENEPKGIILSGGPASVLEEETPKVSEKIITLKKPILGICYGQQTLVKQLGGKVVKTGKSEFGRAKIKVVKDCALISGIWNIDEEYDVWMSHGDSVSEMPIGFDVIAQTEGANYATIANEDLRIYGVQFHPEVVHTVEGKQLIRNFVKDIAGCKNNWSMKSFSQYKINILKNYIGNGKVLCGLSGGVDSSVTAALLDVAIGNQLICVFVDHGLLRYKESEEI

SEQ ID NO: 197723 - protein, 294 aa, Unknown
  Bacterial polypetide isolated from the Sargasso Sea
KRKNFDKNIKGIVLSGGPLNVYENKKVKFNNNLLKLEIPILGICFGHQIISKVMGGKVKSSKFREFGLAEVTEIKKSKLTKNFFSNKKNNVWMSHADQVTKLPKNFSVIAKSNNSKMCIIQNNKKNIFGIQFHPEVSHTNKGKVILRNFIFSICKLTKNWSASDQKKKLISEVKEVVGNSKVICALSGGVDSSVVAKLLSNAIGKKLTCIFVNTGLLRKDEEKQVVNTFKKRFKINLIYVNAENLFLSKLKNISDPERKRKIIGNLFIKIFEKYAKKIKKVKFLAPRNSVSRLI

SEQ ID NO: 197724 - protein, 169 aa, Unknown
  Bacterial polypetide isolated from the Sargasso Sea
SHHNVGGLPKKLNFKLIEPLKELFKDEVRILGKKLNVPESILKRHPFPGPGLAVRIPGNVTKEKIKILQDADLIFIKQLKEKDLYNKIWQAFTVLLPVKTIGVMGDQRSYEYTCALRAVTSVDGMTAEPYYFNSEDLAQISTKIVNEVKGVNRVVYDYTSKPPGTIEWE

SEQ ID NO: 197725 - protein, 208 aa, Unknown
  Bacterial polypetide isolated from the Sargasso Sea
FSKYIRKLSQNDFYLAQGTLYTDIIESRSYHGGKSVTIKSHHNVGGLPKDLKFDVIEPFKELFKDEVRRLGLFYKLDQRFVNRHPFPGPGLGIRCIGKVNRQRLDTLREVDEIFINFLIEKNLYNKSWQAFAVLLPVKSVGVMGDERTYEETCVLRCINSVDGMTADVTQIDIETLSEVATHIINKVPRVNKVLYDITSKPPSTIEWE

SEQ ID NO: 197726 - protein, 101 aa, Unknown
  Bacterial polypetide isolated from the Sargasso Sea
QSADAIFIEELTKAGLYDQVSQAFCAFLPIKSVGVVGDERRYADVIAIRAVETVDFMTATWAKLPHDFLARVSNRIVNELEDVSRVVYDISSKPPATIEWE

SEQ ID NO: 197727 - protein, 133 aa, Unknown
  Bacterial polypetide isolated from the Sargasso Sea
MPEEIINRHPFPGPGLGVRILGEVTKDKTLILQEADNIFIEELIKADLYDQVSQAFAVLLPVKSVGVVGDERRYAELIGLRSVKTVDFMTAKWAHLPYDFLELVSNTIVNEIQNVSRVVYDISSKPPATIEWE

SEQ ID NO: 197728 - protein, 215 aa, Unknown
  Bacterial polypetide isolated from the Sargasso Sea
MGRTFIEVFEDEASKLENVKWLAQGTIYPDVIESAGSKTGKAHVIKSHHNVGGLPEEMKLKLVEPLRDLFKDEVRKIGKELGLTSKLVDRHPFPGPGLGVRILGEVKKEYADLLRLADDIFIEELHKENLYDKISQAFAVFLPVKSVGVMGDGRKYEYVIALRAVETADFMTANSAKLPYEFLDRVSTRIINEVSGISRVTLDISSKPPSTIEWE

SEQ ID NO: 197729 - protein, 517 aa, Unknown
  Bacterial polypetide isolated from the Sargasso Sea
MKSRIETILIVDYGSQYTQLIARRIRELEVFCLVYPFKKITKKILNEIQPSAFILSGGPRSVLDKNAPKLNQEILKMKKPVLAICYGMQLVTKNLKGVVKRSTHREYGHTIINIKKKSIIFKGINKQKFKVWMSHGDNINKIPKLFSITSLSNNKIISSIENIKNKIYCIQFHPEVYHTDFGSKIINNFVFNIVNVKNRFKIQKFIENKVSELKYYIKNKKIICGLSGGVDSTVTAYLLSKAVNKNLYCIFVDHGLLRKNESNEVSEIFSKKFGNNFIKINASNIFLKNLKNVSDPEKKRKIIGKTFIEVFDKAAKKISNVDYLGQGTLYPDIIESIPFFGGPTAKIKSHHNVGGLPKKMKLKVIEPLRELFKDEVRNVGRQLKIDQNLLLRHPFPGPGLAIRIPGVIDKKKILILQEADYIFIQFLKEKKLYNKIWQAFVVLLPVKSVGVMGDERTYNYSVSLRAITSVDGMTADFYMFTNNQLKEISSRIINNVKGINRVLYDFTSKPPGTIEWE

SEQ ID NO: 197730 - protein, 337 aa, Unknown
  Bacterial polypetide isolated from the Sargasso Sea
MGKKLISNFIFLICKIKRNWSSRDQKNQLIKDVRKQVGNNKVICALSGGVDSSVVAQLLNKAIGKKLYCIFVNTGLLRKNEEVQVVQTFKNRLKMNLIYVNAEKEFLKKLKNISDPEKKRKIIGNLFIKIFERYAKKIKNVKFLAQGTLYPDLIESKSVTGSQTSKIKSHHNVGGLPKKMNLKLVEPLKFLFKDEVRKLGLELNLSKEIISRHPFPGPGLAIRMPGIITNDKIKILKEADYYFIQALKDHGLYHKIWQAYAALLPVKTVGVMGDNRTYEYLCLLRAITSEDGMTADYYEFKKSFMQTISNKIVNGIRGINRVVYDVTSKPPSTIELE

SEQ ID NO: 197731 - protein, 294 aa, Unknown
  Bacterial polypetide isolated from the Sargasso Sea
MIARRIREIGVLSEIVSCEISPKELLKLNPRGIIFSGGPESVNSKFKPKFNSKILKINQPILGICYGMQLLANQYKGKVDLSAKREFGHSELAFNKNILFKGVNGKKTKIDVWMSHGDKVVKLPKQFKRIASSTNSKIAAFASNDKKRFGVQFHPEVSHTDQGQKILSNFALDVCGCKKNWTSKNIIDDLVQNIKNQVGNKHVLLGISGGVDSSVVAALISKAIGKRLHCIFVDNGLLRKDESIQVNRDLKKGLGLKIATVNAEDIFLKKLKGMTDPEEKRKIIGRTFIDYSKE

SEQ ID NO: 197732 - protein, 245 aa, Unknown
  Bacterial polypetide isolated from the Sargasso Sea
FKINLIYVKAKKIFLKKLKNISDPERKRKIIGNLFVQIFERHAKKIKNIKFLAQGTLYPDLIESKSVTGSQTSKIKSHHNVGGLPKKMKLKLIEPLKYLFKDEVRKLGLELKLKKEIVLRHPFPGPGLAIRIPGVITNKKIKILQEADFIYIEELKKLSLYNKIWQAYAALLPVKTVGVMGDNRTYEYICLLRAITSEDGMTADFYNFSKKFMQTVSNKIINNVQGINRVVYDITSKPPSTIELE

SEQ ID NO: 197733 - protein, 303 aa, Unknown
  Bacterial polypetide isolated from the Sargasso Sea
MKSEILDEKVILGLSGGVDSSVAAILLDRAIGKNLHCIFVNNGLLRKNEYDEVLDQYIGMGLNVKGVDASDQFISGLKGVIDPERKRKIIGNTFIDVFDEESKKISNAKWLAQGTIYPDVIESISVKGPSATIKSHHNVGGLPEKMNLKVIEPLKMLFKDEVRKIGNSLKMPQEILSRHPFPGPGIGIRILGEVDYESIGLIQEADKIYIDALKKWNLYNKIWQAGSILLPVKSVGVMGDERTYERCVALRAVVSTDGMTADWYEFSNDFLKEVSNNIINKVKGINRVVYDISSKPPATIEWE

SEQ ID NO: 197734 - protein, 448 aa, Unknown
  Bacterial polypetide isolated from the Sargasso Sea
MQFNDEKNKVLIVDFGSQVTKLIGRRIRELGVYSEIITPNDLLKIKKFTKIKGLIFSGGPSTVTSKKFQSVPKEIFQKKIPILGICYGLQLITKIFGGKIKSSKKRREFGRATLYKKKSSLLTQNFLKSKSYVWMSHEDAVVKLPKNFKIVASTKDSKMTIIENKKNKIYGVQFHPEVTHTNNGKQIFKNFLFLICKLKKNWSVISQKKILIDQIRETVKKDKVICALSGGVDSSVVALLINKAIKKNLICIMVDTGLMRKDEFKFTYNIFKKKYNLNVKLINASQFFLNKLKDISDPEKKRKIIGKLFIKIFEKESKKYKNLKFLAQGTLYPDIIESRSSTGSKTSKIKSHHNVGGLPKKMNLKLIEPLKEFFKDEVRILGKSLKLIKSINFKHPFPGPGLGIRIVGSINRERVNILQEVDYIYINELKKSNLYDKIWQAYAALLPN

SEQ ID NO: 197735 - protein, 181 aa, Unknown
  Bacterial polypetide isolated from the Sargasso Sea
VSFTGGPSETIKSHHNVGGLPKKMKLKLVEPLRELFKDEVRQLGFELGLPKEFIGRHPFPGPGLAIRCPGEVTSHKIAILRKADSIFIDQIKKYNLYDKIWQAFVVLLPVRSVGVMGDGRTYDFVCSLRAVTSVDGMTADFYPFDNNFLGETSNKIINEVKGINRVTYDITSKPPGTIEWE

SEQ ID NO: 197736 - protein, 249 aa, Unknown
  Bacterial polypetide isolated from the Sargasso Sea
MKLKSIKYKNNKANNNNIPVIVVDFGSQTTQLILRRIREFGIYCEVVSSKEVLDKVKKFKPKAIILSGGPSSSFTRFSPKVNKNIYKLNIPILGICYGMQLICSQLGGKVKQTKIREFGIAKLNVIKNDRLFLNAIKLNKTSQVWMSHGDEVVKLPRGFKSLATTNGKNYASISNVKKKIYGLQFHPEVVHTVKGKQILGNFLKNISKIKPEWKLENFLDEKLMQIKKKVGKDEVICGLSGGVDSSVVA

SEQ ID NO: 197737 - protein, 315 aa, Unknown
  Bacterial polypetide isolated from the Sargasso Sea
DDLISSRLKEIKQKVKEDKVLLGLSGGVDSSVTAVLLYKAIGNNLTCVFVDNGLLRKGESDQVMQTFKDNMKLNVIKSESQEIFLRHLENIEDPEQKRKVIGRTFIDVFDAEAIKLKDIKFLAQGTIYPDVIESSGSESNEARVIKSHHNVGGLPEEMELDLVEPLRDLFKDEVRRMGTKLGIPKEMLERHPFPGPGLGVRIIGEITKEKTIILQEADHIFIEELIKADLYDKVSQAFAVLLPVKSVGVVGDERRYAEVIGLRAVETVDFMTARWAHLPYKFLEHVSNRIVNEIEEVSRVVYDISSKPPATIEWE

SEQ ID NO: 197738 - protein, 497 aa, Unknown
  Bacterial polypetide isolated from the Sargasso Sea
MKKNNNSKKILIFDFGSQYTQLIARRVRELGVFSEISNHKQVKNVNVKELFGIILSGGPLNVYEDKKINFDKKILNLKVPILGVCFGHQLISRRYGGKVVTAKNREFGLATIKKKLNSKLTKNFFDNNKQRDVWMSHADHVVKLPKGFKRIASTRGSKFTIIENDAINRYGIQFHPEVTHTEKGILLLKNFVFGICKSKKNWSTDHQKKTLIKNVQNQIGDKKIICALSGGVDSSVVAQLLNKAVGKQLHCIFVNTGLLRLNEEKQVVNTFKKKLRMNLIYVNAADEFLNKLKNITEPEKKRKIIGNLFIKIFERYAKKLKNVKFLAQGTLYPDLIESKSVTGSQTSKIKSHHNVGGLPKKMKLELCEPLRLLFKDEVRKLGIKLNLSKNIISRHPFPGPGLAIRMPGKVSKDKIEILKQADNIFISELKKEKLYDKIWQAYAALLPVKTVGVMGDNRTYEYICLLRAITSQDGMTADFFDFPKNFIQNVSNKIINN

SEQ ID NO: 197739 - protein, 325 aa, Unknown
  Bacterial polypetide isolated from the Sargasso Sea
GREFLGELTGLTDPQQKRHQVGAVFIRMREQFLGELQLNPEEWMLGQGTLYPDIIESGGSEHANVIKSHHNRVDEVMELLEAGQLVEPLKDLYKDEVRELGSLLGLPDSIVWRHPFPGPGLSVNVLCSEGRNDQGTDSKLEQRVLEALPENSCSASVLPVRSVGVQGDQRTYTPPAVLWKTPEDWNWLEEQSIRITNSVREINRVVLLLSPAALTPLKIREAYCTRERLDLLRQADAIATKTLMEHDLMRDIFQLLVILLPISEDGQGDSIVLRPVCSEDVMTAQFARLDWDLLNSLKQSLSNLPGVDAVFYDITHKPPATFGWE

SEQ ID NO: 197740 - protein, 152 aa, Unknown
  Bacterial polypetide isolated from the Sargasso Sea
MSQKSFKKERDPSILILDFGSQYSELIARRIRETNVFSLVVSNCISIEDINDINPKGIILSGGPNSVYEQNAPKCEEKIFNLGIPILGICYGMQLMVKELGGSVISATKKAEYGRAPINIDQESDLLFDVEDKSIMWMSHGDSINCLPDGFQ

SEQ ID NO: 197741 - protein, 159 aa, Unknown
  Bacterial polypetide isolated from the Sargasso Sea
MVSKKVLLALSGGVDSSTLAFLLNKAIGNQLTCMFIDQGFMRKGEPEFLMNFFDKKFHIKVQYINARERFITKLKGITDPEQKRKIIGEEFIRVFEEESNRLGPFQYLAQGTLYPDVIESAGTNVDPKTGERIAVKIKSHHNVGGLPKDLQFKLVEPLR

SEQ ID NO: 197742 - protein, 234 aa, Unknown
  Bacterial polypetide isolated from the Sargasso Sea
IGREFVEVFQAEAKKLSNAKWLAQGTIYPDVVESGGTKTKKATTIKSHHNVGGLPETLGLKLLEPLRDLFKDEVRELGVALGLPHEMVYRHPFPGPGLGVRILGEVKREYADLLRRADAIFIEELRGTKATAQDAAAGLCAEADVGKSWYDLTSQAFAVFVPVKSVGVMGDGRTYDYVTAMRAVQTTDFMTAHWAHLPYALLGRVSNRVINEVRGLSRVVYDISGKPPATIEWE

SEQ ID NO: 197743 - protein, 377 aa, Unknown
  Bacterial polypetide isolated from the Sargasso Sea
SLPPCFRVIAETPSAPLAGMADEERRFYGLQFHPEVTHTSQGRQIIERFVHEICGCGRQWTPDRIIDAAIQDIRQKVGSDNVLLGLSGGVDSSVAAALLHRAIGDQLTCVFVDTGLLRLDEGDDVMRTFSKNMGVKVVRVNAEDRFLEDLKGVTDPEEKRKKIGHAFIGVFDQEARKISDVKWLAQGTIYPDVIESAGDSSGKAKVIKSHHNVGGLPEDMALSLVEPLRDLFKDEVRKIGLELGLPEEMIFRHPFPGPGLGVRILAEVKKPYADLLRQADAIFISELRREDLYDRVSQAFAVFLPVKSVGVVGDNRAYDYVVALRAVETVDFMTAKWAELPYGFLDRVSRRIINEVKGISRVVYDISGKPPATIEWE

SEQ ID NO: 197744 - protein, 333 aa, Unknown
  Bacterial polypetide isolated from the Sargasso Sea
MSLKDDLSKILIIDFGSQFTQLIARRVREFGVYSEIISHKKINSKLDKKNINGIILSGGPLNVYQSKKIKFNNEIFKWNTPILGICFGHQIISKELGGKVKQAKYREFGLAKLKRLKKSKLINNFFNKTRINNVWMSHADEVTKLAKGFNVIAKTNTSNFSIIENRSKNFYGIQFHPEVSHTENGKIIIKNFIFSICKMKKNWSSKNQKKVLIQEIKKNVGKSKVICALSGGVDSSVVAKLIHKAVGKQLICIFVNTGLLRKNEETQVVKTFKKKFKINLIYVDAKKIFLTKLRNIKNPEKKRKIIGNLFIQIFEKYAKKIKNVKFLAQGTLY

SEQ ID NO: 197745 - protein, 400 aa, Unknown
  Bacterial polypetide isolated from the Sargasso Sea
LLTKNLFKNNKNIVWMSHQDVVTKIPKGFRVIASTKESKFTMIENTKKRIYGLQFHPEVTHTINGKEIFKNFLFDICKIKEKWLINSEKNRLINEIKNKVKNDKVICALSGGVDSSVVALLVHKAIRKNLVCVMVDTGLMRKDEFKFTYEKFKKKYKLNVKLINASKLYFTKLKNISNPEKKRKVIGNLFIKIFEKEAKNHRNLKFLAQGTLYPDIIESRSATGSQSSKIKSHHNVGGLPKKMNLKLLEPLNEFFKDEVRVLGKSLGLIDQIRNKHPFPGPGLAIRIIGPVDPQKVKILQEADYIFINELIRNNLYNKIWQAYAALLPFRTVGVMGDSRTYEYTCLLRAVVSEDGMTADYYNLPKEFLDNIANKIINGVPGINRVVYDITSKPPSTIELE

SEQ ID NO: 197746 - protein, 89 aa, Unknown
  Bacterial polypetide isolated from the Sargasso Sea
KAGLYNDIWQAFAVLLPVKTVGVMGDKRTYAWPIVLRCVSSEDGMTADWSKIPFQILERIANRIVNEVSSVNRVVYDITSKPPGTIEWE

SEQ ID NO: 197747 - protein, 469 aa, Unknown
  Bacterial polypetide isolated from the Sargasso Sea
MELLINELQKNGVIILDFGSQYTQLIARRVRELNVYSEILSSNTHLSQIIGRDPSAIILSGGPSSVFGDEAPNFDKKIFDIDVPILGICYGLQLLAHHHGGLVESNGQGEYGFAEIEIDDDKKLFQNVPKFSQVWMSHMDRVTKLPDEWHTLAHSSNGVIAAMANKDQTRVATQFHPEVIHSKEGKNILKNFLFNISNCYANWTAENFVEQKVKLIREEVGKSNVLVGVSGGVDSTVVAALMNKAVGTQCNAVLIDHGLLRKDEAENCVTALKDGLGVNIHCYNESKIFLSKLKGVTDPEKKRKIIGNQFIFAFEKISKEFGRIDYLCQGTLYPDVIESGVSKGKVAHVIKSHHNVGGLPKNMNFKLIEPLRELFKDEVRKVGKELGLPDSLVFRHPFPGPGLGVRIIGEISEERITILQDADKIYIDTLIEDGLYNKIWQAFAILIPIKTVGVMGDQRTYENLVGFEL

SEQ ID NO: 197748 - protein, 465 aa, Unknown
  Bacterial polypetide isolated from the Sargasso Sea
ILSGGPLSITNDKGISLDSFLIKKKIPILGICYGHQILAKRFGGKIKVSKHREFGKAILKAKSNSILTKNFFKSKKNVVWMSHQDIVQKLPKGFKTIASSQNSKFAVIANDKLKYYGVQFHPEVSHTENGKTLIKNFIFNICKVKKNWNSKNQKKLFISNIVDIVKNDKVICALSGGVDSSVVALLLKKAIGNNLTCIFVNTGLLRKNEANDIKKIFRNKIKLNLVYVDASKIFLKKLKNIENPEKKRKIIGSLFIKIFEKYAKKVKNAKYLAQGTLYPDMIESKSVTGSPSSKIKSHHNVGGLPKNMKFKLLEPLKYLFKDEVRKLGSELSLDKNILLRHPFPGPGLAIRIPGKISAEKIKILQEADYIFMNELKKEKLYNKIWQAYAALLPVKTVGVMGDSRTYEYICLIRAVTSVDGMTADFFSFNKNFLTNISNKIVNSVRGINRVVLDISSKPPSTIELE

SEQ ID NO: 197749 - protein, 473 aa, Unknown
  Bacterial polypetide isolated from the Sargasso Sea
SKNIDGIILSGCPLSVYQKNKVKFDKKILNLGIPILGICFGHQIISKELGGKVKQAKHREFGLAKLKRLKKSKLTNNFFKRNGLNKVWMSHADEVTKLANGFKVIAKTTTSKFSIVENLSKKFFGIQFHPEVTHTENGKILLKNFVFSICKMKKNWSVKNQKQILIKEVKTNLGNAKVICALSGGVDSSVVAKLIHNAIGNQLTCIFVNTGLLRKNEEIQVLKTFKKKFKINLIYVDAKKLFLNKLKNIKDPEKKRKIIGNLFIKIFEKYAKKIKNVKFLAQGTLYPDLIESKSVTGSQTSKIKSHHNVGGLPKKMNLKLIEPLKFLFKDEVRKLGLELKLAKEIVLRHPFPGPGLAIRMPGKINEKKIKILKEADEIFINSLREYNLYDKIWQAYAALLPVKTVGVMGDNRTYEYMCLLRAITSEDGMTADFFNFSKDFKQLVSNKIINNIKGINRVVYDITSKPPSTIELE

SEQ ID NO: 197750 - protein, 195 aa, Unknown
  Bacterial polypetide isolated from the Sargasso Sea
LYPDVIESAGTNIDPKTGERIAVKIKSHHNVGGLPKDLQFKLVEPLRKLFKDEVRKVGAALGLPDEIIKRHPFPGPGLAIRILGEVNNEKLDCLRDADWIVRDEIKKADLYNDIWQAFAVLLPVKTVGVMGDKRTYAWPIVLRCVSSEDGMTADWSKIPFKILERIANRIVNEVDSVNRVVYDITSKPPGTIEWE

SEQ ID NO: 197751 - protein, 520 aa, Unknown
  Bacterial polypetide isolated from the Sargasso Sea
MSLDRILNKILIIDFGSQFTQLIARRIRELGVYSEIISHKQIRNRNINKSIKGIILSGGPLNVYQINKYSFDKNIIENGIPVLGICFGHQILSKLNGGRVRQSKHREFGLANIYKKRNSPLTKNLFNKKKIIKVWMSHADQVSKLPKKFSVIASSQNSKFAIVENKSKKFYGVQFHPEVTHTENGKKLISNFIFDICGIKKNWSSKHQKKKLINDVRYQVGNNKVICALSGGVDSSVVAQLLNKAIGKKLYCIFVNTGLLRKNEEKQVVKTFKTKLKINLIYVNAEKEFLMKLKNVCDPEKKRKIIGNLFIKIFERYAKKIKNVQFLAQGTLYPDLIESKSVTGSQTSKIKSHHNVGGLPKKMKLKLVEPLKFLFKDEVRKLGLELNLNKEIISRHPFPGPGLAIRMPGLITKEKINILKEADHYFIQALKEHGLYHKIWQAYAALLPVKTVGVMGDNRTYEHLCLLRAITSEDGMTADFFEFKKLFIQEISNKIVNSIRGINRVVYDITSKPPSTIELE

SEQ ID NO: 197752 - protein, 539 aa, Unknown
  Bacterial polypetide isolated from the Sargasso Sea
MHDKILILDFGSQVTQLIARRVREAHVYCEIHPNDVSDDFVREFAPKAVILSGSHASTYEDHQLRAPQAVWDLGVPVLGICYGMQTMAVQLGGKVEWSDHREFGYAEMRAHGHTRLLDGIEDFKTDEGHGMLKVWMSHGDKVAELPPGFALMASTPSCPIAGMADEARGYYAVQFHPEVTHTVKGRQIIERFVLQIAGAKPDWIMKNHIEEAVAKIREQVGDEEVILGLSGGVDSSVAAALIHRAIGDQLTCVFVDHGLLRLNEGKMVLDMFEGRLHAKVVHVDASDQFLGHLAGVTDPEAKRKIIGREFVEVFQAEAKKLSKAKWLAQGTIYPDVVESGGTKTKKATTIKSHHNVGGLPETLGLKLLEPLRDLFKDEVRELGVALGLPPEMVYRHPFPGPGLGVRILGEVKREFADLLRRADAIFIEELRNTTATAQDAAAGLCGEADVGKSWYDLTSQAFAVFLPVKSVGVMGDGRTYDYVTSLRAVQTTDFMTAHWAHLPYALLGRASNRIINEVRGINRVVYDISGKPPATIEWE

SEQ ID NO: 197753 - protein, 404 aa, Unknown
  Bacterial polypetide isolated from the Sargasso Sea
RELGVFSEIISHKKIKNKNIDISVKGIILSGGPLNVYEINRYSFDKEILKNNIPVLGICFGHQILSKLNGGKVKQSRHREFGLADVYKKKESLLIKDFFNQKKIHKVWMSHADQVSKLPKNFRVIASSQNSKFAIVEDKINRFYGVQFHPEVTHTENGKKIIRNFIFLICKIKRNWSSKDQKMKLIKEVKSQVGENKVICALSGGVDSSVVAQLLNKAIGKKLYCIFVNTGLLRKNEEKQVVNTFKKRLKMNLIYVNAEKEFLQKLKNVSDPEKKRKIIGNLFIKIFERYAKKIKHVKFLAQGTLYPDLIESKSVTGSQTSKIKSHHNVGGLPKKMKLKLVEPLKYLFKDEVRKLGLALNLNKEIISRHPFPGPGLAIRMPGIITKEKIKILKEADYYFIQGLK

SEQ ID NO: 197754 - protein, 483 aa, Unknown
  Bacterial polypetide isolated from the Sargasso Sea
EEKILILDFGSQYTQLIARRIRELNIYCEIFPFNKIPEITSEYFGIILSGSPYSVHDKDSPKIEFEKFNDLPVLGICYGAQLIANFNNSVIEKSKIREYGRAKLSYVDSENILMKGVKSNSDVWMSHGDSITEISNSFKILASTKDVKVTSYFLKNKNYYGLQFHPEVTHTEFGKKILKNFSVDICDCSQSWNSEKFVEYTVKQIRNIVKNDRVILGLSGGVDSSVAAMLIHKAIGENLYCVFVDNGLLRKNEFSNVLSSYNNLGLNVIGVDAKQLFYNGLLGKVDPEDKRKSIGNNFIKVFEKEANKIGDIKWLAQGTIYPDVIESVSVKGPSATIKSHHNVGGLPEKMNLKIIEPLNLLFKDEVRKVGNQLNIPNNILNRHPFPGPGLGIRILGEITKEKVELLQNADDIYISSLISENLYDKVWQAATILLPVKSVGVMGDERTYEYTIVLRAVTSLDGMTADWSRLPNEFLAEVSNKII

SEQ ID NO: 197755 - protein, 324 aa, Unknown
  Bacterial polypetide isolated from the Sargasso Sea
MFGDIGLEAIESFQPSGLILSGGPESAFTDDAIKPSQKIYSLGLPILGICYGMQVMSEQLGGKVSPSSHREFGHADIKIESNSRLLEGIEHSAEQTVWMSHGDRVESLPEGFRTICTSQNSPSAAMASEDKSFYGLQFHPEVTHTICGQRIIENFLHHICGCASDWNPGNIIAKHIKKVQEAVGNDQILLGLSGGVDSSVVAALLHKAIGDQLVCIFVDNGLLRLNEGDQVMETFSEHMNLNVIRVDAEEAFLERLKGVNDPEEKRKIIGRTFIEVFEDEASKLENVKWLAQRTIYPDVIESAGSKTGKAHVIKSHHNVGGLPE

SEQ ID NO: 197756 - protein, 483 aa, Unknown
  Bacterial polypetide isolated from the Sargasso Sea
MSPEVNLKKILIIDFGSQFTQLIARRVRELGVYSQIISHKKINNQLLETPNINGIILSGGPLNVYEVKKVKFNKKILNSKVPILGICFGHQIIAKEFGGKVNKSKTREFGLANIKKINNSKLTKNFFNKKGFNNVWMSHSDEVTKIPKGFKVVASSTNSKFAIIESISENFYGIQFHPEVTHTQNGKKLLKNFIFSICKSKKNWSSKFQKKILINNVKNYVGSSKVICALSGGVDSSVVAKLLKSAIGKNLICIFVNTGLLRKKEEFEILNTFKKRFKFNLIYVDAKNLFLNKLKNISDPEKKRKIIGNQFIKVFEKYSKKIKNVEFLAQGTLYPDLIESKSATGSQSSKIKSHHNVGGLPKKMKLKLVEPLKYLFKDEVRKLGLELNLPKNVILRHPFPGPGLAIRMPGIVTKEKLKILKEADAIFIQSLISNNLYSKIWQAYAALLPVKTVGVMGDNRTYEYINLLRAITSQDGMTARLFY

SEQ ID NO: 197757 - protein, 292 aa, Unknown
  Bacterial polypetide isolated from the Sargasso Sea
MRLEDSLQKIKIIDFGSQFTQLIARKIREIGVFCEIISHNKINKNYKLERNVKGLILSGGPLNVYQSNKVKFNKNLLFAKIPVLGICFGHQVISKEMGGKVKQSKSREFGLAKVIKIKNSTLTKNFFLNNKNNVWMSHADEVIKLPKNFKVIAKTNNSKFCIIENSKDKLYGIQFHPEVTHTNRGKIILKNFVFDICKIKKNWSPKDQKVKLIKEIRNKVGNSKVICALSGGVDSSVVAKLLSNGIGKNLTCIFVNTGLLRKDEEKQVVSTFKNKFKINLIYVNAEKQFLSK

SEQ ID NO: 197758 - protein, 397 aa, Unknown
  Bacterial polypetide isolated from the Sargasso Sea
MGGGHVLSDGKGEYGFADIDIKIQKGLFSGISSSKVWMSHGDHVEKLPDGWQILAYSSNGIVAAMSNLDQTRVATQFHPEVHHTEEGLKVLSNFLFNIAKCSPNWTPINFIQEQIENIQSVVGEDNVLIGVSGGVDSTVVAALVHKAIGDRAKAVIIDHGLMRKNEVSECVTALESGLGINIEAHDESEIFLSKLEGVSDPEKKRKIIGNQFIFSFERIASEMSKMDYLAQGTLYPDVIESGISKGKSAHVIKSHHNVGGLPENMKFKLIEPLRDLFKDEVREVGRELGIPDKLVDRHPFPGPGLGVRVIGEITRERINILQEADQIYIDVLHEDGIYNEIWQAFCVLTTVKTVGVMGDQRTYENLLGIRAVTSTDGMTADWFRIPTKTLLKISNRM

SEQ ID NO: 197759 - protein, 274 aa, Unknown
  Bacterial polypetide isolated from the Sargasso Sea
MIFIVDFGSQVTQLIARRVRESGVYCEIVSSKSIYKQILHRGCSGIVFSGGPASVHKSNTPKIDKRIFNLNIPILGICYGMQLLCYQLGGKVKISKKREFGKTHIKPSKKSVLFSGFRKGMSSNYVWMSHGDKVISLPRDFKSIASSSNTKFAAVENKKKSYYGLQFHPEVVHTPNGHKIIENFIFKICKVKRNWSMKNHLRNQITEIKHFVHKDQVICGLSGGVDSTVTAAIISKAINKQLTCIYVDTGLMRLNETKEVVKMFKKHFKSRLIV

SEQ ID NO: 197760 - protein, 460 aa, Unknown
  Bacterial polypetide isolated from the Sargasso Sea
VYAELVPFDISIDELKKKEAKGIIFSGGPSSVYNSDAPFPENEIFEFELPILGICYGHQLIVNKFGGKVKRANKEYGSSLLMMDDNSELLDGLGESIRAWMSHGDEAEKIPDEFDIIGHTDNAHAAAIANKDRTVFGIQFHPEVIHTEQGTDILKNFVLKICKAKQDWTMEGFIEKTVNELTKIDGNVLCGVSGGIDSTVAALLIHKAIGERLTGVFVDNGLLRLNESEEIEEMFMKNFSLNFHKIEAQEKFLSKLRGVLDPEQKRKIVGEEFIRVFTDFAEKNGPFKWLAQGTLYPDVIESGVSKGPASVIKSHHNVGGLPDWLNLEILEPLRELYKDEVREVAKILGVPEKLVKRHPFPGPGLSVRIIGEVTPTKLSISRKASRIIEEELWDAGLYNEVWQAFAAVGDDKAVGVVGDERKYGRIVTVRIVDSIDAMTADWTRLPHGILEKISNRITNE

SEQ ID NO: 197761 - protein, 512 aa, Unknown
  Bacterial polypetide isolated from the Sargasso Sea
MILILDFGSQYTQLIARRIRDCDIYCEIIPFNKSIEKIKKQSVSGIILSGGPASVIEEDSPVVSKEIFKIGKPVLGICYGQQLMCKILGGKVDNSSSREFGRAALKVKKNCDLFKNFWFEGNSYNVWMSHGDKIKKIPDGFSKVGESKNAPFAIIADEKRKFYGVQFHPEVIHTDNGIKLLENFSKKICKIKNNWNMKSYKDQAIDKIKGVVGNKHVICGLSGGVDSTVTAILLHKAIGKNLTCVFVDNGLLRLNEAKQVVNLFTKNYDINLIFVDASSDFLSALQNVEDPEDKRKIIGRKFIEIFEKEAKKLNEVEFLAQGTLYPDVIESISFSGAPSAKIKSHHNVGGLPEKMKLSLIEPLRDLFKDEVRKLGEELDIPRNFIQRHPFPGPGLGIRVIGPVDKLKLDILRKADEIYINEIKKVGLYDEIWQAFAVLLPVKTVGVMGDERTYEYVCSLRAVTSLDGMTADFYKFDTSFLGNVSTKIVNEVKGINRVVYDITSKPPGTIEWE

SEQ ID NO: 197762 - protein, 449 aa, Unknown
  Bacterial polypetide isolated from the Sargasso Sea
MEKIVVLDFGSQYSHLICRRIREFSVYAELVPYDISPEELQKMNPKGIIFSGGPSSVYNEDAPKPDEELFNFDLPLLGICYGHQLIVNKFGGKVKRANKEYGSSLLSMDKNSGLLDGIGESIRAWMSHGDEAEEIPSNFEVIGHTENSHAAAIANTDRTVFGIQFHPEVVHTERGTDILKNFVLNVCKAKQEWTMEGFVEKTVKEISEIEGNVLCGVSGGIDSTVAALLIHKAIGDRLTGVFVDNGLLRLDESKEIEDMFKNNFSLNFHRIDASEQFLSKLKGITDPEQKRKIVGEEFIQVFTEFAKQKGPFKWLAQGTLYPDVIESGVSKGPAAVIKSHHNVGGLPEWLNLKILEPLRELYKDEVRDVARILGVPEKLLKRHPFPGPGLSVRIMGEITPSKLAICRKASKIVEEELWDAGVYDKVWQAYASVGDDKAVGVVGDERKYG

SEQ ID NO: 197763 - protein, 520 aa, Unknown
  Bacterial polypetide isolated from the Sargasso Sea
MSLDQNLDKVVIIDFGSQFTQLIARRIRELGVFSEIVSHKKIKISGINQSVRGIILSGGPLNVYQINKYSFDKKILELNIPILGICFGHQILSKLNGGRVRQSKHREFGLANIFKKRDSLLTKNFYGVKKTKEVWMSHADQVSKLPKNFQVIASSTNSKYAIVENKLKKYYGVQFHPEVTHTENGKKLISNFVFLICKIKKNWSSKDQKIKLINEVRDQVGSHKVICALSGGVDSSVVAQLLNKAIGKKLYCIFVNTGLLRKDEETQVVQTFKKRLKMNLIYVNAENEFLGKLKNVPDPEKKRKIIGNLFIKIFERYAKKIKDVKFLAQGTLYPDLIESKSVTGSQTSKIKSHHNVGGLPKKMNLKLVEPLKFLFKDEVRKLGLELKLSNEIISRHPFPGPGLAIRMPGNITNEKIKILKEADYYFIQALKDHGLYHKIWQAYAALLPVKTVGVMGDNRTYEYLCLLRAITSEDGMTADFFEFRKSFMQTISNKIVNSIRGINRVVYDVTSKPPSTIELE

SEQ ID NO: 197764 - protein, 411 aa, Unknown
  Bacterial polypetide isolated from the Sargasso Sea
MVLDFGSQYTQLIARRVRESDVYSEILPWDIAEEKIENLKPKGIILSGGPNSVTESFTPRIPKCIFDMGVPILGICYGMQTLAEQMGGHVISADQKEFGHSELEVVKDSDLFKDLDRRINVWMSHGDQVQDLPDDFDLVASTSTAPIAAMEHKSLPIYAIQFHPEVTHTDYGHKLLDNFILNICHAHADWTMDGLISQRIEEIKSRVKKDKVLLGLSGGVDSSVTAALLNKAIGKKLTCVFVDNGLLRKGEADSVMQTFKENMDLNVIKSDSEEIFLRHLKNVKDPEQKRKIIGRTFVDIFDAEAVKLKDIKFLAQGTIYPDVIESSGSESKDARVIKSHHNVGGLPDEMKLDLVEPLRDLFKDEVRRMGLELNIPKEMIDRHPFPGPGLGVRIIGEVTKEKTKVLQEADH

SEQ ID NO: 197765 - protein, 353 aa, Unknown
  Bacterial polypetide isolated from the Sargasso Sea
LKRFGVQFHPEVTHTTKGKILLKNFVFKICKAKKNWSSKHQKNNLIKKVKNQVGKDKVICALSGGVDSSVVAQLLNMSVGKQLKCIFVNTGLLRKNEERQVVDTFKKKLKIDLIYVNAEKLFLSKLRNIEDPEKKRKIIGNLFIKIFEKYAKKIKNVKFLAQGTLYPDLIESKSVTGSQTSKIKSHHNVGGLPKKMKLKLVEPLRLLFKDEVRKLGLELKLSKQIISRHPFPGPGLAIRMPGQITKEKIKILKEADHYFINELKKENLYNKIWQAYAALLPVKTVGVMGDNRTYDYICLLRAITSSDGMTADYFDFSKKFMQNVSNKIINNIKGINRVVYDVTSKPPSTIELE

SEQ ID NO: 197766 - protein, 231 aa, Unknown
  Bacterial polypetide isolated from the Sargasso Sea
MIFIVDFGSQVTQLIARRVREAGVYCEIVSSKSLYRQIFNRGCSGIVFSGGPASVHKSNTPKIDKRIFNLNIPILGICYGMQLLCYQLGGKVKISKKREFGKTLIKPSKKSILFSGFRKGMSSNYVWMSHGDKVISLPRDFKSIASSSNTKFAAVENKKKSYYGLQFHPEVVHTPKGHKIIENFIFKVCKVKRNWSMKNHLSNQITEIKHSIHKDQVICGLSGGVDSTVTA

SEQ ID NO: 197767 - protein, 336 aa, Unknown
  Bacterial polypetide isolated from the Sargasso Sea
MSQTILKKERDPSILILDFGSQYSELIARRIRETNVFSLVVSNYISIEEIKSINPKGIILSGGPNSVYEHNAPNCNEKIFHLGIPILGICYGMQLMVKELGGSVISATKRAEYGRAPINIDQESDLLSDVEDKSIMWMSHGDSINCLPDGFNKIAHTENTLHAAIANDVKKLFGVQFHPEVIHSEFGMTVIKNFVYKISCCAADWTTETYIEETIPRIREKVGNKKVLLALSGGVDSSTLAFLLNKAIGNQLTCMFIDQGFMRKGEPEFLMNFFDKKFHIKVEYINARERFIAKLKDITDPEQKRKIIGEEFIRVFEEESNRLGPFQYLAPRYSLS

SEQ ID NO: 197768 - protein, 220 aa, Unknown
  Bacterial polypetide isolated from the Sargasso Sea
MSVQPKLDIKNKNIDTILVLDFGSQYTQLIARRIRESDVYSEILPWDVDIKKIEDINPKGIILSGGPESVTDLHTPRAPKIVFDLKVPILGICYGMQTLAEQMGGQVTISEKKEFGFSELTIEDKSKLFTGLSEDFHNVWMSHGDKVETLPKEFKLTASTKSAPIAAMEHSSDSIFALQFHPEVTHTEGGKLIIDNFIFDICSCRPEWKLDDLITSRVKK

SEQ ID NO: 197769 - protein, 329 aa, Unknown
  Bacterial polypetide isolated from the Sargasso Sea
ILLMVCGVERNWNADDILKNIHNQAKTEVGEGKVLLALSGGVDSTVLASVLHKTLEDRLVCVMVDHGLLRKDEANNVVTNLKEKIGLEVNLVNAQETFLEKLKGIKDPEEKRKIIGNTFIEVFEAEAKKIQGIEWLAQGTIYPDVIESAGNSKSKAKVIKSHHNVGGLPERMNLKLLEPFRMLFKDEVRKIGKAINLPDEIIGRHPFPGPGLGIRIIGEVTKERLDKLREADHIFLSEMKKHNLYNQASQAYAFYLPIKSVGVVGDNRIYADVIGLRSVDTTDFMTANVSNLPNDFIQHVSTRIVNEVEGISRVVYDVTSKPPATIEWE

SEQ ID NO: 197770 - protein, 358 aa, Unknown
  Bacterial polypetide isolated from the Sargasso Sea
MSHMDQVTMVPDDWEVVAYSSNNIIAAIASNDDLRFATQFHPEVSHTEEGDILLNNFLFHISDCEKNWTAGNFVNEEITSLKNKIGKDRILVGVSGGVDSTVVASLINKAVGRKCFAVLIDHGLMRKNESMDCMNALKEGLGMNIHVYDESELFFSRLKGIKDPEKKRKIIGDQFIQSFDRIASEIGKFKFLGQGTLYPDIIESGISAGKSAHLIKSHHNVGGLPEKMNFELIEPLKDLFKDEVRKVGSELNISDKLTKRHPFPGPGLGVRIIGEITKDRVSILQDADEIFLNVLKEEQEYDNIWQAFAVLIPVKTVGVMGDQRTYENLIALRAVTSLDGMTADWYRMPPEVLSKISN

SEQ ID NO: 197771 - protein, 273 aa, Unknown
  Bacterial polypetide isolated from the Sargasso Sea
MDFGSQYTQLIARRIRESDVYSEILPWDIDESKIIKLNPKGIILSGGPNSVTETYTPRVPQFVFDLGIPILGICYGMQTLAEQMGGHVISVDQKEFGHSELEVVSDSVIFKNLDKKINVWMSHGDQVQDLPDEFNLVASTKTAPIAAMEHKSLPIYAIQFHPEVTHTDNGQKILENFIFNICNANTDWKMDDLISQRIEEIKRKVQDNKVLLGLSGGVDSSVTAILLHKAIGKKLTCVFVDNGLLRKGEADQVMQTFKENMNLNVIKSDSKEV

SEQ ID NO: 197772 - protein, 441 aa, Unknown
  Bacterial polypetide isolated from the Sargasso Sea
MRLEDTLNKILIVDFGSQFTQLIARKIRELGIYCEIVSHKKIEKFTKFEKNIKGIVLSGGPLNVYESKKVKFNNKILKLGVPLLGICFGHQIISKAMGGSVRTSKHREFGLAEVKETRKSKLTKDFFSKGKNNVWMSHADQVTKLPKNFKIIAQSINSKMCIIENEEKKMFGIQFHPEVSHTIKGKLILKNFIFSICKLTKNWSSRDQKKKLINEVRNSVGNSKVICALSGGVDSSVVAKLLSNAIGKKLTCIFVNTGLLRKDEEKQVVNTFKKRFKINLIYVNAENLFLSKLKNISDPEKKRKIIGNLFIKIFEKYSNKIKNVKFLAQGTLYPDLIESKSVTGSQTSKIKSHHNVGGLPKKMKLKLVEPLKYLFKDEVRKLGLELGLSHEVISRHPFPGPGLAIRMPGIITKEKIKILKEADNYFIKSLKENNLYDKIWQ

SEQ ID NO: 197773 - protein, 385 aa, Unknown
  Bacterial polypetide isolated from the Sargasso Sea
MSHTDQVSKLPKNFKVVASSTNSKFAIVEDKIKKYYGVQFHPEVTHTENGKKLISNFIFLICKIKKNWSSKDQKNQLIKDVRKQVGTQKVICALSGGVDSSVVAQLLNKAIGKKLYCIFVNTGLLRKNEEVQVVQTFKKRLKINLIYVNAEKEFLKKLKNVSDPERKRKIIGNLFIKIFERYSKKIKNVKFLAQGTLYPDLIESKSVTGSKTSKIKSHHNVGGLPKKMNLKLVEPLKFLFKDEVRKLGLELKLSKEIISRHPFPGPGLAIRMPGIITNEKIKILKKADYYFIQALKDHGLYHKIWQAYAALLPVKTVGVMGDNRTYEYLCLLRAITSEDGMTADYYEFKKSFMQNISNKIVNSIRGINRVVYDVTSKPPSTIELE

SEQ ID NO: 197774 - protein, 316 aa, Unknown
  Bacterial polypetide isolated from the Sargasso Sea
MDDLISSRIKEIKEQVQDNKVLLGLSGGVDSSVTAALLHKAIGKKLVCVFVDNGLLRKGEAEQVMQTFKENMQLNVVKSDSQDTFLRHLKDIEDPEQKRKIIGRTFIDVFDAEAMKLKDIRFLAQGTIYPDVIESSGSESKEARVIKSHHNVGGLPEDMKLDLVEPLRDLFKDEVRKMGIELGIPKEMIERHPFPGPGLGVRILGEVTKEKTIILQHADHIFIEELIKADLYNSVSQAFAVLLPIKSVGVVGDERRYAEVIALRAVETVDFMTARWAQLPYDFLEHVSNRIVNEIEEVSRVVYDISSKPPATIEWE

SEQ ID NO: 197775 - protein, 314 aa, Unknown
  Bacterial polypetide isolated from the Sargasso Sea
MVSEQHNDSILIIDFGSQVTQLIARRIRESGIYSEIFPFSKADEAIKKLKPKGIILSGGPSSVNSQDAPTIDDKIFDLKIPILGICYGQQIMCSLLGGEVEKSNKREFGRANIKFLKSSPLFEGFDIKENTEPVWMSHGDKVTNLPKGFEVIAESKNAPFAAVSDEIRSFYGVQFHPEVVHTPKGAKLLKNFTHKISGCSGNWTMDSFKKTVIDNIRTQVGKGKVICGLSGGVDSSVAAVLIHKAIGDQLTCIYVDTGLMRENETDEVVNLFRENFNIPLIDVNAGDTFLTRLTGVSDPEEKRKIIGSSFIDIL

SEQ ID NO: 197776 - protein, 391 aa, Unknown
  Bacterial polypetide isolated from the Sargasso Sea
KSKEVWMSHADQVSKLPRNFKVIASSTNSKFAIVENSKKKFYGVQFHPEVTHTENGKKLLSNFIFLICKIKKNWSSKDQKIKLINDVQHQVGTNKVICALSGGVDSSVVAQLLNKAIGKKLYCIFVNTGLLRKNEETQVIKTFKKRLKMNLIYVNAEKEFLNKLKNVSDPEKKRKIIGNLFIKIFERYSKKIKDVKFLAQGTLYPDLIESKSVTGSQTSKIKSHHNVGGLPKKMNLKLVEPLKFLFKDEVRKLGLELKLSKEIISRHPFPGPGLAIRMPGIITNEKIKILKEADYYFIQALRDHGLYDKIWQAYAALLPVKTVGVMGDNRTYEYLCLLRAITSEDGMTADFYEFKKSFMQIISNKIVNSIRGINRVVYDITSKPPSTIELE

SEQ ID NO: 197777 - protein, 525 aa, Unknown
  Bacterial polypetide isolated from the Sargasso Sea
MSVQSKLDIKSKNIDTILVLDFGSQYTQLIARRIRESDVYSEILPWDVDIKKIEDINPKGIILSGGPESVTDIHTPRAPKIVFDLQVPILGICYGMQTLAEQMGGQVTTSEKKEFGFSVLNIEDNSKLFTGSSSEAIDVWMSHGDKVETLPNDFKLIASTESAPIAAMEHSSKPIYALQFHPEVTHTKGGKLILDNFIFEICSCKPDWKLDDLISSRIKEIKDITNGEKVLLGLSGGVDSSVTAALLSKAIGENLVCVFVDNGLLRKNEAEEVVQTFKNEMDLNLFKVDAQKIFLRHLKGIEDPEQKRKIIGRTFIDVFDAEAAKLENIDFLAQGTIYPDVIESSESESKEARVIKSHHNVGGLPEEMKLKLVEPLRDLFKDEVRRLGSQLDLPEIILNRHPFPGPGLGVRILGEINEKKIKILQEADFIFIEELREADLYDSVSQAFAVFLPIKSVGVVGDERRYSEVIALRAVETVDFMTANWAYLPHEFLDKVSRRIVNEIEDVSRVVYDISGKPPATIEWE

SEQ ID NO: 197778 - protein, 350 aa, Unknown
  Bacterial polypetide isolated from the Sargasso Sea
MSLDTNLDKILIIDFGSQFTQLIARRIRELGVFSELVSHKKITSNHINNNIKGIILSGGPLNVYQLSEKTFDKRIINLGIPILGICFGHQILSKFNGGKVKQSKHREFGLAKIYKKNNSILVKNFFNKKKTNLVWMSHADQVSKLPKNFNVIASSQNSKFAVVENRSKKFYGVQFHPEVTHTKNGKKFISNFIFLICRIKKNWSSKDQKKKLIKDVKKQVGGNKVICALSGGVDSSVVAQLLNKAIGKKLYCIFVNTGLLRKNEEKQVIETFKKRLKINLIYVNAEKLFIKRLNNISDPEKKRKIIGNLFIEIFERYAKKIKNVKFLAQGTLYPDLIESKSVTGSHTSKI

SEQ ID NO: 197779 - protein, 519 aa, Unknown
  Bacterial polypetide isolated from the Sargasso Sea
MNSNLEKLLIIDFGSQFTQLIGRKLRELNVFSEIIPYQNVSNKTLENYNPKAVILSGGPSSVVGKKFPLPPSNLFDLGIPVLGICYGLQVMMKLLGGKVDSGSGTSEFGRAILKKTDSNSKIINDLFIKGKEQVWMSHGDHVSGLSKGFEAIASSEGAPFAIIANDNNKLYGVQFHPEVYHTTNGLKLLNNFLLISGFSKNWSMGSFKEEKINDLKNQIGNKKVICALSGGVDSSVTATLIHKAIGNKLTCIYVDHGLMRLNESEEIIHMFKNNFKLNLIHANERDYFLKSLKGVSDPELKRKIIGNLFIEVFNKYSEKFGDIEYLAQGTLYPDVIESVSFTGGPSETIKSHHNVGGLPKKMKLKLVEPLRELFKDEVRQLGFELGLPKEFIGRHPFPGPGLAIRCPGEVTSYKIDILRKADSIFIDQIKKYNLYDKIWQAFVVLLPVRSVGVMGDGRTYDFVCSLRAVTSVDGMTADFYPFNNDFLGETSNKIINEVKGINRVTYDITSKPPGTIEWE

SEQ ID NO: 197780 - protein, 436 aa, Unknown
  Bacterial polypetide isolated from the Sargasso Sea
MQDRILILDFGSQYTQLIARRVREAGVYSEIYIGDIDFNAIESFKPSGIILSGGPESAFIDDAPKPSKEIYSMGLPILGICYGMQVMTEQLGGKVSPSNEREFGHADAKMEANSRLFEGIETDDEQPVWMSHGDRVESLPEGFQKICISANSPSAAMANEDTSFYGLQFHPEVTHTSCGQRIIKNFVHNICGCGNDWNPGNIIEKDIKEVQEAVGDDQVLLGLSGGVDSSVVAALLHKAIGDQLVCIFVDNGLLRLNEGDQVMETFSEHMNLNVIRVNAEDIFLERLKGIDDPEDKRKIIGRTFIEVFEDEASKLENVKWLAQGTIYPDVIESAGSKTGKAHVIKSHHNVGGLPEDMKLKLVEPLRDLFKDEVRKIGKELGLTSKLVDRHPFPGPGLGVRILGEVKKEYADLLRLADDIFIEELHKENLYDKVSQA

SEQ ID NO: 197781 - protein, 519 aa, Unknown
  Bacterial polypetide isolated from the Sargasso Sea
MRLENNLDKILIIDFGSQFTQLIARKVRELNVFCEIISHNKLKNYKNEKNVKGIILSGGPLNVYQNKKVKFNRSILSLNIPILGICFGHQIISKELGGKVKRAKSREFGLAKVTKLKKSALTENFFSKKSTNVWMSHGDEVIKLPKGFKVIAKSSNSKLCMIENVKKKIYGIQFHPEVSHTVKGKVILKNFVIKICKIKKNWTSKNQKSKLMQQIKEQVGNSKVICALSGGVDSSVVAKLISNAIGKNLTCIFVNTGLLRKNEEKQVVNTFRKKFKLNLIYVNAEQLFISKLKNVTDPEKKRKIIGNLFIKLFEKYAKKIKNVKFLAQGTLYPDLIESKSVTGSQTSKIKSHHNVGGLPKRMKLKLVEPLKYLFKDEVRMLGLELNLSKEIISRHPFPGPGLAIRMPGTITKEKIKILKEADNYFINALREHNLYHKIWQAYAALLPVKTVGVMGDNRTYEYLCLLRAITSEDGMTADYFQFNKSFMQMVSNKIVNNIRGINRVVYDVTSKPPSTIELE

SEQ ID NO: 197782 - protein, 515 aa, Unknown
  Bacterial polypetide isolated from the Sargasso Sea
MKNKDKILILDFGSQYTQLIARRVREIGVFSVVKPSSLSVDKIIEMNPSGIILSGGPETVTISSSQKVDKSLLEANIPILGICYGMQTIANELSGSVVTSNVREFGHAKISCVNQSVLFNNISFDSNKLDVWMSHGDKVDLLPENFEIIASSKDCQIAGFQNEKLNIFGLQFHPEVTHTDQGKKILKNFIFEVCKCRKNWSTSDIIDSMVNSVQDKVKDEKVLLGLSGGVDSSVVAMLLHKAIKNNLICIFVDHGLLRLGEVDEVMSTFEALDIDIRLVDASELFLSKLSGVTDPEQKRKIIGNTFIDVFEIEANKIKDVDWLAQGTIYPDVIESSSDDHNSSVIKSHHNVGGLPDRMNLKLLEPIRELFKDEVRKIGAELNTPEHILLRHPFPGPGLGIRIMGEINKERIDILQKADKIFIDELKANNLYDSLSQAFVVYLPVKSVGVVGDERRYEDVLALRAVETVDFMTANWAHLPYDFIGKVSNRIVNEISSISRVVYDCTGKPPATIEWE

SEQ ID NO: 197783 - protein, 528 aa, Unknown
  Bacterial polypetide isolated from the Sargasso Sea
MSQTSLKKERDPSILILDFGSQYSELIARRIRETNVFSLVVSNHISIEEIKNINPKGIILSGGPNSVYEQNAPNCDEKIFNLGIPVLGICYGMQLMVKELGGSVISATKKAEYGRAPINIDKESALLTDVEDKSVMWMSHGDSINCLPDGFNKIAHTENTFHAAIANDVKKLFGVQFHPEVIHSEFGMTVIKNFVYKISCCAADWTTETYIEETIPRIREQVGNKKVLLALSGGVDSSTLAFLLNKAIGNQLTCMFIDQGFMRKGEPEFLMNFFDKKFHIKVEYINARERFIAKLKGITDPEQKRKIIGEEFIRVFEEESNRLGPFQYLAQGTLYPDVIESAGTNIDPKTGERIAVKIKSHHNVGGLPKDLQFKLVEPLRKLFKDEVRKVGAALGLPDEIIKRHPFPGPGLAIRILGEVNNEKLDCLRDADWIVRDEIKKAGLYNDIWQAFAVLLPVKTVGVMGDKRTYAWPIVLRCVSSEDGMTADWSKIPFQILERIANRIVNEVSSVNRVVYDITSKPPGTIEWE

SEQ ID NO: 197784 - protein, 328 aa, Unknown
  Bacterial polypetide isolated from the Sargasso Sea
MQFHSNKDKVIIVDFGSQVTKLIARRVREFGIYSEIFTPLQIKKLENFNFIKGIILSGGPSTVTKKKFQTIPIKIFEKKIPILGICYGLQLIAKLFGGKIKSSRRRREFGRALIYKKKKSILTKNFFNKKSSVWMSHEDAVVKLPKNFKVVASTKDSKLTIIENNREKIYGVQFHPEVTHTDNGKYIFKNFLFSICKLKKKWSAPSQKKRLIQEIKKTVKKDKVLCALSGGVDSSVAALLINKAIKKNLICIMVDTGLMRKNEFKYTFKLFKNRYKLNVKLINASGIFIKKLKNVYDPEKKRIIIGNLFIKIFEKEAKKLKNVKFLAQ

SEQ ID NO: 197785 - protein, 250 aa, Unknown
  Bacterial polypetide isolated from the Sargasso Sea
SFQSHFKSKLIVVDARNKFFNALRNISDPEKKRKIIGNMFIKIFNQEAKKISKAKFLAQGTIYPDVIESQSFHGGPTSVIKSHHNVGGLPKSMKLRLVEPLRELFKDEVRKLGAKLKLPKSFIQRHPFPGPGLGIRILSDVTKDKVLMLQKADKIYIDEIKSAGLYNEIWQAFAVLLPVKTVGVMGDQRSYECVCGLRAVTSVDGMTADFYPFSGEFLSKVSTRIINEVKGINRVVYDTTSKPPGTIEWE

SEQ ID NO: 197786 - protein, 525 aa, Unknown
  Bacterial polypetide isolated from the Sargasso Sea
MSVQSKLDIKSKNIDTILVLDFGSQYTQLIARRIRESDVYSEILPWDVDIKKIEDINPKGIILSGGPESVTNIHTPRVPKIVFDLQVPILGICYGMQTLAEQMGGQVTTSEKKEFGFSVLDIEDDSKLFIGSSSKTVDVWMSHGDKVETLPNDFKLIASTESAPIAAMEHSSKPIYALQFHPEVTHTKGGKLILDNFIFEICSCKPDWKLDDLISSRIEEIKDITNGEKVLLGLSGGVDSSVTAALLSKAIGENLVCVFVDNGLLRKNEAEEVVQTFKNEMDLNLIKVDAQKIFLRHLNDIEDPEQKRKIIGRTFIDVFDAEAAKLENIDFLAQGTIYPDVIESSESESKEARVIKSHHNVGGLPEEMKLKLVEPLRDLFKDEVRRLGSQLDLPEIILNRHPFPGPGLGVRILGEVNEKKIKILQEADFIFIEELRKADLYNSVSQAFAVFLPIKSVGVVGDERRYSEVIALRAVETVDFMTANWAYLPHDFLDKVSRRIVNEIEDVSRVVYDISGKPPATIEWE

SEQ ID NO: 197787 - protein, 280 aa, Unknown
  Bacterial polypetide isolated from the Sargasso Sea
MSLDNSLNKILIVDFGSQFTQLIARRIRELGVFSDIVSHKKIKLNQINQSVKGIILSGGPLNVYQINKYSFDKKILGLDIPVLGICFGHQILSKLNGGRVKQSKHREFGLANVIKKNNSLLTSNFFGEKKSKVVWMSHADQVSKLPKNFKVIASSSNSKFAIVENKKKNFYGVQFHPEVTHTENGKKLISNFIFLICKIRRNWSSKDQKKKLIKDVRAQVGDNKVICALSGGVDSSVVAQLLNKAIGKKLYCIFVNTGLLRKNEEVQVVQTFKKRLNMNL

SEQ ID NO: 197788 - protein, 465 aa, Unknown
  Bacterial polypetide isolated from the Sargasso Sea
MSGGPLNVYQINKYSFDKKILELNIPILGICFGHQILSKLNGGRVRQSKHREFGLANIFKKRDSLLTKNFYGVKKTKEVWMSHADQVSKLPKNFQVIASSTNSKYAIVENKLKKYYGVQFHPEVTHTENGKKLISNFVFLICKIKKNWSSKDQKIKLINEVRDQVGSHKVICALSGGVDSSVVAQLLNKAIGKKLYCIFVNTGLLRKDEETQVVQTFKKRLKMNLIYVNAENEFLGKLKNVSDPEKKRKIIGNLFIKIFERYAKKIKDVKFLAQGTLYPDLIESKSVTGSQTSKIKSHHNVGGLPKKMNLKLVEPLKFLFKDEVRKLGLELKLSKEIISRHPFPGPGLAIRMPGNITNEKIKILKEADYYFIQALKDHGLYHKIWQAYAALLPVKTVGVMGDNRTYEYLCLLRAITSEDGMTADFFEFRKSFMQTISNKIVNSIRGINRVVYDVTSKPPSTIELE

SEQ ID NO: 197789 - protein, 338 aa, Unknown
  Bacterial polypetide isolated from the Sargasso Sea
MQNHQRLLIIDFGSQVTQLIARRLRELSIYCEIHPFQNVTEKFLQEFKAEAIILSGGPSSITDENSPRPPNLVFELDIPVLGICYGQQVMMAMLGGHVDKGVGTAEFGRAILHKTDRETPLLEGWFSTNQEQVWMSHGDHVSKIAPGFEVFSTSQNAPFAIIANHERKLYAVQFHPEVHHTPKGSTLLENFCRIAGFSGDWTIKGYREQAIAKIREEVGDKQVICGLSGGVDSSVTAVLIHEAIGEQLNCVFVDHGLLRKNEAQEVIKMFRDNYNMSLIHAEEQELFLNKLDGQDDPETKRKIIGGLFIEVFQKYAKNIKDAEFLAQGTLYPDVIESI

SEQ ID NO: 197790 - protein, 102 aa, Unknown
  Bacterial polypetide isolated from the Sargasso Sea
MNKLSVNNKKIDTILVLDFGSQYTQLIARRVREIDVYSEILPWDIDEEKIKELNPKGIILSGGPNSVTKSFTPRAPQIIFDLDVPILGICYGMQTLAEQMGG

SEQ ID NO: 197791 - protein, 517 aa, Unknown
  Bacterial polypetide isolated from the Sargasso Sea
MKSKLETILIVDYGSQYTQLIARRIRELEVFCLVYPFNKITKKILNEIKPSAFILSGGPRSVLDKNAPKLNQEILKMKKPVLAICYGMQLVTKNLKGVVKRSTHREYGHTIINIKKKSLLFKGINKQKIKVWMSHGDNINKIPKLFSITSLSNNKIISSIENYKNKIYCLQFHPEVYHTDFGSKIINNFVFNIVNIKNKFKIQKFIENKVSELKNEIKNKKIICGLSGGVDSTVTAYLLSKAVNKNLYCIFVDHGLLRKNEANEVSKIFSKKFGKNFTKINASNIFLKNLKNVSDPEKKRKIIGKTFIEVFDKAAKKISNVDYLGQGTLYPDIIESIPFFGGPTAKIKSHHNVGGLPKKMKLKIVEPLRELFKDEVRNVGKQLKIDKHLLLRHPFPGPGLAIRIPGVIDKKKILILQEADHIFIEYLKEKNLYNKIWQAFVVLLPVKSVGVMGDERTYNYSVSLRAITSVDGMTADFYMFTNNQLKEISSRIINNVKGINRVLYDFTSKPPGTIEWE

SEQ ID NO: 197792 - protein, 158 aa, Unknown
  Bacterial polypetide isolated from the Sargasso Sea
MKLDLVEPLRDLFKDEVRKMGIELGIPKEMIERHPFPGPGLGVRILGEVTKEKIKILQNADHIFIEELIRADLYNSVSQAFAVLLPVKSVGVVGDERRYAEVIALRAVETVDFMTARWAQLPYEFLEHVSNRIVNEIEAVSRVVFDISSKPPATIEWE

SEQ ID NO: 197793 - protein, 284 aa, Unknown
  Bacterial polypetide isolated from the Sargasso Sea
MLNKVLIVDFGSQVTQLIARSVRSRKVYCEVVPFNKISLNYIKKEKPLGIILSGSPLSVTKKGFPKIKKDIFFLGIPILGICYGMQLISSTLGGKIKKISGREYGDTSIKVLKKSSISPNNWKVGTKNNVWMSHGDSVKKLPKNFTSFAKSNNENYVGIANEKMKIFGLQFHPEVTHTKDGKSIIKNFLFKVCKCKPNWNMKKFKKENIKLLKKKLFNKKVLCALSGGVDSNVTALLLNKAIGKRLLCIFVDHGLLRMGEKKEINNFFKRKNNFKFVSVDASKQ

SEQ ID NO: 197794 - protein, 340 aa, Unknown
  Bacterial polypetide isolated from the Sargasso Sea
MAQNILADKILIIDFGSQYTQLIARRVRELGVYCEIYNHRASLKAIKDFNANGIILSGGPETVKQKGSPKVHDKVFELGIPLLGICYGMQSIAKQLKGKVELAYKREFGHADLSLKSQGSGLFKGINKKKMSVWMSHGDHVSKLPKDFKVCATTYNSPIAAFHHPTKKIFGLQFHPEVTHTPQGKKILKNFVRDISGCKGLWNSKNIIDRAVSEIREQVGDQEVLLGLSGGVDSAVVAALLSKAIGNQLTCIFVDNGLLRLNEGDQVMETFKGKFGIKVKRANAGNQFLRDLKGKKDPELKRKAIGKTFIDVFLKEAKRNTKIQWLAQGTINPDVIESAG

SEQ ID NO: 197795 - protein, 520 aa, Unknown
  Bacterial polypetide isolated from the Sargasso Sea
MTDGTSNESILILDFGSQVTQLIARRIRESGVYSEIFPFSQLNEALEKMQPKGIILSGGPSSVTDSDAPTIDSDIFNLDIPILGICYGQQIMCSLLGGKVESSKEREFGRANIKLLKSSPLFNDFEINNDPEPVWMSHGDKVTNLPNGFDVIAESENAPFAAISDEDRSFYGVQFHPEVVHTPNGSKILKNFTHQISGCKGNWTMDSFKKVAIENIRSQVGKGKVICGLSGGVDSSVAAVLIHEAIGDQLTCIYVDTGLMRENETNEVVNLFKENFNIPLINVDAGDTFLSRLSGISDPEEKRKIIGSSFIDIFEEEANKIGGADFLAQGTLYPDVIESVSFTGGPSVTIKSHHNVGGLPERMNMELVEPLRELFKDEVRELGKELGIPDHFIERHPFPGPGLAIRLPGEISPEKADILRKADTIYIEEIRKAGLYNEIWQAFAVLLPVQTVGVMGDERTYDFVCALRAVTSLDGMTADYYPFEQEFLANVSTRIINEVKGINRVVYDITSKPPGTIEWE

SEQ ID NO: 197796 - protein, 276 aa, Unknown
  Bacterial polypetide isolated from the Sargasso Sea
MQKILVVDFGSQYTQLIARRLRELNVYSEVYPWDEIPVLESVDGFVLSGGPESSNIEGNPNIFNEIFESNKPILGICYGMQVLAFQEGGEIQNEGKKEFGYAKIDLNNQTSLFADTSDSIDVWMSHGDKVISLPEGYETLASSDNSPIAAYQNLEKNYFGLQFHPEVTHTDFGLKIIENFINVCGVERNWNADDILKNIHNQAKTEVGEGKVLLALSGGVDSTVLASVLHKTLEDRLVCVMVDHGLLRKDEANNVVTNLKEKIGLEVNLVNAQRNL

SEQ ID NO: 197797 - protein, 287 aa, Unknown
  Bacterial polypetide isolated from the Sargasso Sea
DSTVTAVLVHQAIGNRLKCLFVDTGLMRLNEVKLIKKIFTENFKIKLVVVNSSKGFMEKLKDVKNPEKKRKIIGKQFIDVFKAYSKKQKNIKFLAQGTLYPDVIESSSNMGKKSVTIKSHHNVGGLPKNIEFKLLEPLRELFKDEVRDLGKTLKIPKDFINRHPFPGPGLGIRILGKITKKNADILRKADDIFIRKIKDKGLYDNIWQAFCVLLPVKTVGVMGDNRTYERICVLRAVTSVDGMTAEAFSFPDNFLEDCANEIINNVKGINRVCYDLTSKPPGTIEYE

SEQ ID NO: 197798 - protein, 359 aa, Unknown
  Bacterial polypetide isolated from the Sargasso Sea
MLPKNNSKKKIIIIDFGSQVTKLIARRIRDLRVYCEIINLKELGKIQNFDNIKGIILSGGPSTVTKRFYPKIPKNIFKKEIPILGICYGLQLIAKVFGGKIKKSSKKREFGEAILFEKSKSILLKNFFNNKKASVWMSHQDAVFKIPKNFKNLASTDSSKYTAIQNIDKKIYGIQFHPEVTHTKKGFKILKNFVLDICKIKKNWLIGIEKNRIISDLKNKIKNDKVICALSGGVDSSVVALLVNKAIKKNLKCIMVDTGLLRKNEFKKSYNLFKYKYKLNIKVIKSKNLFFKKLKNVTDPEQKRKIIGNLFIKIFEKEAKKFKNVKYLAQGTLYPDIIESKSSTGSKTSKIKSHHNVGG

SEQ ID NO: 197799 - protein, 516 aa, Unknown
  Bacterial polypetide isolated from the Sargasso Sea
MSGYKNGGVIILDFGSQYTQLIARKIRELNVFSHILPHDIPLDDIMVYEPKGIILSGGPSSVYEKNAPSYNKEILNIDLPILGICYGLHILAQHNGGSVKSTGQGEYGFAKISITKDTDFLDPELNGSQVWMSHMDQVTKVPESWSVIAESSNGVVAAMASTDLKRLATQFHPEVSHTEFGKDMLENFLFKIALCNSNWTPGNFIEEQVNMIRNEVGDNNVLIGVSGGVDSSVVAAIMNKAIGDNAKAVLIDHGLLRKNEASDCINALKNGLGVNIYLEDESEIFFEKLSGVTDPEQKRKIIGNQFIYSFESVSSRFENMNYLAQGTLYPDVIESGVSHGKAAHVIKSHHNVGGLPEDMKFKLIEPLRELFKDEVRTVGKELGLPDKLIKRHPFPGPGLGVRIIGEITKERVYILQEADKIYIDILEEEGLYDEIWQAFAVLIPVKTVGVMGDQRTYENLLGLRAVTSTDGMTADWYRMPPEVLSKISNHIVNSVKGVNRVTYDVTSKPPGTIEWE

SEQ ID NO: 197800 - protein, 525 aa, Unknown
  Bacterial polypetide isolated from the Sargasso Sea
MSDIHEHKILILDFGSQYTQLIARRIREIGVYCELWAWDVTEAQIREFAPNGIILAGGPESVTADNSPRAPEYVFNAGVPVLGICYGMQTMSEQLGGKVIQGVGEGEFGYAQIEMLAESALFKGIEDAVSSDGKSLLDVWMSHGDKVSAIPEGFVAVAKTDTCPFAAMSCEEKRFYGVQFHPEVTHTRQGMRMLSHFALDICGCAANWKPSSIIEDAIERLKKQVGDDEVILGLSGGVDSSVVAMLLHRAIGKKLTCVFVDNGLLRLNEAKQVMEMFGDHFGLNIVHVDAENRFLDALKGEADPEAKRKIIGRVFVEIFDEEAKKCVNAKWLAQGTIYPDVIESAGSATGKAHVIKSHHNVGGLPDDMELGLVEPLRELFKDEVRKIGLELGLPYNMLYRHPFPGPGLGVRVLGEVKKEYCDLLRRADAIFIEELHKADLYNKVSQAFTVFLPVRSVGVMGDGRKYDWVVSLRAVETIDFMTAHWAHLPYDFLGRVSNRIINEIDGISRVVYDISGKPPATIEWE

SEQ ID NO: 197801 - protein, 135 aa, Unknown
  Bacterial polypetide isolated from the Sargasso Sea
MSIINETILIIDYGSQYTQLIARRIREQNIYCLVHPYNKINSEILNNKCLSGIILSGGPNSVRDKKSPKLNKKILVLKIPILGICYGLQLLCKEFGGNIGQSNSREYGHSLITPKNKSKLLDGVKKNSQVWMSQW

SEQ ID NO: 197802 - protein, 515 aa, Unknown
  Bacterial polypetide isolated from the Sargasso Sea
MDQENLEKIIIVDYGSQVTQLIARKVREIGVYSEIINFNKSKKIKQNKFIKGIILSGGPLTITKSNSLNLTENILNLKKPILGICYGHQILAKKFGGKVKISKTREFGFAQIKSDKRCPLTQNFFKNKNNSVWMSHQDIVTKIPGGFKRIASTQNSKFAIISNEKRKLYGVQFHPEVTHTENGKILLSNFVLNICHTKKMWSLRKQKDLIINDIKNKVKNEKVICALSGGVDSSVVAFLLNKAIGKKLKCVFINTGLLRKNEEKEVVKTFKKKLKSNLVYVDASKLFLSKLKNVTDPELKRKIIGKLFIKLFERKAKKIKFLAQGTLYPDLIESRSVTGSPTSKIKSHHNVGGLPKNLKFSLVEPLQTLFKDEVRKLGKELSVPKAILQRHPFPGPGLAIRIPGKISKYKIKILQEADFIFIDELKKSNLYHKIWQAYAALLPLKTVGVMGDSRTYEYTCMLRAVTSHDGMTADFYNFDKTFIQKVSNRIINSVNGINRVLYDVTSKPPSTIELE

SEQ ID NO: 197803 - protein, 249 aa, Unknown
  Bacterial polypetide isolated from the Sargasso Sea
MKKNSRAKKILIIDFGSQYTQLIARRVRELGVFSEISNHKQVKKVNVEELFGIILSGGPLNVYEDKKINFNKKILDLKVPILGLCFGHQLISRHYGGKVITAKNREFGLATIKKKLNSKLTKNFFDNRKQRNVWMSHADHVTRLPKGFKATASTKGSKFTIIENDLIKRYGVQFHPEVTHTEKGILLLKNFVFGICKSKKNWSTDHQKKTLIKDVQNQIGNKKIICALSGGVDSSVVAQLLNKAVGKQL

SEQ ID NO: 197804 - protein, 512 aa, Unknown
  Bacterial polypetide isolated from the Sargasso Sea
MIFIVDFGSQVTQLIARRVREAEVYCEIVSSKSLYNQIINRGCSGIIFSGGPASVHKSNTPKIDKRIFNLNIPILGICYGMQLLCYQLGGKVKISKKREFGKTLIKPSKKSVLFSGFRKGKSSNYVWMSHGDKVISLPRDFKSIASSSNTKFAAVENKKQSYYGLQFHPEVVHTPNGHKIIENFIFKICKVKRNWSMKNHLRNQITEIKHSVHKDQVICGLSGGVDSTVTAAIISKAINKQLTCIYVDTGLMRLNETKEVVKMFKKHFKSRLIVKDSRKIFIKALKGATDPEKKRKIIGSLFIKIFNQEANKIKRAKYLAQGTIYPDVIESQSFHGGPTSVIKSHHNVGGLPKRMKLRLVEPLRELFKDEVRKLGLEMRLPKKFINRHPFPGPGLGIRILGEVTADRVKILQEADNIYIEEIKEAGLYDKIWQAFAVLMPIKTVGVMGDHRSYEQVCGLRAVTSVDGMTADFYHFKGEFLSKVSTRIINEVKGINRVVYDTTSKPPGTIEWE

SEQ ID NO: 197805 - protein, 314 aa, Unknown
  Bacterial polypetide isolated from the Sargasso Sea
MQTQMLVDEAIGELKSRIDDTAIIACSGGIDSTVAAVLAHKAVGSLLHCVYVDTGLMRKGETSEVSEMFSEMGIKLQVVDASARFFESLSGVTDPEEKRKIIGEQFIRVFEEEKGTCAAKFLVQGTIAPDWIESGGGDRDVIKSHHNVGGLPEDVDMTIVEPLREFYKDEVREIARSLGIKSSERQPFPGPGLAVRVLGEVTPERVDSCREACHIVESRIRESAARGECDLPWQYFATLLPVRSVGVHGDVRVHGETVVVRAVASLDGMSARYSPLPHGLLAEISTEITNSLKGHVNRVVYDITHKPPGTIEWE

SEQ ID NO: 197806 - protein, 142 aa, Unknown
  Bacterial polypetide isolated from the Sargasso Sea
MNKNNFIEKITIIDYGSQFTQLIARKIRELGVYSEIINFNQIKNLKKNHSVKGIILSGGPLTITDKNSSSLDDHILKLNIPILGICYGHQILAKKLGGKVKISKKREFGHAIVKSKSKSIITKNFFKKKNNAVWMSHPGCCF

SEQ ID NO: 197807 - protein, 422 aa, Unknown
  Bacterial polypetide isolated from the Sargasso Sea
FGGHVSSAAEREYGSAIFSQSRPQHPLFDGLPSSFEVWASHGDNVLKLPDGFRVLAESENAPIVAFTDDTNRFGIQFHPEVVHTTGGTQLLHNFLFEIVKCRGTWDPESFIDETIQQVRELVGNAEVICGLSGGVDSAVAAALVHEAIGDQLTCIFVDNGLLRQNEAEQVVQTFREHMGIKLRHVDAREQFLEKLKDIDDPETKRIVIGETFIRVFERETSQSEGAEFLVQGTLYPDVIESAGTGNDATVKIKSHHNVGGLPDDMQLRLIEPLRNLFKDEVRNVGRAMGISPEIIDRQPFPGPGLAIRVIGDITEEKLDILRRADSILQDELIRSGSTSELWQSFAVLTNTRSVGVQGDFRTYGNVIALRCITAEDAMTADWAKLPYELLTAISNRITNEVPEVNRVVYDITSKPPGTIEWE

SEQ ID NO: 197808 - protein, 521 aa, Unknown
  Bacterial polypetide isolated from the Sargasso Sea
MNKLSVNNKKIDTILVLDFGSQYTQLIARRVRELDVYSEILPWDIDEDKIKKLNPKGVILSGGPNSVTKSFTPRAPQIIFDLNIPILGICYGMQTLAEQMGGNVISSDKKEFGHAELDIVADSVLFNNLDKKINVWMSHGDQVQDLPDDYELLALTNTAPIAAMHHKNLPIYAIQFHPEVTHTKNGITILENFIFDICHAQNDWKMDDLISSRIEEIKQKVENHKVLLGLSGGVDSSVTAVLLNKAIGKKLTCVFVDNGLLRKGESDQVMQTFKENMNLNVIKSDSQDIFMRHLENIDDPEQKRKIIGRTFIDVFDAEAIKLKDIKFLAQGTIYPDVIESSGSESNEARVIKSHHNVGGLPEEMELDLVEPLRDLFKDEVRRMGLELGIPKEMLERHPFPGPGLGVRIIGEITVEKTIILQEADNIFIEELIKADLYDKVSQAFAVLLPVKSVGVVGDERRYAEVIGLRAVETVDFMTARWAHLPYEFLEHVSNRIVNEIEQVSRVVYDISSKPPATIEWE

SEQ ID NO: 197809 - protein, 260 aa, Unknown
  Bacterial polypetide isolated from the Sargasso Sea
MRLDESKEIEDMFKNNFSLNFHRIDASEQFLSKLKGITDPEQKRKIVGEEFIQVFTEFAKQKGPFKWLAQGTLYPDVIESGVSKGPAAVIKSHHNVGGLPEWLNLKILEPLRELYKDEVRDVARILGVPEKLLKRHPFPGPGLSVRIMGEITPSKLAICRKASKIVEEELWDAGVYDKVWQAYAAVGDDKAVGVVGDERKYGRIVTVRVVDSIDAMTADWTRLPNGVLEKISNRITNEIDEVTWVSYVISSKPPATIEPQ

SEQ ID NO: 197810 - protein, 401 aa, Unknown
  Bacterial polypetide isolated from the Sargasso Sea
MSGGPNSVYEHNAPNCNEKIFHLGIPILGICYGMQLMVKELGGSVISATKRAEYGRAPINIDQESDLLSDVEDKSIMWMSHGDSINCLPDGFNKIAHTENTLHAAIANDVKKLFGVQFHPEVIHSEFGMTVIKNFVYKISCCAADWTTETYIEETIPRIREKVGNKKVLLALSGGVDSSTLAFLLNKAIGNQLTCMFIDQGFMRKGEPEFLMDFFDKKFQIKVEYINARERFIAKLKDITDPEQKRKIIGEEFIRVFEEESNRLGPFQYLAQGTLYPDVIESAGTNIDPKTGERIAVKIKSHHNVGGLPKDLQFKLVEPLRKLFKDEVRKVGAALGLPDEIIKRHPFPGPGLAIRILGEVNNEKLDCLRDADWIVRDEIKKAGLYNDIWQAFAVLLPSKNQ

SEQ ID NO: 197811 - protein, 210 aa, Unknown
  Bacterial polypetide isolated from the Sargasso Sea
MEKILVVDFGSQYTQLIARRLRELKVYSEVCPWDELPALDEVQGFILSGGPETSNIEGNPTINESIFNLNKPILGICYGMQVLAFQEGGSVENEGKKEFGYAQVSLQNKSSLFSNLDKNLDVWMSHGDKVTSLPDGYETVAVSDNSPIAAFENSEKKYFGLQFHPEVTHTKKGLEIIDNFIKECDVERRWTEEDILKTVADEVDTKVQDG

SEQ ID NO: 197812 - protein, 304 aa, Unknown
  Bacterial polypetide isolated from the Sargasso Sea
MSKSVLIIDFGSQYTHLIGRKIRELGVYAEIYPPKYLNNVTNILNHSVLILSGGPDSVLNKNAPKIDIPLDQIPIPILGICYGFQYISKEFDGVIEKSNQREYGKTIIKISKCDLFKNTNSEQQVWMSHGDSLSKIPKGFKILAKTKNKIPAAIYKKNIYAIQFHCEVTHSEFGNQILKNFLFNICNLKENWKNNDLHQTIGRYLRINVKEKKPNIVCAVSGGVDSTVLAFAISKYLKLDNVHFIFVNNGLLRKYDIKNIKSVFKSFNLKLNIINAEHIFLKKLKNVTDPELKRKIIGGLFIEV

SEQ ID NO: 197813 - protein, 419 aa, Unknown
  Bacterial polypetide isolated from the Sargasso Sea
MNSNDKILILDFGSQYTQLIARRVREIGVFSEVKPSSISTEEIIKMNPSGIILSGGPETVTISSSQKVHKSLLEAKIPILGICYGMQTIAKELGGSVVNSDVREFGHANISDVNNSILFDNVNFDSNNLDVWMSHGDKVDKIPENFEIIASSKDCAVAGFQNLDSNIFGLQFHPEVTHTNQGEKILSNFIFKVCGCSKNWSTSDIINSMVSDVKNKVKNEKVLLGLSGGVDSSVVAMLLHKAIGNNLICIFVDHGLLRLGEVDEVMSTFEALDIDIRLVNASELFISNLSGVTNPEKKRKIIGNTFIEVFENEANKIKDVDWLAQGTIYPDVIESSSDDHNSSVIKSHHNVGGLPERMNLKLLEPIRELFKDEVRKIGAELDTPKHILQRHPFPGPGLGIRVMGEITRDKINILQKADK

SEQ ID NO: 197814 - protein, 206 aa, Unknown
  Bacterial polypetide isolated from the Sargasso Sea
MAEAIKLKDINFLAQGTIYPDVIESSGSESSEARVIKSHHNVGGLPEEMKLDLVEPLRDLFKDEVRRMGVELGIPKEMLERHPFPGPGLGVRIIGEITKEKTKVLQEADHIFIQELIKADLYDKVSQAFAVLLPVKSVGVVGDERRYAEVVALRAVETVDFMTARWAHLPYEFLEGVSNRIVNEIEEVSRVVYDISSKPPATIEWE

SEQ ID NO: 197815 - protein, 212 aa, Unknown
  Bacterial polypetide isolated from the Sargasso Sea
TFIEVFEDEASKLENVKWLAQGTIYPDVIESAGSKTGKAHVIKSHHNVGGLPEDMKLKLIEPLRDLFKDEVRKIGKELGLTSKLVDRHPFPGPGLGVRILGAVKKEYADLLRLADDIFIEELHKENLYDKVSQAFAVFLPVKSVGVMGDGRKYEYVIALRAVETTDFMTANSAKLPYEFLDHVSTRIINEVPGISRVTLDISSKPPSTIEWE

SEQ ID NO: 197816 - protein, 72 aa, Unknown
  Bacterial polypetide isolated from the Sargasso Sea
MYQTVVIVDFGSQVTQLIARRVRELGVYSEIIPCTTANPDSIGKMAPKGIILSGGPASVTENNAPKVNAPSY

SEQ ID NO: 197817 - protein, 418 aa, Unknown
  Bacterial polypetide isolated from the Sargasso Sea
MTTNIHDQRILILDFGSQYTQLIARRVREIGVYCELWAWDVTEEQIREFNPQGIILSGGPESVTEEGSPRAPEYVFEAGVPVLGVCYGMQTMAQQLGGGVLGSDKREFGYAQVEVIKPSPLLDKIEDAIGDNGAALLDVWMSHGDKVAAIPEGFETIAQTASCPHAAMYNAEKQFYGVQFHPEVTHTRQGMRLLTHFVMDICKCEKLWTAGAIIDDAIERIKEKVGDEEVILGLSGGVDSSVTAMLLHRAIGDKLTCVFVDNGLLRLNEADQVMEMFGDHFGLNIIRVDAEERFLDRLKGIEDPELKRKAIGNEFVRVFDEEAGKRENAKWLAQGTIYPDVIESAGSATGKAHVIKSHHNVGGLPEDMELGLVEPLRELFKDEVRKIGLELGLPYDMLYRHPFPGPGLGVRVLGEIRK

SEQ ID NO: 197818 - protein, 247 aa, Unknown
  Bacterial polypetide isolated from the Sargasso Sea
KLNLEVVDAKKTFYRHLNGVKDPEQKRKIIGRTFIDIFDNESVNMKTKEEIKFLAQGTIYPDVIESSESESNEARIIKSHHNVGGLPDEMKMELVEPLRDLFKDEVRKLGAKLDLPSDILNRHPFPGPGLGVRIMGEINPERIRILQEADSIFINELIKADLYNDVSQAFCVYLPIKTVGVVGDERRYADVIALRAVETVDFMTAKWADLPYEFVSKVSNRIVNEIADISRVVYDVTGKPPATIEWE

SEQ ID NO: 197819 - protein, 533 aa, Unknown
  Bacterial polypetide isolated from the Sargasso Sea
MTPSAAMHDKILILDFGSQVTQLIARRVREANVYSEIHPYDVDASFIRDFAPKGVILSGGPSSVTEADTPRVPQVVFELGVPVLGICYGMQAMAEQLGGKVDIGHLREFGYAEVRARNHTSLLEGISDFTTPEGHGMLKVWMSHGDKVLEMPQGFKLMASTESCPIAAMADEARHFYGLQWHPEVTHTVQGRAMLERFVLQICGANPDWEMGHYIDEAVAKIREQVGNEHVILGLSGGVDSSVAAALLHRAIGDQLTCVFVDHGLLRLNEAEQVMATFAENLGVKVIHVDASEVFLSKLAGVTDPEAKRKIIGAEFVEVFQTEANKLTDAKWLAQGTIYPDVIESAGKGKKATQTIKSHHNVGGLPETLNLKLLEPLRELFKDEVRELGVKLGLPPAMVYRHPFPGPGLGVRILGEVRRDFADLLRRADAIFIETLRTFIDKETGKSWYDLTSQAFAVFLPVKSVGVMGDGRTYEYVVALRAVQTLDFMTAHWAHLPHELLGHVSNRIINEVRGINRVVYDISGKPPATIEWE

SEQ ID NO: 197820 - protein, 157 aa, Unknown
  Bacterial polypetide isolated from the Sargasso Sea
MQSKLETILIVDYGSQYTQLIARRIRELEVFCLVYPFNKITKKILNELKPSAFILSGGPRSVLDKNAPKLNQEILKMKKPVLAICYGMQLVTKNLKGVVKRSTHREYGHTIINIKKKSLLFKGIIKKKIKVWMSHGDNINKIPKLFSITSLSNNKII

SEQ ID NO: 197821 - protein, 385 aa, Unknown
  Bacterial polypetide isolated from the Sargasso Sea
MSHADQVSKLPKNFKVVASSINSKFAIVENKIKKYYGVQFHPEVTHTENGKKLISNFIFLICKIKRNWSSKDQKNQLIKDVRKQVGNNKVICALSGGVDSSVVAQLLNKAIGKKLYCIFVNTGLLRKNEELQVVQTFKKLLKMNLIYVNAEKEFLKKLKNVSDPEKKRKIIGNLFIKIFERYAKKIKNVKFLAQGTLYPDLIESKSVTGSQTSKIKSHHNVGGLPKKMNLKLVEPLKFLFKDEVRKLGLELNLSKEIISRHPFPGPGLAIRMPGIITNDKIKILKEADYYFIQALKDHGLYHKIWQAYAALLPVKTVGVMGDNRTYEYLCLLRAITSEDGMTADYYEFKKSFMQTISNKIVNSIRGINRVVYDVTSKPPSTIELE

SEQ ID NO: 197822 - protein, 342 aa, Unknown
  Bacterial polypetide isolated from the Sargasso Sea
VTHTPQGKRILKNFVRDISGCKGLWNSKNIIDRAVSEIKDQVGDQEVLLGLSGGVDSAVVAALLSKAIGSQLTCIFVDNGLLRLNEGDQVMETFKGKFGIKVKRANAGNQFLKDLKGKKDPEQKRKAIGKTFIDVFLKEAKRNKKIQWLAQGTIYPDVIESAGTKNGSAHVIKSHHNVGGLPSYLNLPVIEPLKDLFKDEVRKIGLELGLPKEILFRHPFPGPGLGVRILGEIKRPYIKTLQLADDIFISELVKGGYYEKVSQAFAVFLPVKSVGVVGDARRYEYVIALRAVETIDFMTAKSAKLPHTFLEKVSNRIINEIPEVSRVTYDISSKPPATIEWE

SEQ ID NO: 197823 - protein, 585 aa, Unknown
  Bacterial polypetide isolated from the Sargasso Sea
MSNDCLAVLDFGSQYAHLIAKRLRRKGFYTEIHTPASPASKLAHARGLILSGGPASVYEEQTPDFNSKLLELELPILGLCYGHQLTALHFGGSIENTGSGEFGKAHLQQTQPSTLWKGIDFPTQVWMSHQDSVTDLPLDFEIIAQTNGCPSAALQHRQKPIYTLQFHPEVKDTLCGSEILANFAEICGVPKNWSMQNFISLAKEQIRKEVASRKVLMFLSGGVDSSVAFALLNEALGTDRVLGLYMDNGFMRQGESEQIMQRYRDLGYTNIVARDFSKEFLEALAGLTDPQQKRHQVGAVFIRMRERFLRELQLNPEEWMLGQGTLYPDIIESGGSEHANVIKSHHNRVDEVMELLEAGQLVEPLKDLYKDEVRELGSLLGLPDSIVWRHPFPGPGLCVNVLCSEGRNDLGTDNRLEKRVLEALPENSCSASVLPVRSVGVQGDQRTYTPPAVLWKTPEDWNWLEEQSIRITNSVREINRVVFLLSPAALTPLKIREAYCTQERLDLLRQADAIATNILMEHDLMQDIFQLLVILLPISEDGQGDSIVLRPVCSEDVMTAQFAQLGWDLLNSLKQSLSNLPGIDA

SEQ ID NO: 197824 - protein, 509 aa, Unknown
  Bacterial polypetide isolated from the Sargasso Sea
MPNKVLILDFGSQYTQLIARRVRELNIFCEIYPYNSSKFILNDYSAVILSGSPYSVRSKDALKINLDKIKGAIPLLGICYGAQYLAHNYGGLVDLSNSREYGRANLVSISSESNLLDGINQGSQVWMSHADTIVKLPKNSVKIGSTSDVENAAFSFQNEQTYGIQFHPEVYHSTDGKLILENFLKKISKIEASWTPASFVDSAINSIREEINNDNVILGLSGGVDSSVAAVLLNKAIGDQLTCIFIDNGLLRKNEFFSVLEQYKGMGLNVIGIDAKKKFYHALSGIVDPEKKRKCIGKVFIDVFDEESKKIENAKWLAQGTIYPDVIESVSVKGPSATIKSHHNVGGLPDFMNLSVIEPLKMLFKDEVRKVGKELKVKDEILKRHPFPGPGLGIRILGEITPEKVNMLQEADNIYIESLKSKDLYDKIWQAGVILLPVKSVGVMGDERTYENCVVLRAVTSTDGMTADWVDLPYKFLQDVSNKIINNVKGINRVVYDISSKPPSTIEWE

SEQ ID NO: 197825 - protein, 117 aa, Unknown
  Bacterial polypetide isolated from the Sargasso Sea
MILSNNLNKILIIDFGSQFTQLIARRIREIGIFSEIISHKKAKDLNLFNEKIKGIILSGGPLNVYDGNKFKFDKKILNLKIPILGICFGHQIISKLLGGKVKKSKYREFGSAKVKKK

SEQ ID NO: 197826 - protein, 520 aa, Unknown
  Bacterial polypetide isolated from the Sargasso Sea
MSLDQNLNKILIIDFGSQFTQLIARRVRELGVFSEIVSHKKIKLKDINHSIKGIVLSGGPLNVYQINKYSFDKKILQLDVPVLGICFGHQILSKLNGGRVKQSKHREFGLANVYKKNNSLLTTNFFGNKKSKQVWMSHADQVSKLPKNFKVVASSTNSKFAIVENKIKKYYGVQFHPEVTHTENGKKLISNFIFLICKIKKNWSSRDQKNQLVKDVRKQVGNNKVICALSGGVDSSVVAQLLNKAIGKKLYCIFVNTGLLRKNEEVQVVQTFKKRLKMNLIYVNAEKEFLKKLKNVSDPEKKRKIIGNLFIKIFERYAKKIKNVKFLAQGTLYPDLIESKSVTGSQTSKIKSHHNVGGLPKKMNLKLVEPLKLLFKDEVRKLGLELNLSKEIISRHPFPGPGLAIRMPGIITNEKIKILKEADYYFIQALRDNGLYHKIWQAYAALLPVKTVGVMGDNRTYEYLCLLRAITSEDGMTADYYEFKKSFMQTISNKIVNSIRGINRVVYDVTSKPPSTIELE

SEQ ID NO: 197827 - protein, 377 aa, Unknown
  Bacterial polypetide isolated from the Sargasso Sea
VVPDDWEVVAYSSNNIVAALASNDHMRFATQFHPEVSHTEEGDILLNNFLFHISGCEKNWTAGNFINEQIESLKNKIGNERILVGVSGGVDSTVVASLINKAVGSKCFAVIIDHGLLRKNEAIDCVNALKQGLGMNIHLYDESEVFFSRLRGVKDPEQKRKIIGDQFIQSFDRIASEIGKFKFLGQGTLYPDIIESGVSKGKSAHVIKSHHNVGGLPDKMNFDLIEPLKDLFKDEVRKAGNELNITDELVKRHPFPGPGLGVRIIGEITKERVYILQEADEIFINVLKEEQEYDNIWQAFAVLIPVKTVGVMGDQRTYENLIALRAVTSLDGMTADWYRMPAEVLSKISNKIVNNVSGVNRVVYDITSKPPGTIEWE

SEQ ID NO: 197828 - protein, 131 aa, Unknown
  Bacterial polypetide isolated from the Sargasso Sea
KEMLERHPFPGPGLGVRIIGEITVEKTLILQEADNIFIEELIKADLYDKVSQAFAVLLPVKSVGVVGDERRYAEVIGLRAVETVDFMTARWAHLPYEFLEHVSNRIVNEIEQVSRVVYDISSKPPATIEWE

SEQ ID NO: 197829 - protein, 387 aa, Unknown
  Bacterial polypetide isolated from the Sargasso Sea
VWMSHGDKVETLPTEFKLTASTKSAPIAAMEHSSDSIFALQFHPEVTHTEGGKLILDNFIFDICSCKPEWKLDDLITSRVEEIIKVTNGEKVLLGLSGGVDSSVTAALLSRAIGDNLICVFVDNGLLRKNEAEEVIQTFKNEMDLNLIKVDAQKIFLRHLKGVEDPEQKRKIIGRTFIDVFDAEAAKLEDIDFLAQGTIYPDVIESSESESKEARVIKSHHNVGGLPEEMKLKLVEPLRDLFKDEVRRLGSQLNLPEIILNRHPFPGPGLGVRILGEVNERKIKILQEADSIFIEELRKANLYNSVSQAFAVFLPVKSVGVVGDERRYSEVIALRAVETVDFMTANWAFLPHEFLDEVSRRIVNEIQDVSRVVYDISGKPPATIEWE

SEQ ID NO: 197830 - protein, 520 aa, Unknown
  Bacterial polypetide isolated from the Sargasso Sea
MNLEKNLNKILIIDYGSQFTQLIARRIRELGVYSKIISHNKIKLSDIKNNKVGGLILSGGPLNVYQSSKIKFDKRILDLEIPILGICFGHQILSKNLGGKVKKSKFREFGLANLKKKNKSLLTRDFFNNNKCNVWMSHSDEVSKLPKGFSVIGSTKNSKFAMIENFKKKLFGIQFHPEVTHTKNGKKILKNFVFSICKLKRNWSSKFQKSKLIDQVKKQVKNSKVICALSGGVDSSVVAKLLKEAIGKNLVCIFVNTGLLRKNEEKQVINTFKKKFKINLIYVNAQKLFLSKLKNVSDPEKKRKIIGNLFIKIFEKKAKKIKKIKFLAQGTLYPDLIESKSVTGSQTSKIKSHHNVGGLPKKMKLQLVEPLKHLFKDEVRKLGIELKLGKEIVLRHPFPGPGLAIRMPGFITEKKIKILQEADYIYVEELKKHNLYNKIWQAYAALLPVKTVGVMGDNRTYEYICLLRAITSEDGMTADFYNFNKEFMQRVSNKIINNIRGINRVVYDVTSKPPSTIELE

SEQ ID NO: 197831 - protein, 463 aa, Unknown
  Bacterial polypetide isolated from the Sargasso Sea
MVSDQHNDSILILDFGSQVTQLIARRVRESGIYSEIFPFSKADEAIKKLKPKGIILSGGPASVNNQDAPTIDDKIFDLKIPILGICYGQQIMCSLLGGEVEKSNEREFGRANIKFLKSSPLFEGFDIKGNTEPVWMSHGDKVTSLPKGFEVIAESKNAPFAAVSDEVRSFYGVQFHPEVVHTPNGAKLLKNFTNKISECRSNWTMDSFKKVAIENIRTQVGKGKVICGLSGGVDSSVAAVLIHEAIGDQLTCIYVDTGLMRENETDEVVNLFRENFNIPLIDVDAGDTFLTRLTGVSDPEEKRKIIGSSFIDIFEEEAKKIGGADFLAQGTLYPDVIESVSFTGGPSVTIKSHHNVGGLPERMNMELVEPLRELFKDEVRELGKELGIPSHFIERHPFPGPGLAIRLPGEISSEKADILRKADTIYIEEIRKAGLYNEIWQAFAVLLPVQTVGVMGDERTYDF

SEQ ID NO: 197832 - protein, 166 aa, Unknown
  Bacterial polypetide isolated from the Sargasso Sea
MSLDKNLERIQIIDFGSQFTQLIARRIRELGAYSEIVSHKKSKSIKNISKIKGIILSGGPMSVYGIKQPSYNKKILNMNIPVLGICFGHQIISKQLGGSVKKSKSREYGLAKVKKLNKSLLTEGFFNKNKTSDVWMSHSDEVTKIPKNFKVIGSSNSSKNCLIENQ

SEQ ID NO: 197833 - protein, 361 aa, Unknown
  Bacterial polypetide isolated from the Sargasso Sea
MKKPILAICYGMQLVTKNLKGKVKRSTHREYGHTIINIKKKSLIFKGINKSKFKVWMSHGDNINKTPKSFSVTSLSDNLITSSIENIKNKIYCLQFHPEVYHTDFGLKIINNFVFKIVKIKIKFKIKKFIENKILELKNEIKNKKIICGLSGGVDSTVTAYLLNKSVNKNLFCIFVDHGLLRKNEAKEVSIIFKKKFGNNFIKIDASKIFIKNLKNVSDPEEKRKIIGKTFIEIFEKTAKKISNVHYLAQGTLYPDIIESIPFFGGPTAKIKSHHNVGGLPKKMKLKIIEPLRELFKDEVRNVGKNLKINKNLLLRHPFPGPGLAIRIPGEIDRKKIKILQEADHIFIKYLKEKKIYNQIG

SEQ ID NO: 197834 - protein, 514 aa, Unknown
  Bacterial polypetide isolated from the Sargasso Sea
MSLDQNLNKILIVDFGSQFTQLIARRVRELGIFSEIVSHKKIKSKNINHTIKGIILSGGPLNVYQINKYSFDKKIIQKGVPVLGICFGHQIISKLNGGKVKQSKHREFGLANITKKNNSLLIKNLFKKKKSIKVWMSHADQVSKLPKNFKVIASSQNSKFAVVENKFKNYYGVQFHPEVTHTENGKKLISNFIFLICKMRKNWSSKDQKIKLIKDARQMVGNNKVICALSGGVDSSVVAQLLNKAIGKNLHCIFVNTGLLRKNEEKQVVATFKKKLKINLTYVNAEKEFLRKLSNISDPEKKRKIIGNLFIKIFERYAKKIKNVKFLAQGTLYPDLIESKSVTGSQTSKIKSHHNVGGLPKKMKLKLVEPLKFLFKDEVRKLGLELNLSREIISRHPFPGPGLAIRMPGIITKEKINILKEADHYFIQALRDHNLYHKIWQAYAALLPVKTVGVMGDNRTYEYLCLLRAITSEDGMTADFYEFKKSFIQEISNKIVNSIRGINRVVYDILQNHR

SEQ ID NO: 197835 - protein, 308 aa, Unknown
  Bacterial polypetide isolated from the Sargasso Sea
MNKEKFLEKIIIIDYGSQFTQLIARKVRECGVYSEIINFNKIKNLINEKKIKGIILSGGPLTITKRKSENLNNDILNLNLPILGICYGHQILAKKFNGKIKKSKTREFGHAIVKSYSKSSITKNFFNKNKSLVWMSHQDIVYKLPHGFKKVAFTNNSKYAIITNEKKKYYGVQFHPEVSHTQNGKIIIKNFLFNICKIKKTWNLKKQKEILISDIREKVKNNKVICALSGGVDSSVVALLLKKAIGKKLTCIFINTGLLRKNEEYEVLNNFKKKLKLKLIYIDASKTFLSSLKNVDNPETKRKIIGKL

SEQ ID NO: 197836 - protein, 213 aa, Unknown
  Bacterial polypetide isolated from the Sargasso Sea
MQKILVVDFGSQYTQLIARRLRELNVYSEVYPWDEIPNLESVDGFVLSGGPESSNIEGNPNISNEILESNKPILGICYGMQVLAFQEGGEIQNEGKKEFGYAKIDLNNQTSLFADTSDSIDVWMSHGDKVISLPEGYETLASSDNSPIAAYQNLEKNYFGLQFHPEVTHTDFGLKIIENFINVCGVERNWNADDILKNIHNQAKTEVGEGKVL

SEQ ID NO: 197837 - protein, 118 aa, Unknown
  Bacterial polypetide isolated from the Sargasso Sea
MSLKKIIIIDFGSQFTQLIARRVRELGVYSEIISHKKKINFSNKDVIGIILSGGPLNVYQTKKVSFDKKILNQDIPVLGICFGHQIISKELGGKVKQSKFREFGLVNIKKNKESVLTR

SEQ ID NO: 197838 - protein, 193 aa, Unknown
  Bacterial polypetide isolated from the Sargasso Sea
AQGTLYPDLIESKSVTGSQTSKIKSHHNVGGLPKKMKLKLIEPLRLLFKDEVRKLGLELKLSEEIVLRHPFPGPGLAIRMPGKITENKIKILKHADDIFIKSLVEHNLYNKIWQAYAALLPVKTVGVMGDNRTYEYICLLRAITSEDGMTADFFSFSKEFMQLVSNKIINNIKGINRVVYDITSKPPSTIELE

SEQ ID NO: 197839 - protein, 385 aa, Unknown
  Bacterial polypetide isolated from the Sargasso Sea
MSHGDKVMEVPASFSTTAKTPTCPHAAMSNEEKRFYGVQFHPEVTHTHQGQRLLERFAIDICGCEKLWTPAKIIDDAIERIKETVGDDEVILGLSGGVDSSVVAMLIHRAIGDRLTCVFVDNGLLRLNEGQQVMDMFGNKFGLNIVKVDAEDQFLADLAGKSDPEDKRKAIGHTFINVFDEQAKKLKNAKWLGQGTIYPDVIESAASATGKAHVIKSHHNVGGLPDDMKMGLVEPLRELFKDEVRKIGLELGLPYDMLYRHPFPGPGLGVRVLGEIKKEYCDLLRRADAIFIEELHKAELYHKVSQAFTVFLPVKSVGVMGDARKYDWVVSLRCVETIDFMTARWSHLPYEFLGVVSNRIINEIDGISRVVYDISGKPPATIEWE

SEQ ID NO: 197840 - protein, 337 aa, Unknown
  Bacterial polypetide isolated from the Sargasso Sea
FGSQFTQLIARRIRELGVYSEILNHKKIKYFKQFDSNVKGIILSGGPLNVYETSKIKFNSKILKLKIPVLGVCFGHQIISKTFGGVVKKSKKREFGLTLIKKIKKSKLTNNFFNNRGTSKVWMSHSDQVFKLPKKFKAIAYSENSKFCIIENKVDNFFGIQFHPEVTHTTRGNIIFKNFVYSICKIKKNWSSKKQKERLIKEIRQKIGRSKVLCALSGGVDSSVVSKLLYNAVGKNLVCIFVNTGLLRKNEETEVINTFKKKHNMNLIYVNAKNLFINKLKNVSDPETKRKIIGNLFVKVFEKYAKKIKKVEFLAQGTLYPDLIESKSVTGSQTSKI

SEQ ID NO: 197841 - protein, 131 aa, Unknown
  Bacterial polypetide isolated from the Sargasso Sea
MAKNILADKILIIDFGSQYTQLIARRVRELGVYCEIYNHRASLKSIKDFNAKGIILSGGPETVKQKGSPKIPEKVFDLGTPLLGICYGMQSIAKQLKGKVELAEKREFGHADLLLKNKASGLFKGINANKI

SEQ ID NO: 197842 - protein, 509 aa, Unknown
  Bacterial polypetide isolated from the Sargasso Sea
MENKVLIVDFGSQYTQLIARRIRELFIFCEIYPYNNLPKNLLDYKAVVFSGSPYSVYQEDSPNIDLEKFIGKIPVLAICYGAQFIANNKKGKVENSNSREYGRARLTYIDNESILFNGISKDNQVWMSHGDTIVELPEDAKLIASTESVENAAYSLNEEKVFGLQFHPEVFHTDNGLKIFENFFLHILKFNQNWTPKLFVQDSVKEIKTIVGNAKVILGISGGVDSTVAAVLLNKAIGDNLNCVFVNNGLLRKDEFAEVLTQYENMGLNVVGVDASNEFITGLRGITDPEQKRKVIGSTFIDVFERQSKKIQDAKWLAQGTIYPDVIESISVKGPSSTIKSHHNVGGIPDKMNLKIIEPLKMLFKDEVRRIGESLEIDSNILNRHPFPGPGLGIRILGEVDEESIRLVQEADKIYIDSLKKWDLYDKIWQAGSILLPVRSVGVMGDERTYERCVSLRAVVSTDGMTADWYEFPNDFLKEVSNKIINKVSGINRVVYDISSKPPATIEWE

SEQ ID NO: 197843 - protein, 180 aa, Unknown
  Bacterial polypetide isolated from the Sargasso Sea
AQKMAQPMLLNLIITFCGLPSYLNLPVIEPLKDLFKDEVRKIGLELGLPKEILFRHPFPGPGLGVRILGEIKRPYIKTLQLADDIFISELIKEGYYDKVSQAFAVFLPVKSVGVVGDSRRYEYVISLRAVETIDFMTAKSAKLPHSFLEKVSNRIINEIPEVSRVTYDISSKPPATIEWE

SEQ ID NO: 197844 - protein, 171 aa, Unknown
  Bacterial polypetide isolated from the Sargasso Sea
MQTQMLVDEAIGELKSRIDDTAIIACSGGIDSTVAAVLAHKAVGSLLHCVYVDTGLMRKGETSEVSEMFSEMGIKLQVVDASARFFESLSGVTDPEEKRKIIGEQFIRVFEEEKGTCAAKYLVQGTIAPDWIESGGGDRDVIKSHHNVGGLPEDVDMTIVEPLREFYKDEV

SEQ ID NO: 197845 - protein, 516 aa, Unknown
  Bacterial polypetide isolated from the Sargasso Sea
MIRECDTILIIDFGSQYTQLIARRIRENNIFSLVKPHTLTLKEFNEIKPKGVILSGGPDSVTNLKKIKMLIDIRKLSIPILGICYGMQYIADIYGGKVSKSKKREFGHSIFMAKKISKIFPKKIINKNINVWMSHSDKVTKIPKGFVITGKSTNSSISSFSLEEKNIYALQFHPEVTNTQFGINIIKTFIINVCKCRKSWTTKNIIQEKVSEIKKIVKNEKVLLALSGGVDSTVVAALLKKSIKSNLICMFIDTGLLRKNEREEVKENIQKKLKLNLKVINAKSIFMKKLQGVTNPESKRKIIGETFIRIFEKESKKFKNVKYLAQGTIYPDVIESSSASKNSDVIKSHHNVGGLPKKFNFLLVEPIRNLFKDEVRSIGKELSIPGKLLNRHPFPGPGLAVRIIGDISKDKISILQDVDNIFIEELISSGFYDKISQALAVFLPIKSVGVMGDQRQYNYVVALRSVKTSDFMTASVSTLPFELLNKISTRIINEVPKVSRVVYDITSKPPGTIEWE

SEQ ID NO: 197846 - protein, 437 aa, Unknown
  Bacterial polypetide isolated from the Sargasso Sea
MGSQFTQLIARRVRELGVFSEIVSHKKIKLKDINNNIKGIVLSGGPLNVYQINKYSFDKKILQLDVPVLGICFGHQILSKLNGGKVKQSKHREFGLANVYKKNNSLLTTNFFGNKKSKQVWMSHADQVSKLPKNFKIVASSTNSKFAIVENKIKKYYGVQFHPEVTHTENGKKLISNFIFLICKIKRNWSSKDQKNQLIKDVRKQLGNNKVICALSGGVDSSVVAQLLNKAIGKKLYCIFVNTGLLRKNEEVQVVQTFKKRLKMNLIYVNAEKEFLKKLKNVSDPEKKRKIIGNLFIKIFERYAKKIKNVKFLAQGTLYPDLIESKSVTGSQTSKIKSHHNVGGLPKKMNLKLVEPLKFLFKDEVRKLGLELNLSKEIISRHPFPGPGLAIRMPGIITNEKIKILKEADYYFIQALKDHGLYHKIWQAYAALLPVKT

SEQ ID NO: 197847 - protein, 359 aa, Unknown
  Bacterial polypetide isolated from the Sargasso Sea
MSKNIHFHRILILDFGSQYTQLIARRVREIGVYCELWAWDVTAEQIAEFAPTGIILSGGPESVTEAGSPRAPAYVFEAGVPVLGVCYGMQTMAEQLGGKVSSSEHREFGYAQVELIAENAMFTGIEDHLNEQGRGLLDVWMSHGDKVVQIPEGFVTTAQTPTCPHAAMADEARQFYGVQFHPEVTHTRQGLRMLEQFVVDICGCEKLWTPATIIDDAIANIKKQVGDDQVILGLSGGVDSSVVAMLLHRAIGKNLTCVFVDNGLLRLNEGAQVMDMFGDHFGLNIIHVKAENRFLDALKGEAEPEAKRKIIGRVFVEVFDEEAKKLSNAKWLAQGTIYPDVIECAASKTGKAHVIKSHH

SEQ ID NO: 197848 - protein, 520 aa, Unknown
  Bacterial polypetide isolated from the Sargasso Sea
MRLEDTLNKILIVDFGSQFTQLIARKIRELGVYCEIISHKKIEKFQNFEKNIKGIVLSGGPLNVYESKKVKFNSKLLKLGTPVLGICFGHQIISKTMGGSVRNSKHREFGLAEVKEIKKSKLTKNFFSKGKNNVWMSHADQVTKLPKNFKIIAQSNNSKMCIIENIEKKMFGIQFHPEVSHTIKGKLILKNFLFSICKLNKNWSAKDQKTKLINEVRNSVGNSKVICALSGGVDSSVVAKLLSNAIGKKLTCIFVNTGLLRKNEEKQVVNTFKKKFKINLIYVNAENLFLSKLKNISDPEKKRKIIGNLFIKIFEKYANKIKNVKFLAQGTLYPDLIESKSVTGSQTSKIKSHHNVGGLPKKMKLQLVEPLKYLFKDEVRKLGSELGLSNEIISRHPFPGPGLAIRMPGIITKEKINILKEADNYFINSLKENNLYNKIWQAYAALLPVKTVGVMGDNRTYEFLCLLRAITSEDGMTADFFQFNKSFMQTVSNQIVNNIRGINRVVYDITSKPPSTIELE

SEQ ID NO: 197849 - protein, 525 aa, Unknown
  Bacterial polypetide isolated from the Sargasso Sea
MSDIHEHKILILDFGSQYTQLIARRIREIGVYCELWAWDVTEAQIREFAPNGIILAGGPESVTADNSPRAPEYVFNAGVPVLGICYGMQTMSEQLGGKVIQGVGEGEFGYAQIEMLAQSALFKDIEDAVSSDGKSLLDVWMSHGDKVSAIPEGFVAVAKTDTCPFAAMSNESKRFYGVQFHPEVTHTRQGMRMLSHFALDICGCAANWKPSSIIEDAIERLKKQVGDDEVILGLSGGVDSSVVAMLLHRAIGKKLTCVFVDNGLLRLNEAKQVMEMFGDHFGLNIVHVDAENRFLDALKGEADPEAKRKIIGRVFVEIFDEEAKKCVNAKWLAQGTIYPDVIESAGSATGKAHVIKSHHNVGGLPDDMELGLVEPLRELFKDEVRKIGLELGLPYNMLYRHPFPGPGLGVRVLGEVKKEYCDLLRRADAIFIEELHKADLYNKVSQAFTVFLPVRSVGVMGDGRKYDWVVSLRAVETIDFMTAHWAHLPYDFLGRVSNRIINEIDGISRVVYDISGKPPATIEWE

SEQ ID NO: 197850 - protein, 362 aa, Unknown
  Bacterial polypetide isolated from the Sargasso Sea
PIAAMQHTTKPIYALQFHPEVTHTEDGKTILDNFIFKVCKANSDWRMDDLINQRIQEIKGKVENNKVLLGLSGGVDSSVTAALLNKAIGKKLICVFVDNGLLRKGEPDEVMNTFKENMNLNVIKSNSEELFLRHLEGIEDPEQKRKVIGRTFIDVFDAEANKLKEIKFLAQGTIYPDVIESSDSESKEARVIKSHHNVGGLPDEMNMELVEPLRDLFKDEVRKLGVELGLPSEMLNRHPFPGPGLGVRILGEVTKEKTTILKEADHIFIEELIKADLYKMVSQAFAVFLPIKSVGVVGDERRYAEVIGLRAVETVDFMTARWAHLPYDFLEHVSSRIVNEIEDVSRVVYDISSKPPATIEWE

SEQ ID NO: 197851 - protein, 517 aa, Unknown
  Bacterial polypetide isolated from the Sargasso Sea
MDKKLENILIIDYGSQYTQLIARRIRELEVFCSIYPYNKITNKLISELNPSAIILSGGPKSVLDKNSPKLASNILNLQKPILGICYGMQLLTKTLSGKVKRSTKREYGHTLINIKKKSLIFKGIKKNKIKVWMSHGDNIQKIPNSFSISSVSDNNIISSIENKKNKIYCLQFHPEVFHTDNGLKIIYNFLFNISKIKNKFKIKNFIDNKILELKNEIKDKNVICGVSGGVDSTVTAYLLNKAVKKNLFCIFVDHGLLRKNESNQVEKIFREKFGRKFIKINASNIFLKKLKNISDPEQKRKIIGKTFIKVFEKAAKKISNVHFLGQGTLYPDIVESVPFFGGPTAKIKSHHNVGGLPKRMKLKVIEPLRELFKDEVRTVGKKLNIDNHLLLRHPFPGPGLAIRIPGTINKTKIKILQEADFIFVNYLKEKKIYNNIWQAFVVLLPIKSVGVMGDKRTYNYCCSIRAVTSVDGMTADFYMFTKDQIQELTSKIINNVLGINRVLFDFTSKPPGTIEWE

SEQ ID NO: 197852 - protein, 509 aa, Unknown
  Bacterial polypetide isolated from the Sargasso Sea
MQNKVLIVDFGSQYTQLIARRIRELFIYCEISPFNNLPEDLNQYKAIVLSGSPFSVNQENAPEINLKSILGNKPVIAICYGAQLIAKTLNGKVENSNSREYGRANLSFIEKDCKLFNNIKINNQVWMSHGDTITALPDGATVIASTDSVKNAAYSIDSLNLYALQFHPEVFHTDNGLKIFENFFIEELKFIKEWNPESFIDRTVKELKSEVLDEKVILGLSGGVDSSVAAVLLDRAIGKNLHCIFVNNGLLRKNEYDEVLDQYIGMGLNVKGVDASDQFINGLKGVTDPERKRKIIGNTFIDVFDEESKKISNAKWLAQGTIYPDVIESISVKGPSATIKSHHNVGGLPQKMNLKVIEPLKMLFKDEVRKIGTSLKMPQEILSRHPFPGPGLGIRILGEVDYESIGLIQEADKIYIDALKKWSLYNKIWQAGSILLPVKSVGVMGDERTYERCVALRAVVSTDGMTADWYEFPNDFLKEVSNNIINKVKGINRVVYDISSKPPATIEWE

SEQ ID NO: 197853 - protein, 117 aa, Unknown
  Bacterial polypetide isolated from the Sargasso Sea
GVRILGEIKRPYIKTLQLADDIFISELIKEGYYDKVSQAFAVFLPVKSVGVVGDSRRYEYVISLRAVETIDFMTAKSAKLPHSFLEQVSNRIINEIPEVSRVTYDISSKPPATIEWE

SEQ ID NO: 197854 - protein, 333 aa, Unknown
  Bacterial polypetide isolated from the Sargasso Sea
MSVNKKHIDTILVLDFGSQYTQLIARRIRESDVYSEILPWDIDEKKILDLNPKGIVLSGGPNSVTDSYTPRVPQCIFELNVPILGICYGMQTLAEQMGGQVASVDKKEFGHTNLDIESNSVLFKNINKTTSVWMSHGDQVQDLPDEFELIASTKTAPIAAMQHKNLPIYAIQFHPEVTHTQDGHVLLDNFLFEICHARSDWKMDDLISSRIKEIKEQVQDNKVLLGLSGGVDSSVTATLLHKAIGKKLVCVFVDNGLLRKGEAEQVMQTFKKNMQLNVVKSDSQDTFLRHLKEIEDPEQKRKIIGRTFIDVFDAEAMKLKDIRFLAQGTIYPD

SEQ ID NO: 197855 - protein, 180 aa, Unknown
  Bacterial polypetide isolated from the Sargasso Sea
MSNLNKGGVAIIDFGSQYTQLIARRVREQFVFSEIYLPETPFEEIIKSEPNAIILSGGPSSVYKENAPKIDKLLLESNLPTLGICYGLHLLSHHYGGSVVSKREGEFGFAKIDIQNSSGIFSDISNPSKVWMSHGDQVVKIPDGWQVLANSTNGIVAAIGNKNQNLVATQFHPEVYHTVE

SEQ ID NO: 197856 - protein, 58 aa, Unknown
  Bacterial polypetide isolated from the Sargasso Sea
MVLDFGSQYTQLIARRIRESNVYSEILPWDIDESKIAELHPKGIILSGGPNSVTETYT

SEQ ID NO: 197857 - protein, 521 aa, Unknown
  Bacterial polypetide isolated from the Sargasso Sea
MSLEDNLNKILIIDFGSQFTQLIARRIRELGVYSQIISHKKINNHILKTKNIIGIILSGGPLNVYEVKKVKFNKKILNSKVPILGICFGHQIIAKEFGGSVNKSKVREFGLANIKRIKKSILTRNFFNRNGLNNVWMSHSDEVTKIPKGFKVIASSKNSKFAAIENKSKNFYGIQFHPEVTHTHNGKKLIKNFIFSICKARRNWSSKIQKKILINNVKNSVGTSKVICALSGGVDSSVVAKLLKNAIGKNLICIFVNTGLLRKNEEKEIVNTFKKRFKFNLIYVDAKNLFLNKLKNVSDPERKRKIIGKQFIKVFEKYSKKVKNAKFLAQGTLYPDLIESKSATGSQSSKIKSHHNVGGLPKKMKLKLVEPLKYLFKDEVRKLGLELNLPKKVIFRHPFPGPGLAIRMPGIITKDKIKILKDADEIFIKSLITNDLYDKIWQAYAALLPVKTVGVMGDNRTYEYICLLRAITSEDGMTADFFTFKKDFIQSVSNKIINSIKGINRVVYDVTSKPPSTIELE

SEQ ID NO: 197858 - protein, 427 aa, Unknown
  Bacterial polypetide isolated from the Sargasso Sea
FIGKIPLLGICYAAQYLAHKNGGEVSPSSKREYGRARLISINKNSKLLKGIDNGSQVWMSHADTITKLPAKSKKIGSTEDVENACFEFDDQLTYGIQFHPEVYHSSDGKTLLKNFIIDISKVNPNWTPLSFVEKTVLDIKSKIKNDRVILGLSGGVDSSVAAVLLNKSIGNNLTCLFIDNGLLRKNEFDEVLENYKGMGLNVVGIDAKEKFYSALSGVTDPEKKRKVIGKVFVDVFESESKKITNVKWLAQGTIYPDVIESISVKGPSATIKSHHNVGGLPKKMSLSIIEPLKMLFKDEVRKVGVELAIKNEILSRHPFPGPGLGIRILGEINAENVGILQEADHILIESLKQKNLYNQIWQAGVILLPVKSVGVMGDERTYENCVALRAVISTDGMTADWFDFPHSFLQDVSNKIINNVKGINRVV

SEQ ID NO: 197859 - protein, 519 aa, Unknown
  Bacterial polypetide isolated from the Sargasso Sea
MAKNILADKILIIDFGSQYTQLIARRVRELGVYCEIYHHQSSIKSIKDFDPKGVILSGGPETVKQKGSPKVPVQLFDLGIPVLGICYGMQSIAKQLGGKVELADKREFGHADLKIKNQASGLFKKIKAKKINVWMSHGDHVSKLPKGFKSCGTTSNSPIAALYHPTKKIFGLQFHPEVTHTPQGKQILKNFVRDISNCKGLWNSKNIITKAVEEIKREVGDQEVLLGLSGGVDSAVVAALLSEAIDDQLTCIFVDNGLLRLNEGDQVMNTFKDRFGIKVKRANAGNQFLKDLKGKKDPEHKRKAIGKTFIDVFLKEAKKNKRIKWLAQGTIYPDVIESAGTKNGTAHVIKSHHNVGGLPSYLNLPVIEPLKDLFKDEVRKIGLELGLPKEILFRHPFPGPGLGVRILGEIKRPYIKTLQLADDIFISELIKEGYYDKVSQAFAVFLPVKSVGVVGDSRRYEYVISLRAVETIDFMTAKSAKLPHSFLEKVSNRIINEIPEVSRVTYDISSKPPATIEWE

SEQ ID NO: 197860 - protein, 246 aa, Unknown
  Bacterial polypetide isolated from the Sargasso Sea
GLGVNIYSYDESKVFLSKLKGISDPEEKRKIIGNQFIYSFERIASEIGKMDYLAQGTLYPDVIESGISKGKSAHVIKSHHNVGGLPDDMALQLIEPLRDLFKDEVRKVGKELGLPDLLIDRHPFPGPGLGVRIIGEVTIEKIKILQEADKIYIDILHEDGLYNEIWQAFSVLIPVKTVGVMGDQRTYENLLGLRAVTSTDGMTADWFRMPKETLSKISNRIVNSVRGINRVVYDITSKPPGTIEWE

SEQ ID NO: 197861 - protein, 507 aa, Unknown
  Bacterial polypetide isolated from the Sargasso Sea
MNDIYKNGVVILDFGSQYTQLIARRVRENNVFSEILSPNAKLKEIEERQPAAIILSGGPSSVYEENAPDFDHEILNSDLPILGICYGLHILAQHGGGHVVSDGKGEYGFADIDIQIDTGIFSAVSSSSVWMSHGDLVEKIPDGWHVLAYSSNGVIAAMANEDQTRVATQFHPEVHHTKEGQKILSNFLFNIAKCSKNWTPGNFIQEQIEEIQRIAGQGNVLIGVSGGVDSTVVAALVHKAIGNRCNAVIIDHGLMRKNEVRECLEALRNGLGVNIYSYDESKVFLSKLKGISDPEEKRKIIGNQFIYSFERIASEIGKMDYLAQGTLYPDVIESGISKGKSAHVIKSHHNVGGLPDDMALQLIEPLRDLFKDEVRKVGKELGLPDLLIDRHPFPGPGLGVRIIGEVTIEKIKILQEADKIYIDILHEDGLYNEIWQAFSVLIPVKTVGVMGDQRTYENLLGIRAVTSTDGMTADWFRMPKETLSKISNRIVNSVRGINRVVYDITSK

SEQ ID NO: 197862 - protein, 401 aa, Unknown
  Bacterial polypetide isolated from the Sargasso Sea
YIKKSKILKNIKLDSTVWMSHGDSITNISSNLEIISSTNDVNVAAYEVKNHKIYGLQFHPEVTHTTNGSKILKNFISDICGCKGSWTPKKFIDSSIIEIKNKLKNDRVLLGLSGGVDSSVVAFLINRAVGNNLVCVFVDNGLLRKNEFENVLKSYQNLGLNVIGVNAKKKFYASLKGKVDPEDKRKAIGKTFIDVFEEESKKIKNVKWLAQGTIYPDIIESVSVKGPSVTIKSHHNVGGLPKKMNLKIIEPLNTLFKDEVRKIGLSLKIPKNILYRHPFPGPGLAIRILGEVIEKRINILQEADHIFISSLIKENLYHNIWQAGAIFLPIKSVGVMGDERTYENVIVLRAVNSLDGMTADWSKLSSDFLSKISNEIINKVKGVNRVVLDISSKPPATIEWE

SEQ ID NO: 197863 - protein, 304 aa, Unknown
  Bacterial polypetide isolated from the Sargasso Sea
KNNVGNSKVICALSGGVDSSVVAKLISNAIGKNLTCIFVNTGLLRKNEEKQVVNTFRKKFKFNLIYINAEQLFISKLKNVTDPEKKRKIIGNLFIKLFEKYAKKIKNVKFLAQGTLYPDLIESKSVTGSQTSKIKSHHNVGGLPKRMKLKLVEPLKYLFKDEVRMLGLELNLSKEIISRHPFPGPGLAIRMPGIITKEKIKILKEADNYFVNALRENNLYHKIWQAYAALLPVKTVGVMGDNRTYEYLCLLRAITSEDGMTADYFQFNKSFMQMVSNKIVNNIRGINRVVYDVTSKPPSTIELE

SEQ ID NO: 197864 - protein, 200 aa, Unknown
  Bacterial polypetide isolated from the Sargasso Sea
MDKTDSALSKILIIDFGSQFTQLIARKIRELGVYSEILSHNNSNNINLENVKGIILSGGPLNVYQDKKIKFDNTILKKNIPILGICFGHQIISKEFGGKVKQSKFREFGLAEVTKIKKSLLLKNFFDKKNKSKVWMSHSDQVTKLPRGFKTVAYSRNSKLAIIENSSKKIYGVQFHPEVTHTTKGKHILKNFLFVICKIN

SEQ ID NO: 197865 - protein, 520 aa, Unknown
  Bacterial polypetide isolated from the Sargasso Sea
MRLENNLNKILIVDFGSQFTQLIARKIRELGIYCEIVSHKKIEKFKNFENNIKGIVLSGGPLNVYESKKVKFNNKILKVGIPVLGICFGHQIISKAMGGSVRSSKHREFGLAEVKEIKTSKLTKNFFSKGKNNVWMSHADQVTKLPKNFKIIAQSINSKMCIIENVKKKMFGIQFHPEVSHTIKGKVILKNFIFSICKLTKNWSSRDQKKKLINEVRNSVGNSKVICALSGGVDSSVVAKLLSNAIGKKLTCIFVNTGLLRKNEEKQVVNTFKKRFKINLIYVNAEKLFLSKLKNVSDPEKKRKIIGNLFIKIFEKYSNKIKNVKFLAQGTLYPDLIESKSVTGSQTSKIKSHHNVGGLPEKMKLKLVEPLKYLFKDEVRKLGLELGLSNEIISRHPFPGPGLAIRMPGIITKEKIKILKEADNYFIKSLKDNNLYDKIWQAYAALLPVKTVGVMGDNRTYEYLCLLRAITSEDGMTADFFQFNKSFMQSISNQIVNNIRGINRVVYDITSKPPSTIELE

SEQ ID NO: 197866 - protein, 239 aa, Unknown
  Bacterial polypetide isolated from the Sargasso Sea
MAKNILADKILIIDFGSQYTQLIARRVRELGVYCEIYNHRASLKSIKDFNAKGIILSGGPETVKQKGSPKIPDKVFDLGIPLLGICYGMQSIAKQLKGKVELGDKREFGHADLLLKNKGSGLFKGINNNKISVWMSHGDHVSKLPRDFKVCATTSNSPIAAFHHPTKKIFGLQFHPEVTHTPQGKKILKNFVRDISGCKGLWNSKNIIDRAVSEIREQVGNSRSIIRFIRRCGFCCCCS

SEQ ID NO: 197867 - protein, 182 aa, Unknown
  Bacterial polypetide isolated from the Sargasso Sea
MAQDILADKILIIDFGSQYTQLIARRVREFGVYCEIYSHRASFKAIKDFNANGIILSGGPETVKQKGSPKVHDKVFELGIPLLGICYGMQSIAKQLKGKVELANKREFGHADLSLKSQGSGLFKGINKKKMSVWMSHGDHVSKLPKNFKVCATTNNSPIAAFHHPTKKIFGLQFHPEVTHTP

SEQ ID NO: 197868 - protein, 308 aa, Unknown
  Bacterial polypetide isolated from the Sargasso Sea
IKDVRKQVGNSKVICALSGGVDSGVVAQLLNKAIRKKLYCIFVNTGLLRKNEEIQVVQTFKKRLKMNLIYVNAEKEFLKKLKNVSDPEKKRKIIGNLFIKIFERYAKKIKDVKFLAQGTLYPDLIESKSVTGSQTSKIKSHHNVGGLPKKMNLKLVEPLKFLFKDEVRKLGLELNLSKEIISRHPFPGPGLAIRMPGIITTEKIKILKDADYYFIQALKDHGHYHKIWQAYAALLPVKTVGVMGDNRTYEYLCLLRAITSEDGMTADYYEFKKSFMQTISNKIVNSIRGINRVVYDVTSKPPSTIELE

SEQ ID NO: 197869 - protein, 112 aa, Unknown
  Bacterial polypetide isolated from the Sargasso Sea
MTTQEHDRVLILDFGSQFTQLIARRIREESVYSEIHPPTRSLDWIREWNPAAVILSGGPNSVYDDGVPKVDPELLALGFPILGICYGMQLIAQIEGAEVSHGHREYGRAELT

SEQ ID NO: 197870 - protein, 380 aa, Unknown
  Bacterial polypetide isolated from the Sargasso Sea
MDFGSQYTQLIARRVRECGVYCEIQPFDVEKSYFDERQPRGVILSGGPETVTSGDTPRIPERLLELEIPILGICYGMQALAAQLGGGVKSSAHREFGHAEIDLHGGSELLGTLDPDSHGKAQVWMSHGDKVTDLPEGFSVTASTESAPVAAMENPSKRIYAVQFHPEVTHTPNGDHLIDRFAKDICRCDGDWTIENIAEEAIRRTKEQVGDDEVVLGLSGGVDSSVVAAILSRAIGDQLTCIFVDNGLLRKNETEEVEKAFGLEAGTGNVLPINIKTIDARSEFLTKLVGVVDPEDKRKIIGNTFIDVFEREADKLRNVKWLAQGTIYPDVIESAASKYGKAHVIKSHHNVGGLPERMSLQLVEPLRELFKDEVRNLGIY

SEQ ID NO: 197871 - protein, 478 aa, Unknown
  Bacterial polypetide isolated from the Sargasso Sea
GVEAIESFQPSGLILSGGPESAFTDDAIKPSQEIYSLGLPILGICYGMQVMSEQLGGKVSPSSHREFGHADIKIESNSRLLEGIENSAEQTVWMSHGDRVESLPEGFRTICTSQNSPSAAMASEEKSFYGLQFHPEVTHTICGQRIIENFLYHICGCASDWNPGNIIAKHIKKVQEAVGNDQILLGLSGGVDSSVVAALLHKAIGDQLVCIFVDNGLLRLNEGDQVMETFSEHMNLNVIRVDAEEAFLKRLKGVNDPEEKRKIIGRTFIEVFEDEASKLENVKWLAQGTIYPDVIESAGSKTGKAHVIKSHHNVGGLPEDMKLKLIEPLRDLFKDEVRKIGKELGLTSKLVDRHPFPGPGLGVRILGAVKKEYADLLRLADDIFIEELHKENLYDKVSQAFAVFLPVKSVGVMGDGRKYEYVIALRAVETTDFMTANSAKLPYEFLDHVSTRIINEVPGISRVTLDISSKPPSTIEWE

SEQ ID NO: 197872 - protein, 200 aa, Unknown
  Bacterial polypetide isolated from the Sargasso Sea
QKGPFKWLAQGTLYPDVIESGVSKGPAAVIKSHHNVGGLPEWLNLKILEPLRELYKDEVRDVARILGVPEKLLKRHPFPGPGLSVRIMGEITPSKLVICRKASKIVEDELWDAGVYDKVWQAYAAVGDDKAVGVVGDERKYGRIVTVRVVDSIDAMTADWTRLPNGVLEKISNRITNEIEEVTWVSYVISSKPPATIEPQ

SEQ ID NO: 197873 - protein, 171 aa, Unknown
  Bacterial polypetide isolated from the Sargasso Sea
MEPSNLQKIIIVDFGSQFTQLVARKIRELGSYSEIINFKNIFKLKNDSSVKGIILSGGPLSITDNKGISLDSFLIKKKIPILGICYGHQILAKKFGGKIKVSKHREFGKAILKVKSNSILTKNFFKSKKSLVWMSHQDTVQKLPKGFKTIASSQNSKFAVIANEKLKYYGV

SEQ ID NO: 197874 - protein, 507 aa, Unknown
  Bacterial polypetide isolated from the Sargasso Sea
MEKIVVLDFGSQYSHLICRRIREFSVYAELVPYDISPEELQKMNPKGIIFSGGPSSVYNEDAPKPDEELFNFDLPLLGICYGHQLIVNKFGGKVKRANKEYGSSLLSMDKNSGLLDGIGESIRAWMSHGDEAEEIPSNFEVIGHTENSHAAAIANTDRTVFGIQFHPEVVHTERGTDILKNFVLNVCKAKQEWTMEGFVEKTVKEISEIEGNVLCGVSGGIDSTVAALLIHKAIGDRQTGVFVDNGLLRLDESKEIEDMFKNNFSLNFHRVDASEQFLSKLKGITDPEQKRKIVGEEFIQVFTEFAKQKGPFKWLAQGTLYPDVIESGVSKGPAAVIKSHHNVGGLPEWLNLKILEPLRELYKDEVRDVARILGVPEKLLKRHPFPGPGLSVRIMGEITPSKLAICRKASKIVEEELWDAGVYDKVWQAYAAVGDDKAVGVVGDERKYGRIVTVRVVDSIDAMTADWTRLPNGVLEKISNRITNEIDEVTWVSYVISSKPPATIEPQ

SEQ ID NO: 197875 - protein, 339 aa, Unknown
  Bacterial polypetide isolated from the Sargasso Sea
MPLEDNLQKIIIIDFGSQFTQLIARKIRELGIYCEIISHNKINKKYKLEKNVKGLVLSGGPLNVYQSKKVKLNKNILLSKIPVLGICFGHQIISKEMGGKVKQSRAREFGLATVEKVKNSILTKNFFVNNKNNVWMSHADEVTKLPKNFKVIAKTNNSKLCIIESTKDKLYGIQFHPEVTHTNKGKIILKNFVFDICKIKKNWSPKYQKTNLIKEVKKKVGNSRVICALSGGVDSSVVAKLLANAIGKNLTCIFVNTGLLRKDEEKQVVNTFKKKFKINLIYVNAENQFLSKLKNVSDPEKKRKIIGSLFIKIFEKYAKKIKNVKFLAQGTLYPDLMKV

SEQ ID NO: 197876 - protein, 327 aa, Unknown
  Bacterial polypetide isolated from the Sargasso Sea
YSICKAKKSWKMNYEKDRIIKGIKEKVKKQKVICALSGGVDSSVVAILVHKAIKKNLRCIMVDTGLLRKNEFRYTYKVLKNKYKLNIKLVKASNLYFKKLNNVYDPEKKRKIIGNLFIKIFEKEAKKFKKVKFLAQGTLYPDIIESRSATGSKTSKIKSHHNVGGLPKNMRLNLIEPLKELFKDEVRKLGKSLGLIDPILNKHPFPGPGLAIRILGKISPMKVKILQEADNIFINELIKKNLYNKIWQAYAALLPIKTVGVMGDSRTYEYTCLLRAVTSKDGMTADYFNLPKDFLDEISNKIINGVRGINRVVYDITSKPPSTIELE

SEQ ID NO: 197877 - protein, 116 aa, Unknown
  Bacterial polypetide isolated from the Sargasso Sea
MSPDINLDKILIIDFGSQFTQLIARRIRELGVFSELVSHKKIKSNHINNNIKGIILSGGPLNVYQLNKKTFDKRIINLGIPILGICFGHQILSKFNGGKVKQSKHREFGLVKIFKK

SEQ ID NO: 197878 - protein, 285 aa, Unknown
  Bacterial polypetide isolated from the Sargasso Sea
MSKKLENILIIDYGSQYTQLIARRIRELEVFCSIYPYNKITNKLINELNPSAIILSGGPKSVLDKNSPKLTSNILNLQKPILGICYGMQLLTKTLSGKVKRSTKREYGYTLINIKKKSLIFKGIKKNKIKVWMSHGDNIKKIPNSFSISSISDNNIISSIESKKSKIYCLQFHPEVFHTDNGLKIIYNFLFNISKIKNKFKIKNFIDDKILELKNKIKDKNIICGISGGVDSTVTAYLLSKAVNKNLFCIFVDHGLLRKNESNQVEKIFREKFGRKFIKINASNI

SEQ ID NO: 197879 - protein, 507 aa, Unknown
  Bacterial polypetide isolated from the Sargasso Sea
MVLDFGSQYTQLIARRVRESNVYSEIFPWDINEKRILDLNPKGVILSGGPNSVTDSFTPRIPQCIFELNVPILGICYGMQTLAEQMGGQVVSADKKEFGHTNLEIENESILFKGIDKKINVWMSHGDQVQDLPDEFELIASTNTAPVAAMEHKNLPIYAIQFHPEVTHTNDGHVLLDNFLFEICSAKRDWKINDLISSRIEEIKEQVKSDKVLLGLSGGVDSSVTAALLHKAIGKKLICVFVDNGLLRKGEPEQVMQTFKENMQLNVIKSDSQETFLRHLKDIEDPEQKRKIIGRTFIDVFDAEAMKLKDIKFLAQGTIYPDVIESSGSESKEARVIKSHHNVGGLPDEMKLDLVEPLRDLFKDEVRKMGIELGIPKEMIERHPFPGPGLGVRILGEVTKEKTQILQNADHIFIEELIKADLYNSVSQAFAVLLPVKSVGVVGDERRYAEVIALRAVETVDFMTARWAQLPYEFLEHVSNRIVNEIEAVSRVVYDISSKPPATIEWE

SEQ ID NO: 197880 - protein, 184 aa, Unknown
  Bacterial polypetide isolated from the Sargasso Sea
IESAASKTGKAHVIKSHHNVGGLPEEMKMGLVEPLRELFKDEVRRVGLELGLPYDMLYRHPFPGPGLGVRVLGEVKKEYCDLLRKADAVFIEELRKADLYNQVSQAFAVFLPVRSVGVMGDGRKYDWVIALRAVETIDFMTAHWAHLPYDFLGHVSNRIINEINGISRVVYDVSGKPPATIEWE

SEQ ID NO: 197881 - protein, 208 aa, Unknown
  Bacterial polypetide isolated from the Sargasso Sea
MEPNKIEKIAIIDFGSQFTQLVARKIRELGVYSDIINSKNIRKIFNNKSIKGVILSGGPLSATKRKSLKLDKSIINLKVPILGICYGHQILAKKFGGKIKNSKFREFGKAIVMSKNKSILTKNFFNNGKNVVWMSHQDVVQKLPLDFKPIGSTSNSKFAIIANEKLNYYGVQFHPEVSHTSNGKILIKNFLFNICKITKKLEHQKPKK

SEQ ID NO: 197882 - protein, 521 aa, Unknown
  Bacterial polypetide isolated from the Sargasso Sea
MNKLSVNNKGIDTILVLDFGSQYTQLIARRVRESNVYSEILPWDINEQKIRKLNPKGVILSGGPNSVTESFTPRVPQVIFDLSVPVLGICYGMQTLAEQMGGHVVSVDQKEFGHSSLDVVSNSKIFEGINKKLNVWMSHGDQVQDLPDNFNLIASTSTAPIAVMEHESLPIYGIQFHPEVTHTEQGKKILDNFILNICHAKTEWNIDDVISQRIHDIKEKVKNDKVLLGLSGGVDSSVTATLLHKAIGKNLTCVFVDNGLLRKGEAEDVMQTFKENMSLNVIKSDSEEIFLRHLKNIEDPEQKRKIIGRTFIDVFDAEAIKLKDIKFLAQGTIYPDVIESSGSESKEARTIKSHHNVGGLPDEMKLDLVEPLRDLFKDEVRKMGKELGLPQEMLDRHPFPGPGLGVRIIGEITKEKTKILKEADHIFIQELIKADLYDQVSQAFAVLLPVKSVGVVGDERRYAEVIGLRAVETVDFMTAKWAHLPYDFLELVSNRIVNEIEDVSRVVYDISSKPPATIEWE

SEQ ID NO: 197883 - protein, 462 aa, Unknown
  Bacterial polypetide isolated from the Sargasso Sea
ILSGGPMSVYDEEAPTVPSWVFECGLPILGICYGMQAIVHQLGGKVEPGEAREYGLASLIIEDATETIFSQIPSQSSVWMSHGDKVVKLPPQFKSLAQTDNTEYCVISSGNQMYGIQFHPEVHHTSYGETFITNFLVQVCKFSQNWDSGRFIESSMVSLKEQLGASKVVCALSGGVDSAVTAALLHHAVGDQLKCIFVNNGLLRLDEENEVREIFRDVLNVDINYLDASKRFIDKLEGVVDPEIKRKTIGYEFIKCFEEETDKLGGVEFLAQGTLYPDVIESVSTVGKAAVIKTHHNVGGLPENMQLKLVEPLRYLFKDEVRKVGLELGLPPNIIHRQPFPGPGLAIRIIGEITQEKLDILKLCDRIVTDELAKSDCYEEIWQGFAVLTDSHTVGVMGDFRTYGYVCALRIVSSEDAMTANWVKVPYEVLETISSRIVNEVSGVNRVVYDITNKPPGTIEWE

SEQ ID NO: 197884 - protein, 220 aa, Unknown
  Bacterial polypetide isolated from the Sargasso Sea
MQDRILILDFGSQYTQLIARRVREAGVYSEIYVGDIGVEAIESFQPSGLILSGGPESAFTDDAIKPSQEIYSLGLPILGICYGMQVMSEQLGGKVSPSSHREFGHADIKIESNSRLLEGIENSAEQTVWMSHGDRVESLPEGFRTICTSQNSPSAAMASEDKSFYGLQFHPEVTHTICGQRIIENFLHHICGCASDWNPGNIIAKHIKKVQEAVGNDQIL

SEQ ID NO: 197885 - protein, 75 aa, Unknown
  Bacterial polypetide isolated from the Sargasso Sea
MSLDQNLDKVVIIDFGSQFTQLIARRIRELGIFSEIVSHKKIRTIDINHNVRGIILSGGPLNVYQINKYSFDKKI

SEQ ID NO: 197886 - protein, 384 aa, Unknown
  Bacterial polypetide isolated from the Sargasso Sea
MSLDQNLDKILIIDFGSQFTQLIARRIRELGVFSEIVSHKKIKIKDVNQSIKGIILSGGPLNVYQINKYSFDKKILEKNIPVLGICFGHQILSKINGGRVKQSKSREFGLANVYKKNNSLITSNFFINKKPKKVWMSHADQVSKLPKNFKVVASSTSSRFAIVENKSKKFFGVQFHPEVTHTQDGKKIISNFIFLICKIKKNWSSKDQKQQLINEIKTQVGSNKVICALSGGVDSSVVAQLLNKAIRKKLYCIFVNTGLLRKNEEIQVVQTFKKRLKMNLIYVNAEKQFLKKLKNVSDPEKKRKIIGNLFVKIFEKYALKIKNVKFLAQGTLYPDLIESKSVTGSQTSKIKSHHNVGGLPKKMNLKLLEPLKYLFKDEVRKLGL

SEQ ID NO: 197887 - protein, 385 aa, Unknown
  Bacterial polypetide isolated from the Sargasso Sea
MSHGDQVQDLPDEYELTALTSTAPIAAMQHKNLPIYAIQFHPEVTHTENGLLILKNFIFNICAACNDWKMDNLISSRIEDIKFKVGNNKVLLGLSGGVDSSVTAVLLHKAIGKNLTCVFVDNGLLRKGESEQVMHTFKENMNLNVIKSVSKDLFLRHLENIDDPEQKRKIIGRTFIDVFDAEAIKLKDIKFLAQGTIYPDVIESSGSESNEARVIKSHHNVGGLPEEMELDLIEPLRDLFKDEVRRLGIELGIPKEMLDRHPFPGPGLGVRIIGEITKEKISILQQADKIYIEELIKAGLYEKVSQAFAVLLPVKSVGVVGDERRYAEVIALRAVETVDFMTAKWAHLPYDFLEHVSNRIVNEIDEVSRVVYDISSKPPATIEWE

SEQ ID NO: 197888 - protein, 520 aa, Unknown
  Bacterial polypetide isolated from the Sargasso Sea
MPLDGNLKKILIVDFGSQFTQLIARKIRELGVYCEIISHNKLKKIKNFETNIKGLVFSGGPLNVYENKKVKFNNKLLKLGVPVLGICFGHQIISKELGGRVKSSKYREFGLAEVQEIKKSKLTKNFFSKGKNNVWMSHADQVIKLPKNFQAIAKSENSKLCIIENLEKKMYGIQFHPEVSHTNKGNQILKNFVFSICKIKRNWSSSDQKIKLINEVKQLVGNSKVICALSGGVDSSVVTKLLSNAIGKKLICIFVNTGLLRKNEETQVINTFKKRFKINLIYVNAENIFISKLKNITDPEKKRRIIGNLFIKIFEKYAKKIKNVKFLAQGTLYPDIIESKSVTGSQTSKIKSHHNVGGLPKKMNLKLVEPLKYLFKDEVRKLGLKLGLNREIISRHPFPGPGLAIRMPGKITKEKIKILKEADNYFIQSLKDNNLYDKIWQAYAALLPVKTVGVMGDNRTYEYLCLLRAITSEDGMTADFYQFKKSYIQSISNTIVNNIKGINRVVYDVTSKPPSTIELE

SEQ ID NO: 197889 - protein, 231 aa, Unknown
  Bacterial polypetide isolated from the Sargasso Sea
LGELEGQSDPETKRKAIGGLFIDVFQKYANRIENAEFLAQGTLYPDVIESVSFKGGPSVTIKSHHNVGGLPEKMGLKLLEPLRELFKDEVRALGRELKLPENFISRHPFPGPGLAIRCPGNITRDKLEILRKADAVYIDQIRKHGLYNDIWQAFVAILPVRTVGVMGDGRTYDYACTLRAVTSVDGMTADYYPFSHEFLSETATRLINEVGGINRVTYDITSKPPGTIEWE

SEQ ID NO: 197890 - protein, 493 aa, Unknown
  Bacterial polypetide isolated from the Sargasso Sea
MSQITLNKERDPSILILDFGSQYSELIARRIRETNVFSLVVSNYISIEEIKNINPKGIILSGGPNSVYEQNAPKCDEKIFNLGIPILGICYGMQLMVKELGGSVISATKRAEYGRAPISIDKESDLLSDVEDKSIMWMSHGDSINCLPDGFNKIAHTENTLHAAISNDFKKLFGVQFHPEVIHSEFGMTVIKNFVYKISCCAADWTTETYIEETIPRIREQVGNKKVLLALSGGVDSSTLAFLLNKAIGNQLTCMFIDQGFMRKGEPEFLMNFFDKKFHIKVEYINARERFIAKLKGITDPEQKRKIIGEEFIRVFEEESNRLGPFQYLAQGTLYPDVIESAGTNIDPKTGERIAVKIKSHHNVGGLPKDLQFKLVEPLRKLFKDEVRKVGAALGLPDEIIKRHPFPGPGLAIRILGEVNNEKLDCLRDADWIVRDEIKKADLYNDIWQAFAVLLPVKTVGVMGDKRTYAWPIVLRCVSSEDGMTADWSKKFL

SEQ ID NO: 197891 - protein, 296 aa, Unknown
  Bacterial polypetide isolated from the Sargasso Sea
MSQIPLKKERDPSILILDFGSQYSELIARRIRETNVFSLVVSNFISIEDINEINPKGIILSGGPNSVYEQNAPKCDEKIFNLGIPILGICYGMQLMVKELGGSVISASKKAEYGRAPINIDLKSDLLSDVEDKSIMWMSHGDSINCLPDGFNKIAHTENTLHAAISNDVKKLYGVQFHPEVIHSEFGMTVIKNFVYRIASCAADWTTETYIEETIPRIREQVGNKKVLLALSGGVDSSTLAFLLNKAIGNQLTCMFIDQGFMRKGEPEFLMNFFDKKFHIKVEYINARERFIAKLK

SEQ ID NO: 197892 - protein, 341 aa, Unknown
  Bacterial polypetide isolated from the Sargasso Sea
THTEEGILLLKNFVFGICKSKKNWSTDHQKKTLIKNVQNQIGNKKIICALSGGVDSSVVAQLLNKAVGKQLHCIFVNTGLLRLNEEKQVVDTFKKKLKMNLIYVNAADEFLKKLNNITDPEKKRKIIGNLFIKIFERYAKKLKNVKFLAQGTLYPDLIESKSVTGSQTSKIKSHHNVGGLPKKMKLELCEPLRLLFKDEVRKLGIKLNLSKDIISRHPFPGPGLAIRMPGKVSKDKIEILKQADNIFISELKKEKLYDKIWQAYAALLPVKTVGVMGDNRTYEYICLLRAITSQDGMTADFFDFPKNFIQNVSNKIINNIRGINRVVYDVTSKPPSTIELE

SEQ ID NO: 197893 - protein, 487 aa, Unknown
  Bacterial polypetide isolated from the Sargasso Sea
MVLDFGSQYTQLIARRVRESNVYSEILPWDIDEEKIKLVNPKGIILSGGPDSVTNSYTPRVPQIVFELNIPILGICYGMQTLAEQLGGQVISSEQKEFGYSELTIKADCILFSDLGKTLNVWMSHGDQVQDLPDNFELVAKTATAPIAVMQHLTKPIYALQFHPEVTHTEHGKTILDNYIFKVCKANADWKMDNLIEQRIQEIKNQVQDNKVLLGLSGGVDSSVTAALLHEAIGKKLVCVFVDNGLLRKGEAEEVMNTFKENMNLNVIKSDSEEAFLRHLKGVEDPEQKRKIIGRTFIDVFDSEAAKLKDVDFLAQGTIYPDVIESSGSESKEARVIKSHHNVGGLPEEMKMKLVEPLRDLFKDEVRKMGVELGLSSEILNRHPFPGPGLGVRILGDITKEKTSILKEADHIFIEELIKAGLYKTVSQAFAVYLPIKSVGVVGDERRYAEVIGLRAVETVDFMTARWAHLPYDFLEHVSNRIVNEIE

SEQ ID NO: 197894 - protein, 177 aa, Unknown
  Bacterial polypetide isolated from the Sargasso Sea
VSQTSKIISHHNVGGLPKKMKLKLIEPLKYLFKDEVRKLGFELKLSKEIISRHPFPGPGLAIRMPGKITDEKIKILKEADYYFINGLKKHNLYNKIWQAYAALLPVKTVGVMGDNRTYEYICLLRTITSDDGMTADFYDFDKNFMQEISNNIINNIKGINRVVYDITSKPPSTIELE

SEQ ID NO: 197895 - protein, 337 aa, Unknown
  Bacterial polypetide isolated from the Sargasso Sea
HTENGKIILKNFVLNICRTKKMWSLRKQKDLIINDIKNKVKNEKVICALSGGVDSSVVAFLLNKAIGKKLKCVFINTGLLRKNEEKEVVKTFKKKLKSNLIYVDASKLFLNKLKNVTDPELKRKIIGKLFIKLFERKAKKIKFLAQGTLYPDLIESRSVTGSPTSKIKSHHNVGGLPKNLKFSLVEPLQTLFKDEVRKLGKELSVPKAILQRHPFPGPGLAIRIPGKISKYKIKVLQEADFIFIDELKKSNLYHKIWQAYAALLPLKTVGVMGDSRTYEYTCMLRAVTSLDGMTADFYNFDKTFIQRVSNRIINSVNGINRVLYDVTSKPPSTIELE

SEQ ID NO: 197896 - protein, 103 aa, Unknown
  Bacterial polypetide isolated from the Sargasso Sea
MVLDFGSQYTQLIARRIRESDVYSEILPWDISKEKILSLKPKGIILSGGPNSVTESFTPRVPKCVFDMEVPILGICYGMQTLAEQMGGHVISADKKRIWSHCA

SEQ ID NO: 197897 - protein, 242 aa, Unknown
  Bacterial polypetide isolated from the Sargasso Sea
MKSKDKILILDFGSQYTQLIARRIREIGVFSEVKPSSISTEEIIKMNPSGIILSGGPETVTISSSQKVHKSLLEAKIPILGICYGMQTIANELGGTVVKSDIREFGHAEISHVNQSILFDNVGFDSDSLDVWMSHGDKVEVLPENFEIIASSKDCKVAGFQNSDSNIFGLQFHPEVTHTNQGEQILSNFIFKVCSCSKNWSTSDIINSMVSDVKNKVKNEKVLLGLSGGVDSSVVAMLLHKA

SEQ ID NO: 197898 - protein, 279 aa, Unknown
  Bacterial polypetide isolated from the Sargasso Sea
MSNAIGKKLTCIFVNTGLLRKGEEKQVITTFKKRFKINLIYVNAENLFLSKLKNISDPERKRKIIGNLFIKIFEKYAKKIKNVKFLAQGTLYPDLIESKSVTGSQTSKIKSHHNVGGLPKKMKLKLVEPLKYLFKDEVRKLGLEIGLNKEIISRHPFPGPGLAIRMPGNISKEKIKILKEADNYFIKSLKDNNLYDKIWQAYAALLPVKTVGVMGDNRTYEYVCLLRAITSEDGMTADFFQFNKTFMQSVSNQIINNIRGINRVVYDITSKPPSTIELE

SEQ ID NO: 197899 - protein, 342 aa, Unknown
  Bacterial polypetide isolated from the Sargasso Sea
MITQISGKEILKNFALDICNISDNWSAKNFINKSIENIRKEIGNSKVICGISGGVDSSITATLIHKAIGNNLTSIFVDNGLLRKGESEDVMNFLQKGLGLNIVKVNASENFLYKLRNIIDPEEKRKIIGKEFINVFEKEAKKIKNVKYLAQGTLYSDVVESAVIKSGHQAVIKSHHNVGGLPDKMKLKLIEPLRLHFKDEVREIGYELGINKEIIERHPFPGPGLAIRIMGEITEEKLNILREADHIFIDEIKKAGLYHKIWQAFAVLTNTQSVGVMGDNRTYQNCVAIRAVNSKDAMTADWSKIPYEVLSSVSSRIINEVEGINRVVYDITSKPPGTIEWE

SEQ ID NO: 197900 - protein, 155 aa, Unknown
  Bacterial polypetide isolated from the Sargasso Sea
KRIEPLKYLFKDEVRKLGLELNLNKDIISRHPFPGPGLAIRIPGIITREKIKILKEADYYFIKALRDEKLYNRIWQAYAALLPVKTVGVMGDNRTYEYLCLLRAITSEDGMTADFFEFKKPFMQFVSNQIVNNIRGINRVVYDITSKPPSTIELE

SEQ ID NO: 197901 - protein, 385 aa, Unknown
  Bacterial polypetide isolated from the Sargasso Sea
MSHSDEVVKLARGFKVIAKTNTSKFSIIEHSSKKLYGIQFHPEVTHTENGKIILKNFVFSICNIKKNWSSKNQKQILIKEVKKIVGKSKVICALSGGVDSSVVAKLIHNAVGKQLICIFVNTGLLRKNEETQVLKTFKKKFKINLIYVDAKKLFLNKLKKINEPEKKRKIIGNLFIKIFEKYSKKIKNVKYLAQGTLYPDIIESKSVTGSQTSKIKSHHNVGGLPKKMKLKLVEPLRLLFKDEVRKLGLELKLSKETVFRHPFPGPGLAIRMPGEITENKIKILKEADYIFINSLREYNLYNKIWQAYAALLPVKTVGVMGDNRTYEYMCLLRAITSEDGMTADFFNFSKEFMQLVSNKIINNITGINRVVYDITSKPPSTIELE

SEQ ID NO: 197902 - protein, 170 aa, Unknown
  Bacterial polypetide isolated from the Sargasso Sea
MEKIIVLDFGSQYSHLICRRIREFSVYAELVPYDISPEELKKMNPKGIIFSGGPSSVYNDDAPKPDEELFNFDLPLLGICYGHQLIVNNFGGKVKRANKEYGSSLLSMDKNSALLDGIGESIRAWMSHGDEAEEIPSNFEVIGHTENSHAAAIANTNRTVFGIQFHPEVV

SEQ ID NO: 197903 - protein, 514 aa, Unknown
  Bacterial polypetide isolated from the Sargasso Sea
MQDRILILDFGSQYTQLIARRVREAGVYSEIYIGDIDFNVIESFKPSGLILSGGPESAFIDDAPKPSKEIYSMGLPILGICYGMQVMTEQLGGKVSPSNEREFGHADAKMEANSRLFEGIETDGEQSVWMSHGDRVESLPEGFQTICTSANSPSAAMANEDDSFYGLQFHPEVTHTSCGQRIIENFVHNICGCGNDWNPGNIIEKDIKEVQEAVGDDQVLLGLSGGVDSSVVAALLHKAIGDQLVCIFVDNGLLRLNEGDQVMETFSEHMNLNVIRVNAEDIFLERLKGIDDPEDKRKIIGRTFIEVFEDEASKLENVKWLAQGTIYPDVIESAGSKTGKAHVIKSHHNVGGLPEDMKLKLVEPLRDLFKDEVRKIGKELGLTSKLVNRHPFPGPGLGVRILGEVKKEYADLLRLADDIFIEELHKENLYDKVSQAFAVFLPVKSVGVMGDGRKYEYVIALRAVETTDFMTANSAKLPYEFLDHVSTRIINEVSGISRVTLDISSKPPSTIEWE

SEQ ID NO: 197904 - protein, 279 aa, Unknown
  Bacterial polypetide isolated from the Sargasso Sea
MQEKVLILDFGSQYTQLIARRVRELFIYCEIHPYHKIPNDLDTYKAVILSGSPFSVRANDAPHPNLEQIKGKIPLLGVCYGAQYLAHFYGGQVNLSETREYGRANLEYFEAKDPFFRDVSKNSQVWMSHADTILTLPKGSKLIGSTEDVVNAAYKILGEDTYAIQFHPEVYHTTDGEQILKNFLVDIANVKQNWTPDSFIDMAINEIKEMVCEDVVILGLSGGVDSSVAAMLLNRALGDKLNCIFVNNGLLRKNEYEEVLAQYSGMGLNVRGVDASNKF

SEQ ID NO: 197905 - protein, 474 aa, Unknown
  Bacterial polypetide isolated from the Sargasso Sea
MTNTIKGIILSGGPLNVYQINKYSFDKKILQLNIPILGICFGHQILSKLNGGKVKQSKHREFGLANIYKKNNSLLTANFFKKSNTKKVWMSHADQVSKIPKKFRVVASSTNSKFAIVEDKIKKFYGVQFHPEVTHTENGKKLISNFVFLICKIKKNWSSKDQKLQLIKDVRSQVGSNKVICALSGGVDSSVVAQLLNKAIGKKLYCIFVNTGLLRKNEEAQVVQTFKKRLKMNLIYVNAEKEFLKKLANVSDPEKKRKIIGNLFIKIFERYAKKIKNVKFLAQGTLYPDLIESKSVTGSQTSKIKSHHNVGGLPKRMKLKLVEPLKFLFKDEVRKLGLELNLSNEIISRHPFPGPGLAIRMPGVITKEKIKILKEADYYFIQALRDHGLYHKIWQAYAALLPVKTVGVMGDNRTYEYLCLLRAITSEDGMTADFYEFKKSFMQIISNKIVNSIRGINRVVYDVTSKPPSTIELE

SEQ ID NO: 197906 - protein, 265 aa, Unknown
  Bacterial polypetide isolated from the Sargasso Sea
MIIDFGSQVTQLIARRLRELKVYCEIMPFQKITQKQFKSNNPAGIILSGGPSSVISNYHPKLSFNILKIGIPVLGICYGQQLMTSMMDGEVSSNSNTSEFGRALIFKTNESPIVEGFFKNKKEQVWMSHGDIVSKLPEGFKIIASSKISPNAIIADDLKLLYGVQFHPEVIHTTNGKKIFENFVNISGSDKSWTMSSYARKSIDSIKSEVKNEKVICALSGGVDSAVTAILIHKAIGKNLTCIYVDHGLMRENETNEIKKMFKET

SEQ ID NO: 197907 - protein, 360 aa, Unknown
  Bacterial polypetide isolated from the Sargasso Sea
AIVENKTKKYYGVQFHPEVTHTENGKKLISNFIFLICKIKKNWSSKDQKNQLIKDVRKQVENNKVICALSGGVDSSVVAQLLNKAIGKKLHCIFVNTGLLRKNEEIQVVQTFKKRLKMNLTYVNAEKEFLKNLKNVSDPEKKRKIIGNLFIKIFERYAKKIKNVKFLAQGTLYPDLIESKSVTGSQTSKIKSHHNVGGLPKKMNLKLVEPLKFLFKDEVRKLGLELKLSKEIISRHPFPGPGLAIRMPGIITNEKIKILKKADYYFIQALKDHGLYHKIWQAYAALLPVKTVGVMGDNRTYEYLCLLRAITSEDGMTADYYEFKKSFMQSISNKIVNSIRGINRVVYDVTSKPPSTIELE

SEQ ID NO: 197908 - protein, 318 aa, Unknown
  Bacterial polypetide isolated from the Sargasso Sea
WSSKKQKEKIIEEIKKQVGHSKVICALSGGVDSSVVAKIIHKAIGKNLTCIFVNTGLLRKNEEIQVIKTFKQKLKIKLIYVNAKNLFIKKLKKVNDPEKKRKIIGNLFIKIFEKYSKKISNIKYLAQGTLYPDLIESKSVTGSQTSKIKSHHNVGGLPKKMKLKLVEPVKFLFKDEVRKLGEELGLSKEILYRHPFPGPGLAIRIPGDIDENKINILKEADNIFIKSLYKYNLYHKIWQAYAALLPVKTVGVMGDNRTYEYICLLRAITSEDGMTADFFNFKKDFMQDVSNQIVNSIKGINRVVYDVTSKPPSTIELE

SEQ ID NO: 197909 - protein, 237 aa, Unknown
  Bacterial polypetide isolated from the Sargasso Sea
DASKQFMKVLKGVTDPEKKRKLIGKEFIKTFDKCANKYKGIEYLAQGTLYPDVIESRSVTGAPSATIKSHHNVGGLPKKMNLKLVEPLNTLFKDEVRILGKELGLSDNIRNRHPFPGPGLAIRILGEVTKSRLEILRQADKIYIDLLKKEKLYDKIWQAFCVLLPVKTVGVMGDSRTYENVCAIRAVTSVDGMTADYYPFDQTFLKKVSNNIINKVKGINRVVYDTTSKPPGTIEWE

SEQ ID NO: 197910 - protein, 456 aa, Unknown
  Bacterial polypetide isolated from the Sargasso Sea
KQKGAPKVAEKVFELNIPILGICYGMQTIANQLGGKVELANKREFGHADLKLRNQAAGLFKGISKKNISVWMSHGDHVSKLPNGFKSCGVTSNSPIAAFFNPSKKIYGLQFHPEVTHTPQGKIILKNFVREISNCKGLWTSKNIISRAVDQIREEVGDQEVLLGLSGGVDSAVVAALLSKAIGDQLTCIFVDNGLLRLNEGDQVMKTFKGKFGIKVKRANAGNQFLRDLKGKKDPEHKRKAIGKTFIDVFLKEAKKNKKIKWLAQGTIYPDVIESAGTKNGSAHVIKSHHNVGGLPSYLNLPVIEPLKDLFKDEVRKIGLELGLPKEILFRHPFPGPGLGVRILGEIKRPYIKILQSADDIFITELVNEGYYDKVSQAFAVFLPVKSVGVVGDSRRYEYVISLRAVETIDFMTAKSAKLPHAFLEKVSNRIINEIPEVSRVTYDISSKPPATIEWE

SEQ ID NO: 197911 - protein, 454 aa, Unknown
  Bacterial polypetide isolated from the Sargasso Sea
KIRELGVFSEIVSHKQLKNLDQNDLFGIILSGGPLNVYQDKKIKLNKNIFKFDCPILGICFGHQIISKFYGGHVKSSKTREFGFAKIKKSKNSILTKNFFDKKNTNNVWMSHADHVTKIPKDFKKIASTKNSKYTIIENHKLKRFGVQFHPEVTHTIKGKVLLKNFIFKICKAKKNWSPKHQKNNLIKKVKNEIGKDKVICALSGGVDSSVVAQLLNKSIGKQLKCIFVNTGLLRKNEERQVVDTFKKKLKIDLIYVNAEKQFLSKLKNVTDPEKKRKIIGNLFIKIFEKYAKKIKNVKFLAQGTLYPDLIESKSVTGSQTSKIKSHHNVGGLPKKMKLKLIEPLRLLFKDEVRKLGLELKLSRQIISRHPFPGPGLAIRMPGQITKEKIKILKEADNYFINELKKENLYDKIWQAYAALLPVKTVGVMGDNRTYDYICLLRAITSTDGMTADY

SEQ ID NO: 197912 - protein, 208 aa, Unknown
  Bacterial polypetide isolated from the Sargasso Sea
VFDAEAAKLENIDFLAQGTIYPDVIESSESESKEARVIKSHHNVGGLPEEMKLKLVEPLRDLFKDEVRRLGSQLDLPEIILNRHPFPGPGLGVRILGEVNEKKIKILQEADFIFIEELRKADLYDSVSQAFAVFLPIKSVGVVGDERRYSEVIALRAVETVDFMTANWAYLPHDFLDKVSRRIVNEIEDVSRVVYDISGKPPATIEWE

SEQ ID NO: 197913 - protein, 320 aa, Unknown
  Bacterial polypetide isolated from the Sargasso Sea
MSNSNNLSLDKKNIDTILVLDFGSQYTQLIARRIRDLNVFSVILPWDVSTEKIKSLNPKGVILSGGPESVTESNTPRIPEIIFKLDVPVLGICYGMQTLAEQFGGQVSSSKNKEFGHAQILLKKSSLLFDGFSSGSSIDVWMSHGDHVSTLPDQFSLIASTASAPIVAMEHVQKPIFALQFHPEVTHTKQGNTVLENFTFKICMCAAQWKMENLIEQRINEIKETVGDQKVLLGLSGGVDSSVTAMLLDQAIGKNLICVFVDNGLLRKNEAEDVENLFKDKMDLNLLVVDAKKAFYRHLKGISDPEQKRKIIGRTFIDIF

SEQ ID NO: 197914 - protein, 329 aa, Unknown
  Bacterial polypetide isolated from the Sargasso Sea
TVVSSGAADAAVVRLRPQQGQGSMDSVQRGVAATVDCPNRWVALDPERGAQAAVAEAARNLSCVGAEPLAITDNLNFPSPETPKGYWQLAMACRGIAEACRALNTPVTGGNVSLYNETRRDDGTLQPIHPTPVVGMVGLVEDIERVVGLGWRQPGDAVLLLGVAPDEQGDDRLGLAGSSYQMLVSGVLAGRPPRVDFELERGVQELLRQAIAAGLLASAHDSSDGGLAVALAESSIASTLGVELKLNGRPEGLARTLFAEGGARVAISVKAECRQQWDQLAAESTVPITELGVVSDGSTFRIQCGDKDVQLSLVDLKRAHQEGCRAGWE

SEQ ID NO: 197915 - protein, 303 aa, Unknown
  Bacterial polypetide isolated from the Sargasso Sea
PTKGKNVLVGPGENAGVIDVGNNQKLVFKIESHNHPSAIEPFQGAATGVGGILRDIFTMGARPIAVLNSLRFGNLDKLSNVDLLRGVVSGIAHYGNCVGVPTVGGEIDFDDSYSGNPLVNVMALGLLETEEIVCSGAKNVGSPVLYVGNTTGRDGVGGASFASSELTTTSLDDRPAVQVGDPFIEKSLIEACLDAFKTGDVIAAQDMGAAGLTCSSAEMAANGNLGISIDLDLVPSREDDMSSYQYLLSESQERMLFVVKEEKINNLIEKFNKWGLYASVIGEVIENNEVIISHKGKIVAQIP

SEQ ID NO: 197916 - protein, 295 aa, Unknown
  Bacterial polypetide isolated from the Sargasso Sea
KKPTVQVGDPFTEKLLMEACLELMKDNSIISIQDMGAAGLTSSSVEMASKGELGIELELDKVPCREENMTPYEMMLSESQERMLIILEDGKEKEAKKIFDKWDLDFVVIGKTTNTNNLTLKFNGEVKGSIPIEALSSKAPIYDRKWIKKKPLKEKVDLKDLKKIKIEDALIKILSSPNHSNKSWITDQYDQSVMCDTAQKSGSDAAIIRIHNKDKAIAVSVDSSANYCKSHPITGGKQIVCENWRNLITVGANPLAITNCLNFGNPENKEIMGEFAECLEGIKEACEYLNYPSGL

SEQ ID NO: 197917 - protein, 313 aa, Unknown
  Bacterial polypetide isolated from the Sargasso Sea
LKKLHTKGEQVIQGPGENAGVVDIEDDHAIVFKIESHNHPSFIEPYQGAATGVGGIMRDVFTMGARPIANLNSIHFGSPNHEKTRNLLRGVVKGIGGYGNCIGVPTIAGQTCFDESYNGNILVNAMTLGLVNKNKIFYSKAAGINKPVIYVGSKTGRDGIHGASMASAIFDDKIEEKKPTVQVGDPFTEKLLLEACLELMAGKSIISIQDMGAAGLTSSSIEMASKGDLGIEIDLTKVPCREENMTPYEIMLSESQERMLIVLEEGKENEAKKIFDKWNLDFAVIGKTTNSKNIELFFKNKKVAQIPIDFLAE

SEQ ID NO: 197918 - protein, 232 aa, Unknown
  Bacterial polypetide isolated from the Sargasso Sea
MGTAAGQSRVSSPAYDVNAALKQEGLKPSDWQEICRRLGREPNRAELGMFGVMWSEHCCYRNSRPLLRGFPTEGPRILVGPGENAGVVDLGEGHRLAFKIESHNHPSAVEPFQGAATGVGGILRDIFTMGARPIALLNALRFGPLEDPVNVGLIEGVVAGIAHYGNCVGVPTVGGEVAFDPSYGGNPLVNAMALGLMETEEIVKSGAQGVGNPVVYVGSTTGRDGMGGASFA

SEQ ID NO: 197919 - protein, 213 aa, Unknown
  Bacterial polypetide isolated from the Sargasso Sea
MKITSEIINKHGIKPEEYKKIVSLIGKEPNMLELGIFSAMWNEHCSYKSSKKHLSKLPTKNEKVIQGPGENAGVVDIGDNDALVFKIESHNHPSFIEPYQGAATGVGGILRDIFTMGARPIATLNSIHFGDQNHPKTKNLLNGVVSGIGGYGNCIGIPTVGGEVKFNSSYNENILVNAMAVGLAKKNKIFYSKAKGINQPVIYVGSKTGRDGI

SEQ ID NO: 197920 - protein, 257 aa, Unknown
  Bacterial polypetide isolated from the Sargasso Sea
VCSGAKNVGSPVLYVGNTTGRDGVGGASFASSELTTTSLDDRPAVQVGDPFVEKSLIEACLDAFKTGDVIAAQDMGAAGLTCSSAEMAANGNLGISIDLDLVPSREDDMSSYQYLLSESQERMLFVVKEEKINDLIEKFNKWGLYASVIGEVIGTNEVIISHKGKIVAQIPTAALSDDTPVNFHNVINNPPDDLLNKWEWKENDLPEIHDQKIFSLKENKNFSFSEIILKLLSNPSIASKRWIFKQYDSQVQVKYSF

SEQ ID NO: 197921 - protein, 284 aa, Unknown
  Bacterial polypetide isolated from the Sargasso Sea
KIESHNHPSAIEPFQGAATGVGGILRDIFTMGARPIAVLNSLRFGNLDKSSNVDLLQGVVSGIAHYGNCVGVPTVGGEIDFDDSYSGNPLVNVMALGLLETEEIVCSGAKNVGSPVLYVGNTTGRDGVGGASFASSELTTNSLDDRPAVQVGDPFIEKSLIEACLDAFKTGDVIAAQDMGAAGLTCSSAEMAANGNLGISIDLDLVPSREDDMSSYQYLLSESQERMLFVVKEEKINDLIEKFNKWGLYASVIGEVIGTNEVIISHKGKIVAQIPTSALSDDTP

SEQ ID NO: 197922 - protein, 289 aa, Unknown
  Bacterial polypetide isolated from the Sargasso Sea
NKIFYSKAAGIGKPVIYVGSKTGRDGIHGASMASATFDDEVEEKKPTVQVGDPFTEKLLLEACLELMADNSIIAIQDMGAAGLTSSSVEMASKGKLGIELDLNKVPCREEKMTPYEIMLSESQERMLIVLENGKESHAKKIFDKWNLDFAVIGKTTNTKNIELIFDSKKVAEIPIDLLAENAPFYDRKWKKTKLPQKIKFNKDEFKSLKLSDCLKKLLSNSNICDKQWIWDQYDHTVMGDTIQKPGGDSGIVRVHGTKKAIAASVDSSASYCFSHPLTGGKQIVCESWR

SEQ ID NO: 197923 - protein, 162 aa, Unknown
  Bacterial polypetide isolated from the Sargasso Sea
MPITKAQIESHGLKIEEYKKIKELLGRESNLLELGIFSAMWNEHCSYKSSKIHLKKLPTENKIVIQGPGENAGIVDIGDDDAIVFKIESHNHPSFIEPYQGAATGVGGILRDVFTMGARPIALMNSIHFGSPENEKTQNLLSGSCVRNWRVWEFSWYSNCWW

SEQ ID NO: 197924 - protein, 154 aa, Unknown
  Bacterial polypetide isolated from the Sargasso Sea
YNSGKKGALILGICNGFQILIECGLLKGALLRNSGLKFISKDILVKVQSNKNNFFNKYKIGDVLKLNIAHNEGNYFTDKKHLMELESNELIPLKYCDKNGNINNETNPNGSINNIAGIFNANKNILGMMPHPERMADKMMSGEDGLGLFLSLMN

SEQ ID NO: 197925 - protein, 227 aa, Unknown
  Bacterial polypetide isolated from the Sargasso Sea
MKSCVITFPGSNCDRDMNVALNKFGFKNKMVWHNDNELPKSDLVVLPGGFSYGDYLRCGSMASKSKIMQSVINFAKSGGLVMGICNGFQILVEAGLVPGVLLRNRYLKFICKNVFLKVNNKENLYFKNLDKDVFEFHIAHNEGNYFCTNEQLKEIEDNNQIAIYYCNNEGQIDERLNPNGSIRNIAGIFNKTKNVLGMMPHPERMIDKSLSGEDGSLFFKNLLNNIK

SEQ ID NO: 197926 - protein, 227 aa, Unknown
  Bacterial polypetide isolated from the Sargasso Sea
MINQENNDLYDLNEALQVENLTLKDYEEICKRLKRKPNRTELGMFGVMWSEHCCYRNSKPLLSKFPTKGKNVLVGPGENAGVIDVGNNQKLVFKIESHNHPSAIEPFQGAATGVGGILRDIFTMGARPIAVLNSLRFGNLDKSSNVDLLRGVVSGISHYGNCVGVPTVGGEIDFDDSYSGNPLVNVMALGLLETEEIVCSGAKNVGSPVLYVGNTTGRDGVGGASFA

SEQ ID NO: 197927 - protein, 322 aa, Unknown
  Bacterial polypetide isolated from the Sargasso Sea
EFDDDSEEKKPTVQVGDPFTEKLLLEACLELMKEDAIIAIQDMGAAGLTSSSIEMASKGNVGIDINLSKVPMRAANMTAYELMLSESQERMLMIIQPKKEELARSIFKKWDLEFEIIGEVTDTKKLILHMDGEEQASIPINILVEDAPEYQRDYIVNDPSPLINFESKDFEDKDILSDLLKMISHPNLCSRKWIWEQYDHMVMADTVVRPGSDAAVVRVHGTNKGIAISTDCSPTYCRHNPYEGGKHAVVETWRNIVASGAEPIAITDCMNFGNPEKPEIMGQFVECIRGMGDACSKLNYPVISGNVSLYNETNGEGIYPTP

SEQ ID NO: 197928 - protein, 272 aa, Unknown
  Bacterial polypetide isolated from the Sargasso Sea
PKRDLSINAYEMLLSESQERMLLVMKEKSSSKINKIFKKWHLDSIEIGKVIKEKNFIVKFKGKTVVNIPVSILTEDSPVYKRPIKSPKVIKLKEGKTLKLKFPKKNLATIFKKIIKDENICSRRWVYEQFDYMVGTNTITEPGSDSAVIRIKNTKKALALTTNCNSSYCKINPKKGSSIAVAECTRNIIASGAEPLAITNCLNFGNPEKKEIMWQFAKAIDGISQAVFQFNTPVVSGNVSLYNENKSDSINPTPVISMVGLIKDIKYKRDQF

SEQ ID NO: 197929 - protein, 328 aa, Unknown
  Bacterial polypetide isolated from the Sargasso Sea
MEVNEKIAIEHGLKKDEYKKICDLLKRVPNLTELGLFSAMWNEHCSYKSSKKHLKNLNTKGKRVIQGPGENAGVVDIDDEDAIVFKIESHNHPSFIEPYQGAATGVGGIMRDVFTMGARPIANLNSIHFGSPQHKKTKNLLRGVVKGIGGYGNCIGVPTIGGQTLFDESYNGNILVNAMTLGLVNKKKIFYSKAAGLNKPVIYVGSKTGRDGIHGASMASAIFDEKIEEKKPTVQVGDPFTEKLLLEACLELMADNSIIAIQDMGAAGLTSSSVEMASKGKLGVELNLNKVPCREEKMTPYEIMLSESQERMLIILESGKEEKAKKIF

SEQ ID NO: 197930 - protein, 233 aa, Unknown
  Bacterial polypetide isolated from the Sargasso Sea
MIDSSSNNTYDVNESLKVENLTRNDYEEICKRLGRKPNRTELGMFGVMWSEHCCYRNSKPLLANFPTTGKNVLVGPGENAGVIDVGNDQKLVFKIESHNHPSAIEPFQGAATGVGGILRDIFTMGARPIAVLNSLRFGNLDKSSNISLLRGVVAGISHYGNCVGVPTVGGEIDFDDSYSGNPLVNVMALGLLETDEIVCSGAKEVGSPVLYVGNTTGKDGVGGASFASSELTT

SEQ ID NO: 197931 - protein, 225 aa, Unknown
  Bacterial polypetide isolated from the Sargasso Sea
MRSSVIVFPGSNCDRDIAVALEKLQFKNSMVWHKETELPKSDLIVVPGGFSYGDYLRSGAIAAKSNILSEVISAGKNGSLILGICNGFQILIECGLLRGALLRNSGLKFISKDILVKVQSNKNKFFNKYKSGKILKLNIAHNEGNYFTNKEHLEELEYNDLIPLKYCDKEGVINTKSNPNGSINNIAAIFNSNKNILGMMPHPERSADKILSGEDGLSLFLSLMN

SEQ ID NO: 197932 - protein, 309 aa, Unknown
  Bacterial polypetide isolated from the Sargasso Sea
FAVIGRVTDTNRLVLKWHGDTVCDVPVPPLVAEAPEYERPWTLTPKAPEISADAALEGIDATPLNALAQLVGSPDLCSRRWVWEQYDHMVMGDTVQRPGGDAAVIRIHGTDRALAITTDCTPRYCLADPVEGGKQAVAEAWRNLTAVGAQPLALTDNMNFGNPERPEIMGQFAGCIQGMVEACNTLDFPVVSGNVSLYNETSGAGIMPTPAIGGVGLIQDLNAGMTTAAFDESGLTVISIGATQGHLGRSTLLRLIANRDDGPPPPVNLAVERRNGDFVRNLIAESLVTCCHDVSDGGLLIAVAEMALA

SEQ ID NO: 197933 - protein, 127 aa, Unknown
  Bacterial polypetide isolated from the Sargasso Sea
MKITNQIIEKHGLKLEEYKVIQKLLKRDPNLLELGIFSAMWNEHCSYKSSRIHLKKLPTKGKKVIQGPGENAGVIDIGDNDAIVFKIESHNHPSYIEPYQGAATGVGGILRDVFTMGARPIALLNSI

SEQ ID NO: 197934 - protein, 327 aa, Unknown
  Bacterial polypetide isolated from the Sargasso Sea
YLVGKNNMSPYEMMLSESQERMLIILDDKKEKEAKKIFDKWDLDFVVIGKTTDTNRLVLNFDNEKVADIPIPALADEAPQYDRKCKKFKIKKNNLRIKDLKKIKIEEALTKILSSPDHSNKSWITDQYDQVVMCDTIQKSGGDAAVIRVHNKEKAISISVDSSANYCSADPRTGGKQIVCENWRNLISVGSKPLAITNCLNFGNPEKPEVMGEFVECLEGMKEACEFLNFPVVSGNVSFYNETNSKSILPTPVIGGIGIFDNLNKIINMKTKKVGNIIIVIGKTFGHLNQSAFIRDLYLINDGPPPEINLTNEKNNGDSVSDLIKKN

SEQ ID NO: 197935 - protein, 298 aa, Unknown
  Bacterial polypetide isolated from the Sargasso Sea
VQVGDPFIEKSLIEACLDAFKTGDVIAAQDMGAAGLTCSSAEMAANGNLGISIDLDLVPSREDDMSSYQYLLSESQERMLFVVKEEKINDLIEKFNKWGLYASVIGEVIGTNEVIISHKGKIVAQIPTSALSDDTPVNFHNVIKNAPDDLLKKWEWKENDLPEIHDQKIFSLKENKNFSFSEIILKLLSNPSIASKQWIYKQYDSQVQANTVFTPGKSDAAVVRLREQNKKNKSKVFSGVAVSVDCNSRWVALDPFRGSIAAVAESARNVSCVGAEPVAITNNLNFSSPENEIGYWQL

SEQ ID NO: 197936 - protein, 273 aa, Unknown
  Bacterial polypetide isolated from the Sargasso Sea
HGLTHDEYKKIKEYLGRDSNLLELGIFSAMWNEHCSYKSSKIHLKKLPTKNNIVIQGPGENAGVIDIGDDDAVVFKIESHNHPSFIEPYQGAATGVGGILRDVFTMGARPIALMNSIHFGSPKNHKTKNLLNGVVSGIGGYGNSVGIPTVGGETKFNDTYNENILVNAMAVGLANKNKIFYSKAKGLNKAVVYVGSKTGRDGIHGATMASAEFDDNSEEKKPTVQVGDPFTEKLLLEACLELMKDNSIISIQDMGAAGLTSSSIEMASKGKLG

SEQ ID NO: 197937 - protein, 308 aa, Unknown
  Bacterial polypetide isolated from the Sargasso Sea
MTPYEMMLSESQERMLIILDDKKEKEAKKIFDKWDLDFVVIGKTTDTNKLVLYYDETKVANIPISALADKAPQYDRKWSKTKTKKNKVKIKELKKIKIDEALLKILSSPNHSNKSWITNQYDQMVMCDTIQKSGGDSAVVRVHKKNKAIAISVDSSANYCKSDPKLGGKQIVCENWRNLISVGAKPLAITNCLNFGNPEKPDVMGEFIGCIEGMKEACEFLNFPVVSGNVSFYNETKAKSINPTPVIGGIGIISNLEKVIDLKIKKKNNLILVIGKTIGHLDQSSFLQENYSIYDGPPPEINLLRKKQ

SEQ ID NO: 197938 - protein, 137 aa, Unknown
  Bacterial polypetide isolated from the Sargasso Sea
MTSSNWHFDTEKSLVESHGLKFDEFEKIVEGLGREPNLTELGIFSAMWNEHCSYKSSKYWLKKLPTSGERVIQGPGENAGVIDIDDGDVAVFKMESHNHPSFLEPYQGAATGVGGILRDVFTMGARPVANMNALRFG

SEQ ID NO: 197939 - protein, 226 aa, Unknown
  Bacterial polypetide isolated from the Sargasso Sea
MSFKSAVITFPGSNCDRDALCYLQDLTKGVVYNIWHEEASLPQVDLVILPGGFSFGDYLRSGAMASKSKIINDVIKHANDDRYLLGICNGFQILTEIGLLEGALIQNKNLKFLGKNCFIKKKFKNNFNLSIKEDQVLQIPVAHNEGNFYCDNETLKSLKNNEQIAFEYCKGEFSNSEENINGSIEAIAGITNKKKNILGMMPHPERAYSDFHQSQDGKLIIESLIS

SEQ ID NO: 197940 - protein, 186 aa, Unknown
  Bacterial polypetide isolated from the Sargasso Sea
FLVVLPGGFSYGDYLRCGSMASKSKIMQSVINFANSGGMVMGICNGFQILVETGLVPGVLLRNKYLEFICKNVFVKINDKKNKYFKNVDNEVLEFHIAHNEGNYFCTNDQLKEIEDNNQIAINYCDENGKIEDQFNPNGSIKNIAGIFNKEKNVLGMMPHPERMIDTCLSGEDGSLFFKNLINNLK

SEQ ID NO: 197941 - protein, 118 aa, Unknown
  Bacterial polypetide isolated from the Sargasso Sea
MIVNEQVAVDHGLKKNEYAKICELLKRTPNITELGIFSAMWNEHCSYKSSRLHLKKLPTKGKKVIQGPGENAGVIDIEDNDAIVFKIESHNHPSFIEPYQGAATGVGGIMRDVFTMGA

SEQ ID NO: 197942 - protein, 293 aa, Unknown
  Bacterial polypetide isolated from the Sargasso Sea
FYSKAAGLNKPVIYVGSKTGRDGIHGASMASASFDDKIEEKKPTVQVGDPFTEKLLLEACLELMAGDSIIAIQDMGAAGLTSSSIEMASKGKLGIEINLDKVPCRETKMTPYEIMLSESQERMLIVLENGKEDLAKKIFDKWNLDFAVIGKTTDTKDIELFFNNEQVAKIPVNILVENAPMYDRKWKKSKLPKKNKIQKKDLKNLKILNVLRKILSNPNVCDKKWIWEQYDHTVMGDTIQKPGGDSGVVRVHGTNKAIAAAVDSSAVYCWAHPHTGGKQIVCESWRNLISVGA

SEQ ID NO: 197943 - protein, 194 aa, Unknown
  Bacterial polypetide isolated from the Sargasso Sea
MKITNQVVEKHGLKIEEYSNIKKLLKREPNLLELGIFSAMWNEHCSYKSSRKHLKNLPTKGKQVIQGPGENAGVVDIGDNDAIVFKIESHNHPSYIEPYQGAATGVGGILRDVFTMGARPIALLNSIHFGSPDHFKTKSLLNGVVSGIGGYGNCIGIPTVAGETKFNSTYNENILVNAMAVGHAKKDKIFYSKA

SEQ ID NO: 197944 - protein, 227 aa, Unknown
  Bacterial polypetide isolated from the Sargasso Sea
MKSSVITFPGSNCDRDMDVALKKFGFNNKMVWHDDDELPKSDLVVLPGGFSYGDYLRCGSMASKSRIMQSVINFAKSGGLVMGICNGFQILVETGLVPGVLLRNKYLEFICKNVFVKLDNKENAYFKNLNKDILEFHIAHNEGNYFCTKDQLKEIEDNNQIAIYYCNKEGKIEDQYNPNGSIKNIAGIFNKEKNVLGMMPHPERMIDQSLSGEDGSIFFKNLINNIK

SEQ ID NO: 197945 - protein, 224 aa, Unknown
  Bacterial polypetide isolated from the Sargasso Sea
YKQYDSQVQANTVFKPGKSDAAVVRLREQNKKNKSKLFSGVAASVDCNSRWVALDPFRGSIAAVAESARNVSCVGAEPVAITNNLNFSSPENEIGYWQLSSSCNGIAEACKALETPVTGGNVSLYNESKNKDNLITPINPTPVIGMVGKIDNVEKAISSEWKNIEDEIWLIGSSKSEIKIAASSYLEYFHGEITGRPPKIDLLDEKFCQSFLRNAILNSFVVSS

SEQ ID NO: 197946 - protein, 281 aa, Unknown
  Bacterial polypetide isolated from the Sargasso Sea
NNERCFTMGARPIANLNSIHFGSPQHKKTKNLLRGVVQGIGGYGNCIGVPTIAGQTCFDESYNGNILVNAMTLGLVKKNKIFYSKATGINKPVIYVGSKTGRDGIHGASMASAIFDEKIEEKKPTVQVGDPFTEKLLLEACLELMSGNSIISIQDMGAAGLTSSSIEMASKGKLGIEINLNKVPCRELNMTPYEIMLSESQERMLIVLENGKEESAKKIFDKWNLDFAIIGKTTNSKKIELYFDDKKVADIPVNTLVEDAPIYDRKWKKSKLPKKNKINKE

SEQ ID NO: 197947 - protein, 315 aa, Unknown
  Bacterial polypetide isolated from the Sargasso Sea
SYPRGPGENAGVIDIDDGDVAVFKMESHNHPSFLEPYQGAATGVGGILRDVFTMGARPVANMNALRFGDPNHPKTKHLVSGVVGGIGGYGNCIGIPTVGGEVNFHPSYNGNILVNAMTVGIAKKDKIFYSAAAGIGNPVVYVGSKTGRDGIHGATMASAEFDDDSEEKKPTVQVGDPFTEKLLLEACLELMKEDAIIAIQDMGAAGLTSSSIEMASKGNVGIDINLSKVPMRAANMTAYELMLSESQERMLMIIQPNKEELARSIFKKWDLEFEIIGEVTDTKKLILHMDDEEQASIPINILVEDAPEYQRDYIV

SEQ ID NO: 197948 - protein, 227 aa, Unknown
  Bacterial polypetide isolated from the Sargasso Sea
MKSSVITFPGSNCDRDMDVALKKFGFNNKMVWHNDTQLPQSDLVVLPGGFSYGDYLRCGSMASKSKIMSSIISFANSGGMVMGICNGFQILVETGLVPGVLLRNKYLQFICKNVFVKIHNKQNTFFKNIDNDILELHIAHNEGNYFCTSDQLKEINDNDQIAINYCDKNGKIQDEFNPNGSIENIAGIFNKKKNVLGMMPHPERMIDKSLSGEDGSIFFNNLINNIK

SEQ ID NO: 197949 - protein, 270 aa, Unknown
  Bacterial polypetide isolated from the Sargasso Sea
ANLNSIHFGSPQNKKTKNFLRGVVQGIGGYGNCIGVPTIAGQTSFDESYNGNILVNAMTLGLVNKKKIFYSKAAGINKPVIYVGSKTGRDGIHGASMASAIFDEKIEEKKPTVQVGDPFTEKLLLEACLELMSENSIIAIQDMGAAGLTSSSVEMASKGKLGIELDLSLVPCREAKMTPYEIMLSESQERMLIILENGKEEKAKKIFDKWNLDFAIIGKTTNSKRIEIFFKKEKMADIPLNILTDNAPIYERKWKKTKLPKKNNINKNDF

SEQ ID NO: 197950 - protein, 258 aa, Unknown
  Bacterial polypetide isolated from the Sargasso Sea
DGIHGASMASAIFDDKIEEKKPTVQVGDPFTEKLLLEACLELMAGKSIISIQDMGAAGLTSSSIEMASKGDLGIEIDLTKVPCREENMTPYEIMLSESQERMLIVLEEGKENEAKKIFDKWNLDFAVIGKTTNSKNIELFFKNEKVAEIPIDFLAENAPMYDRKWVKAKLPKENNFSKNQFKSFKLSDCLKRILIDPNIADKEWIWNQYDHTVMGDTIQKPGGNAGVVRVHGTNKAVAASVDSSATYCHAHPLTGGKQ

SEQ ID NO: 197951 - protein, 237 aa, Unknown
  Bacterial polypetide isolated from the Sargasso Sea
GGIMRDVFTMGARPIANLNSIHFGSPQHPKTKNLLRGVVKGIGGYGNCIGIPTIGGQTSFDDSYNGNILVNAMTLGLVNKNKIFYSKAAGIDKPVIYVGSKTGRDGIHGASMASAIFDEKIEEKKPTVQVGDPFTEKLLLEACLELMAGKSIISIQDMGAAGLTSSSVEMASKGNLGIELDLNKVPCREEKMTPYEIMLSESQERMLIVLENGKEEEAKKIFDKWNLDFAVIGKTTD

SEQ ID NO: 197952 - protein, 257 aa, Unknown
  Bacterial polypetide isolated from the Sargasso Sea
KSSRLHLKKLPTKGKKVIQGPGENAGVIDIEDNDAIVFKIESHNHPSFIEPYQGAATGVGGIMRDVFTMGARPIANLNSIHFGSPQHKKTKNLLRGVVHGIGGYGNCMGVPTIAGQTSFDSSYNGNILVNAMTLGLVKKDKIFYSKAAGLNKPLIYVGSKTGRDGIHGASMASASFDEKIEEKKPTVQVGDPFTEKLLLEACLELMAGDSIIAIQDMGAAGLTSSSIEMASKGNLGIEINLNKVPCRETKMTPYEIM

SEQ ID NO: 197953 - protein, 214 aa, Unknown
  Bacterial polypetide isolated from the Sargasso Sea
MKASIIVFPGSNCDRDIAVSIKKLTDLEPIMVWHKETSIPDSDLIVIPGGFTFGDYLRCGSIAANSPIMNDVIKKATGGLPTLGICNGFQILTESGLLPGTLIKNDCLSFLCKTVSIRVENNGTIFSKKYKQNEVINIPIAHNEGNFFANEDTLKKIKDSNQIIFKYCNQNGEVNNETNPNGSIENIAGITNEQGNVLGMMPHPERATCEITKL

SEQ ID NO: 197954 - protein, 291 aa, Unknown
  Bacterial polypetide isolated from the Sargasso Sea
RGGVGMDFSVSAVPQRETGMQPFEIMTSESQERMLAIVEPDNLEQVFEICRKWEIRSSVVGKVTSSGTLRIVDEFDGDVLGEVPASSLHDDAPLYERPMAQPETLADQEIQLAPPDGIEEDLIDLLMSPQWATSQYDSQLFLNTVVGPGSDAAVLRLKHPTSGADTGRGIALTTDGNHRWCAVNPRIGAAMTVAESVLNLACVGAIPQALVNCLNFGNPENPSVMWQLSEAVDGMAEACTAFELPVVGGNVSLYNESQGKNIDPTPIVGVIGLIDDLAKPPPGLAWNDGDR

SEQ ID NO: 197955 - protein, 217 aa, Unknown
  Bacterial polypetide isolated from the Sargasso Sea
MIVNEQVAVDHGLKKDEYAKICELLKRTPNITELGIFSAMWNEHCSYKSSRLHLKKLPTKGKKVIQGPGENAGVIDIEDNDAIVFKIESHNHPSFIEPYQGAATGVGGIMRDVFTMGARPIGNLNSIHFGSPQQKKTKNLLRGVVHGIGGYGNCMGVPTIAGQTSFDSSYNGNILVNAMTLGLVKKDKIFYSKAAGLNKPVIYVGSKTGRDGIHGAS

SEQ ID NO: 197956 - protein, 220 aa, Unknown
  Bacterial polypetide isolated from the Sargasso Sea
FPGSNCDRDMDVALKKFGFKNEMVWHDDEKLPESDLIVLPGGFSYGDYLRCGSIAGKSKIIKSVIDFANKGGLVLGICNGFQILTETGLLPGVLQQNKNIEFICKNVFVKVNNKNNKYFNSIDKDVLELHIAHNEGNYFCTSDELKMLEDNNLIAVSYCNEKGEVNEKSNPNGALQNIAGIFNKEKNILGMMPHPERMIDKYLSGEDGSIFFKNLLNNIK

SEQ ID NO: 197957 - protein, 282 aa, Unknown
  Bacterial polypetide isolated from the Sargasso Sea
MIDSSSNNTYDVNESLKVENLTRNDYEEICKRLGRKPNRTELGMFGVMWSEHCCYRNSKPLLANFPTTGKNVLVGPGENAGVIDVGNDQKLVFKIESHNHPSAIEPFQGAATGVGGILRDIFTMGARPIAVLNSLRFGNLDKSSNISLLRGVVAGISHYGNCVGVPTVGGEIDFDDSYSGNPLVNVMALGLLETDEIVCSGAKEVGSPVLYVGNTTGKDGVGGASFASSELTSNSLDNRPAVQVGDPFIEKSLIEACLDAFKTGDVLAAQDMGAAGLTCSSA

SEQ ID NO: 197958 - protein, 122 aa, Unknown
  Bacterial polypetide isolated from the Sargasso Sea
MEVNEQIAIDHGLKSDEYKKICQLLKRTPNITELGIFSAMWNEHCSYKSSRLHLKKLPTKGKKVIQGPGENAGVIDIEDGDAIVFKIESHNHPSFIEPYQGAATGVGGIMRDVFTMGARPIA

SEQ ID NO: 197959 - protein, 196 aa, Unknown
  Bacterial polypetide isolated from the Sargasso Sea
MIVNKQIAIEHGLKYEEYKKICKLLKRTPNITELGIFSAMWNEHCSYKSSRLHLKKLPTKGKKVIQGPGENAGVIDIEDGDAIVFKIESHNHPSFIEPYQGAATGVGGIMRDVFTMGARPIANLNSIHFGSPQHKKTKNLLRGVVHGIGGYGNCMGVPTIAGQTSFDSSYNGNILVNAMTLGLVKKNKIFYSKAAG

SEQ ID NO: 197960 - protein, 284 aa, Unknown
  Bacterial polypetide isolated from the Sargasso Sea
EEKMTPYEIMLSESQERMLIVLENGKEDSAKKIFDKWNLDFAVIGKTTNTKNIELFFEKEKVANVPIKFLANEAPMYDRPWKRTKLPQKIKFSNNELKKLKFNDVIKKMISHPNICSKQWIWEQYDHTVMGDTIQKPGGDAGVVRVHGTKKAVASSVDSSASYCHAHPFTGGKQVVCEAWRNLISVGAEPIAITNCLNFGNPEKKENMGEFVECIDGINEASKYLSFPVVSGNVSFYNETKDKGIKPTPTIGGVGLIKDYKNLMTMRFKSKENLVLVMEKQKEI

SEQ ID NO: 197961 - protein, 299 aa, Unknown
  Bacterial polypetide isolated from the Sargasso Sea
RITAIYLVNAMTVGIAKKDKIFYSAAAGIGNPVVYVGSKTGRDGIHGATMASAEFDDDSEEKKPTVQVGDPFTEKLLLEACLELMKEDAIIAIQDMGAAGLTSSSIEMASKGNVGIDINLSKIPMRAANMTAYELMLSESQERMLMVIQPKKEELARSIFKKWDLEFEIIGEVTDTKKLILHMDGEEQASIPINILVEDAPEYQRDYIVNDPSPLISFESKDFEDKDILSDLLKMISHPNLCSRKWIWEQYDHMVMADTVVRPGSDAAVVRVHGTNKGIAISTDCSPTYCRHNPYEGGK

SEQ ID NO: 197962 - protein, 326 aa, Unknown
  Bacterial polypetide isolated from the Sargasso Sea
VVDIEDDDAIVFKIESHNHPSFIEPYQRAATGVGGIMRDVFTMGARPIANLNSIHFGSPDHEKTRNLLRGVVKGIGGYGNCIGVPTIAGQTCFDESYNGNILVNAMTLGLVNKNKIFYSKAAGINKPVIYVGSKTGRDGIHGASMASAIFDDQIEEKKPTVQVGDPFTEKLLLEACLELMAGKSIISIQDMGAAGLTSSSIEMASKGNLGIEIDLTKVPCREEKMSPYEIMLSESQERMLIILEEGKENEAKKIFDKWNLDFAVIGKTTNSKNIELFFRNEKVAEIPINFLAENAPMYDRKWIKAKLPKEKKFSKDCFKSLKLKNC

SEQ ID NO: 197963 - protein, 253 aa, Unknown
  Bacterial polypetide isolated from the Sargasso Sea
MINQENNDLYDLNESLLVENLTLNDYEEICKRLKRKPNRTELGMFGVMWSEHCCYRNSKPLLSKFPTKGKNVLVGPGENAGVIDVGNNQRLVFKIESHNHPSAIEPFQGAATGVGGILRDIFTMGARPIAVLNSLRFGNLDKSSNIDLLRGVVSGIAHYGNCVGVPTVGGEIDFDDSYSGNPLVNVMALGLLETDEIVCSGAKNVGSPVLYVGNTTGRDGVGGASFASSELDTSSLDDRPAVQVGDPFVEKSL

SEQ ID NO: 197964 - protein, 181 aa, Unknown
  Bacterial polypetide isolated from the Sargasso Sea
MNEPGITKELIELHGLNSDEYELILSIINRIPTFTELGIFSAMWNEHCSYKSSKKWLRTLPSKGSQVICGPGENAGIVDIGDNQALVFKMESHNHPSYIEPYQGAATGVGGILRDVFTMGARPIAVMNSLSFGDVNHYKTNQLVNGVVSGIGGYGNCFGVPTVGGETRFDSSYNGNCLVNA

SEQ ID NO: 197965 - protein, 289 aa, Unknown
  Bacterial polypetide isolated from the Sargasso Sea
GARPIALLNSIHFGSPDHFKTKSLLNGVVSGIGGYGNCIGIPTIAGETKFNSTYNENILVNAMAVGHAKKDKIFYSKAKGLNKSVVYVGSKTGRDGIHGASMASAEFDENSEEKKPTVQVGDPFTEKLLMEACLELMKDNSIISIQDMGAAGLTSSSVEMASKGELGIELHLDKVPCREDNMTPYEMMLSESQERMLIILEDEKEDHARTIFKKWDLDFVVIGKTTNTKKLTLKYNNKIEGEIPIDLLASKAPVYDRKWVKKKLPKNKIDFKNLKKINIKNALIKILSS

SEQ ID NO: 197966 - protein, 122 aa, Unknown
  Bacterial polypetide isolated from the Sargasso Sea
MNVTEIIAIEHGLKKDEYKKICDLLKRVPNITELAIFSAMWNEHCSYKSSRKHLKKLHTKGDKVIQGPGENAGVIDIGDEDAIVFKIESHNHPSFIEPYQGAATGVGGIKRDVFTMGARPIA

SEQ ID NO: 197967 - protein, 227 aa, Unknown
  Bacterial polypetide isolated from the Sargasso Sea
MNSSVIIFPGSNCDRDMDVALKKFGFKNKMVWHDDDKLPKSDLIVLPGGFSYGDYLRCGSIAGKSKIIQSVIDFANSGGLVLGICNGFQILTETGLLKGVLQQNKNIEFICKNIFVKINNSENKFFENIDKDVLELHIAHNEGNYFCTEEELKSLEDNNQIAAYYCSSDGKVDDKSNPNGAIKNIAGIFNEKKNILGMMPHPERMIDQSLSGEDGSIFFENLLKNLK

SEQ ID NO: 197968 - protein, 298 aa, Unknown
  Bacterial polypetide isolated from the Sargasso Sea
LMNSIHFGSPENKKTQNLLSGVVSGIGGYGNSVGIPTVGGETKFNSTYNENILVNAMAIGHANKNKIFYSKAKGVNKSVVYVGSKTGRDGIHGATMASAEFDENSEEKKPTVQVGDPFTEKLLLEACLELMKDNSIISIQDMGAAGLTSSSVEMASKGKLGIELNLNKIPCRENNMTPYEMMLSESQERMLIILDDKKEEEAKKIFDKWDLDFVVIGKTTDTNKLILNFDNKRVADIPIVALAEKAPLYDRKWVKSKLSKDKVKIKNLKKIKIEDALIKILSSPNHSNKNWITNQIRP

SEQ ID NO: 197969 - protein, 269 aa, Unknown
  Bacterial polypetide isolated from the Sargasso Sea
PTVQVGDPFTEKLLLEACLELMADNSIIAIQDMGAAGLTSSSVEMASKGNLGIELNLSEVPCREEKMTPYEIMLSESQERMLIVLEKGKEEHAKKIFDKWNLDFAVIGKTTDSKKIELIFDNKKVAEIPIDLLAENAPIYDRPWKKTKLPQKLKFDKDEFKSLKLSDCLKKILSNSNISDKKWIWDQYDHTVMGDTIQKPGGDAGVVRVHGTNKAVAASVDSSALYCFSHPLTGGKQIVCESYRNLISVGAKPIAITNCLNFGNPEKEK

SEQ ID NO: 197970 - protein, 324 aa, Unknown
  Bacterial polypetide isolated from the Sargasso Sea
EHCSYKSSKIHLKKLPTKNKVVIQGPGENAGVIDIGDDDAIVFKIESHNHPSFIEPYQGAATGVGGILRDVFTMGARPIALMNSIHFGSPDNKKTQNLLSGVVSGIGGYGNSVGIPTVGGETKFNSTYNENILVNAMAIGHANKNKIFYSKAKGLNKPVVYVGSKTGRDGIHGATMASAEFDENSEEKKPTVQVGDPFTEKLLLEACLELMKDNSIISIQDMGAAGLTSSSIEMASKGKLGIELNLNKVPCRENNMSPYEMMLSESQERMLIILDDKKEEEAKKIFDKWDLDFVVIGKTTDTNRLILNFDNKKVADIPITALAD

SEQ ID NO: 197971 - protein, 223 aa, Unknown
  Bacterial polypetide isolated from the Sargasso Sea
MNSAVIVFPGSNCDRDVATALTNLQFKNKMVWHKDSELPKSDLIVIPGGFSYGDYLRSGAIAAKSNILKEVIKAANSGCLVLGICNGFQILIETGLLQGALLRNKNLKFVSKDINLKIINNENKFCNNYKKNSVISLNIAHNEGNYFTQKDHLKELEDNNLIPFKYCDMEGSVNESSNPNGSLNNIAGILNNNKNILGMMPHPERMVTNLLVTQMGMSCLQVF

SEQ ID NO: 197972 - protein, 227 aa, Unknown
  Bacterial polypetide isolated from the Sargasso Sea
MKSAVIIFPGSNCDRDMDVALKKFGFKNEMVWHDDEQLPKSDLIVLPGGFSYGDYLRCGSIAGKSKIIKSVIDFAAKGGLVLGICNGFQILTETGLLPGVLQQNKNIEFICKNVFVKVNNKNNKYFNSIDKDVLELHIAHNEGNYFCTNDELKMLKDNNLIAVSYCNEKGEVNEKSNPNGALQNIAGIFNKEKNILGMMPHPERMIDKYLSGEDGSIFFKNLINNIK

SEQ ID NO: 197973 - protein, 300 aa, Unknown
  Bacterial polypetide isolated from the Sargasso Sea
IHFGSTQHKKTKNLLRGVVKGIGGYGNCIGVPTIAGQTCFDQSYNGNILVNAMTLGLVNKNKIFYSKAAGINKPVIYVGSKTGRDGIHGASMASAIFDDKIEEKKPTVQVGDPFTEKLLLEACLELMSDKSIIAIQDMGAAGLTSSSIEMASKGNLGIELHLDKVPCREEKMTPYEIMLSESQERMLIVLENGKEDSAKKIFDKWNLDFAVIGKTTSSKNIELYFEKEKVANVPIKILANEAPMYDRPWKKTKLPQKIKFSNSDFKKLKFDDVIKKIISNPNICSKQWIWEQYDHTVMGD

SEQ ID NO: 197974 - protein, 204 aa, Unknown
  Bacterial polypetide isolated from the Sargasso Sea
MNEELILQHGLTLDEFQVIRKYLKRDLSIEELGIFSAMWNEHCCYKTSKKWLKKLPTDNEIVIQGPGENAGVIDLQDNDGIAFKIESHNHPSYIEPFNGSATGVGGILRDIFTMGARPIATLDSIRFGLIETEKTKYLLNGVVHGIGHYGNCIGIPNIGGECEFESTYDFNNLVNAMAVGHVQKDKIFYSKPKSIGGLIVYIGS

SEQ ID NO: 197975 - protein, 274 aa, Unknown
  Bacterial polypetide isolated from the Sargasso Sea
MASASFDDKIEEKKPTVQVGDPFTEKLLLEACLELMAGDSIIAIQDMGAAGLTSSSIEMASKGNLGIEINLNKVPCRETKMTPYEIMLSESQERMLIVLENGQEEQAKKIFDKWNLDFAVIGKTTKSKKIELYFDSEKVADIPVNTLVENSPMYDRKWKKAKLPKKNKINKDDINNLKIIEVLKKILANPNICSKEWIWQQYDHTVMGDTIQKPGGDSGVVRVHGTNKAVAASVDSSAVYCWAHPLTGGKQVVCESFRNLISVGAKPIAITNCL

SEQ ID NO: 197976 - protein, 297 aa, Unknown
  Bacterial polypetide isolated from the Sargasso Sea
AIFDDKIEEKKPTVQVGDPFTEKLLLEACLELMSDKSIIAIQDMGAAGLTSSSIEMASKGNLGIELHLDKVPCREEKMTPYEIMLSESQERMLIVLENGKEDSAKKIFDKWNLDFAVIGKTTNSKNIELYFEKEKVANVPIKFLANEAPMYDRPWKKTKLPQKIKFSNNDFKKLKFNDVIKKMISNPNICSKQWIWEQYDHTVMGDTIQKPGGDAGVVRVHGTKKAVASSVDSSASYCYAHPFTGGKQVVCEAWRNLVSVGAEPIAITNCLNFGNPEKKENMGEFVECIDGINEASK

SEQ ID NO: 197977 - protein, 194 aa, Unknown
  Bacterial polypetide isolated from the Sargasso Sea
MNEVNEHIAIDHGLKKEEFSKICDLLKRTPNLTELGIFSAMWNEHCSYKSSRLHLKKLNTKGKKVIQGPGENAGVIDIEDDDAIVFKIESHNHPSFIEPYQGAATGVGGIMRDVFTMGARPIANLNSIHFGSPQHPKTKNLLRGVVKGIGGYGNCMGIPTVGGQTSFDDSYNGNILVNAMTLGLVNKNKIFYSK

SEQ ID NO: 197978 - protein, 189 aa, Unknown
  Bacterial polypetide isolated from the Sargasso Sea
MKVTEAVAIDHGLKKEEFSKICKLLKRIPNITELAIFSAMWNEHCSYKSSRKHLKKLHTKGKQVIQGPGENAGVIDIGDDDAIVFKIESHNHPSFIEPYQGAATGVGGIMRDVFTMGARPIANLNSIHFGSPQHKKTKNLLRGVVKGIGGYGNCIGVPTIGGQTSFDESYNDNILVNAMTLGLVNKNKI

SEQ ID NO: 197979 - protein, 258 aa, Unknown
  Bacterial polypetide isolated from the Sargasso Sea
VVGETISEDRFLIKLDGVVKADLPLKALAGNAPEYDRPWIEVQPNSELKDVVEVNAIDGLKGLISSANYCSKSWIYEQYDSQVMADTIERPGFGAGIVRVHGTKKSIAFTSDVTPRYVRANPFEGGKQAVAEAFRNLVSVGAKPLASTDNLNFGNPEKPEIMGQFVQAIKGISQAVKELNMPIVSGNVSLYNETDGVSINPTPTIGAVGIINEAENPINGRAYEGNIAVLIGETQGHLGQTALLQEVFNRSDGDAPKS

SEQ ID NO: 197980 - protein, 259 aa, Unknown
  Bacterial polypetide isolated from the Sargasso Sea
MEVTEAVAIDHGLKKEEFSKICELLKRTPNLTELAIFSAMWNEHCSYKSSRKHLKKMHTKGKQVIQGPGENAGVIDIGDDDAIVFKIESHNHPSFIEPYQGAATGVGGIMRDVFTMGARPIANLNSIHFGSPQHKKTRNLLRGVVKGIGGYGNCIGVPTIAGQTTFDESYNGNILVNAMTLGLVNKNKIFYSKAAGLDKPVIYVGSKTGRDGIHGASMASATFDDKIEEKKPTVQVGDPFTEKLLLEACLELMADNSII

SEQ ID NO: 197981 - protein, 215 aa, Unknown
  Bacterial polypetide isolated from the Sargasso Sea
MKISNKIIERHGLKIDEYKKIKLLLEREPNLLELGIFSAMWNEHCSYKSSKVHLKKLPTKNKYVIQGPGENAGVIDIGDDDAIIFKIESHNHPSFIEPYQGAATGVGGILRDVFTMGARPIALLNSIHFGEEKNKKTKNLLNGVVSGIGGYGNCIGIPTVAGETKFNETYNENILVNAMAVGHANKNKIFYSKAKGLNKPVVYVGSKTGRDGIHG

SEQ ID NO: 197982 - protein, 316 aa, Unknown
  Bacterial polypetide isolated from the Sargasso Sea
AGLTSSSVEMSFKGNLGMEINLDLVPCRESNMSPYEMMLSESQERMLLIINDNKTTHAKKIFEKWDLDFVVIGKTIKEKQLILNYKGNEVANLPIEALSSQAPVYDRKWKKITLPNKEPRLEKLKKIKFEDSFLKILSSPNFSNKQWVTNQYDQMVMGDTIQRSGSDSAIIRIHKKNKAIAITVDSSSNYSKAHPLTGGKQIVCENWRNLISAGSKPLAITNCLNFGNPENEEIMGEFAETIQGMKEACEYLNFPVVSGNVSFYNGTNKKNIFPTPVIGGIGLIENVKFSTNNNFQKIGNRIILIGKTFGHLYQSA

SEQ ID NO: 197983 - protein, 208 aa, Unknown
  Bacterial polypetide isolated from the Sargasso Sea
DAYKVIEGLDGATPRFVWHKENDLSDYDCIIVPGGFSYGDYLRAGAIARFSPIMNALVNESKKGKLIIGICNGFQILLEANLLEGALINNSGVKFKSRNVSLSAENYNTVFTKLIPKDKQIVMPIAHRQGNYSASDQLIKKLDDNNQIAFRYSSKMGGNPNGSCSDIAGVLNQNRNVLGMMPHPERAADSILGSNDGLYIFQSMLESF

SEQ ID NO: 197984 - protein, 261 aa, Unknown
  Bacterial polypetide isolated from the Sargasso Sea
MINQENNDLYDLNEALQVENLTLNDYEEICKRLKRKPNRTELGMFGVMWSEHCCYRNSKPLLSKFPTKGKNVLVGPGENAGVIDVGNNQKLVFKIESHNHPSAIEPFQGAATGVGGILRDIFTMGARPIAVLNSLRFGNLDKSSNVDLLRGVVSGISYYGNCVGVPTVGGEIDFDDSYSGNPLVNVMALGLLETEEIVCSGAKNVGSPVLYVGNTTGRDGVGGASFASSELTTTSLDDRPAVQVGDPFVEKSLIEACLDAF

SEQ ID NO: 197985 - protein, 270 aa, Unknown
  Bacterial polypetide isolated from the Sargasso Sea
AAGVNKPVIYVGSKTGRDGIHGASMASAIFDDKIEEKKPTVQVGDPFTEKLLLEACLELMAGKSIISIQDMGAAGLTSSSIEMASKGNLGIELNLNKVPCREEKMTPYEIMLSESQERMLIVLENGKEGEAKKIFDKWNLDFAVIGKTTDTKKIELFFNNNKEAEIPINILAENAPVYDRKWKKTKLPQKIKFNKDNFKKLKITEVLKKILSLPNISSKEWIWQQYDHTVMGDTIQKPGSDSGVVRVHGTNKAVATTVDSSAVYCYAHPL

SEQ ID NO: 197986 - protein, 290 aa, Unknown
  Bacterial polypetide isolated from the Sargasso Sea
NNIVVLHKGIMEADIPIKFLTDNAPMYKRKTISKNKRNQKNQLTSDVKVKDAILKLLNSPNICSKKWIWEQYDRTIMANTLNEAGGDAGIVRIENTKKAIAMSCDVTPRYCNADAKKGASQAVAECWRNIISMGAKPLAITNCLNFGNPEKPEIMNDFVKTIDGIRDASIALDFPVVSGNVSLYNETNGDPIKNTPTIGGVGLIENIDILENFGSLNIDDSIYMLGKKGEHLSCSAFEEVYYNTASNNPPEIDLNQEQRNGEAILSLIQEKIIASCHDISDGGMIVAICE

SEQ ID NO: 197987 - protein, 148 aa, Unknown
  Bacterial polypetide isolated from the Sargasso Sea
MRITNKIIEKHGLKLEEFENIKKLMKRDPNLLELGIFSAMWNEHCSYKSSRIHLKKLPTKGKQVIQGPGENAGVVDIGDNDAIVFKIESHNHPSYIEPYQGAATGVGGILRDVFTMGARPIALLNSIHFGSPSHPKTKSLLNGVVSGI

SEQ ID NO: 197988 - protein, 180 aa, Unknown
  Bacterial polypetide isolated from the Sargasso Sea
SVICGPGENAGIVDVGDNDSIVFKIESHNHPSYLEPFQGAATGVGGILRDIFTMGARPIAILDSLRFGDIKDKKQRYLLNGVVSGISNYGNCMGIPTVGGECYFNNDYNKNILVNAMAVGLAKRNKLFFSKAAGINNPVIYVGAKTGKDGIHGATMASAEFDDNSKQKKPTVQVGDPFTE

SEQ ID NO: 197989 - protein, 144 aa, Unknown
  Bacterial polypetide isolated from the Sargasso Sea
MNSTVIVFPGSNCDRDIAVALEKLNFKNKMVWHKDTTLPKSDLIVIPGGFSYGDYLRSGAMAAKSNILKEVVRFANNGCLILGVCNGFQILIEAGLLPGALLRNKELKFLSKNIFVKILDNKNKFCNKYKKNQVINLNIAHNEE

SEQ ID NO: 197990 - protein, 224 aa, Unknown
  Bacterial polypetide isolated from the Sargasso Sea
DGIHGASMASASFDEKIEEKKPTVQVGDPFTEKLLLEACLELMAGDSIIAIQDMGAAGLTSSSIEMASKGNLGIEINLNKVPCREAKMTPYEIMLSESQERMLIVLEKGKEEDAKKIFEKWNLDFAVIGKTTNSKKIELYFDQEKVADIPINILVENSPMYDRRWKKAKLPKKNKIKKEDIKHLKIIDTLKKILANPNVCSKEWIWQQYDHTVMGDTIQKPGGD

SEQ ID NO: 197991 - protein, 155 aa, Unknown
  Bacterial polypetide isolated from the Sargasso Sea
MGLSKKEYDLILHLLGRNPNDTELGIFSVMWSEHCSYKSSKKWLKKLPVEGSHVIQGPGENAGVVDIGDGLAVVFKIESHNHPSFIEPFQGAATGVGGILRDVFTMGARPIANLNALRFGSIENEKTRHLLGGVVAGIGGYGNCVGVPTSWRRDQ

SEQ ID NO: 197992 - protein, 127 aa, Unknown
  Bacterial polypetide isolated from the Sargasso Sea
RNANLKFICRDITLKVEQNTNLFTSEYKSGEILTIPVAHHDGNYFADPETINFLENDERVAFRYCDSEGQITKSSNPNGSINNIAGILNREGNVLGMMPHPERLTEKLLGGIDGKPFFSAIAKAINL

SEQ ID NO: 197993 - protein, 231 aa, Unknown
  Bacterial polypetide isolated from the Sargasso Sea
MDLTGDKEFIYQQYDHHIGAKTVLGPETQGACVLSLENYLSQNDYTALVVASSCDQDYCRLDPKQGASHSVAKAARMISATGGKPLAMTDCLNYGNPEDPEVMWEFSEGIDGMSEACEQLGVPVVSGNVSLYNETDGKSIFPTPMIGMVGLHHDSRKSVSAVVKGEGTIWLLKPKNQSPFFAGSLVAKVFNIDDQGEIPKINWDAEKESQEFLQQLCKQECLISARDIGKG

SEQ ID NO: 197994 - protein, 255 aa, Unknown
  Bacterial polypetide isolated from the Sargasso Sea
LNSIHFGSTQHKKTKNLLRGVVKGIGGYGNCIGVPTIGGQTCFDESYNGNILVNAMTLGLVNKKKIFYSKAAGIGKPVIYVGSKTGRDGIHGASMASAVFDDKIEEKKPTVQVGDPFTEKLLLEACLELMADDSIISIQDMGAAGLTSSSIEMASKGKLGIELDLSKVPCREEKMTPYEIMLSESQERMLIVLENGKEENAKKIFDKWDLDFAVIGKTTTSKKIELYFDSKKVADIPIDFLAEDAPEYDRKWKKT

SEQ ID NO: 197995 - protein, 267 aa, Unknown
  Bacterial polypetide isolated from the Sargasso Sea
GLKSEEYSKIKSLLSREPNYLELGIFSAMWNEHCSYKSSKVHLSKLPTKNKNVIQGPGENAGVIDVGDDDAIVFKIESHNHPSFIEPYQGAATGVGGILRDVFTMGARPIALLNSIHFGDPNNKKTKNLLNGVVSGIGGYGNCIGIPTVAGETKFNSTYNENILVNAMAVGLANKKKIFYSKAKGINKSVVYVGSKTGRDGIHGASMASAEFDENSEEKKPTVQVGDPFTEKLLMEACLELMKKESIISIQDMGAAGLTSSSVEMAH

SEQ ID NO: 197996 - protein, 299 aa, Unknown
  Bacterial polypetide isolated from the Sargasso Sea
GQIDNVKTPHLVSGVASGIGSYGNCIGIPTVGGEVEFDSSYNGNILVNAMAVGLAHTDRIFYSAASGSGNPVIYVGAKTGRDGIHGATMASTEFNDETESRRPTVQVGDPFKGKLLMEACLELMAANAVIAIQDMGAAGLTSSSVEMASKGGLGMEIDLDLVPVRETEMSAYEIMLSESQERMLMVIDPSQAEMARQIFDKWDLDFMPIGQVTETKRLVLIKDGLVTCDIPLEPLVNNAPEYDRPHFTSRIEPQANVEETPQDVSISNALRILIGSEDLCSRKWIFEQFDSHGYGRYHY

SEQ ID NO: 197997 - protein, 302 aa, Unknown
  Bacterial polypetide isolated from the Sargasso Sea
ENAGVIDIEDNDAIVFKIESHNHPSFIEPYQGAATGVGGIMRDVFTMGARPIANLNSIHFGSPQHKKTKNLLRGVVHGIGGYGNCMGVPTIAGQTSFDSSYNGNILVNAMTLGLVKKDKIFYSKAAGLNKPVIYVGSKTGRDGIHGASMASASFDEKIEEKKPTVQVGDPFTEKLLLEACLELMAGDSIIAIQDMGAAGLTSSSIEMASKGNLGIEINLNKVPCRETKMTPYEIMLSESQERMLIVLENGKEEQAKKIFDKWNLDFAVIGKTTKSKKIELYFDEEKVANIPVNTLVENSPYV

SEQ ID NO: 197998 - protein, 218 aa, Unknown
  Bacterial polypetide isolated from the Sargasso Sea
FTVGIVVFPGSNCDRDVSWALEGCLDIRTKYLWHESSDLSDVDAIVLPGGFSYGDYLRCGAIARFSPLINALDEFVKSGKRVLGICNGFQILTESGFLPGALTANKNLNFICDDVELDIISSKGGWFNNGGEKQTIKLPIAHGEGRYHCDSDTLKKLVDDELIALRYKNNPNGSSFDIAGITNEKGNVLGLMPHPERACDETIGGTDGLFTLKSLILK

SEQ ID NO: 197999 - protein, 225 aa, Unknown
  Bacterial polypetide isolated from the Sargasso Sea
MKSSVIVFPGSNCDRDIAVALEKMQFKNKMVWHKERSLPKSDLIVIPGGFSYGDYLRSGAIAGKSEIIDEVVKVANSGCLVLGVCNGFQILTETGLLKGTLLRNKNLKFINKDVNIKVINNQTKFTKKYKSDQILKINIAHNEGNYFTDKNHLKELKEENLIAFKYCDNKGTINKDSNPNGSIENIAGIFNSRKNILGMMPHPERMIDGLISNTDGENLFSSLLN

SEQ ID NO: 198000 - protein, 293 aa, Unknown
  Bacterial polypetide isolated from the Sargasso Sea
DGIHGASMASAEFDENSEEKKPTVQVGDPFTEKLLLEACLELMKDDSIIAIQDMGAAGLTSSSVEMASKGSLGIELELDKVPCREENMTPYEMMLSESQERMLIILEDGKESHARKIFEKWDLDFVVIGKTTNTKNLIMKFKNKIEGIIPIEALASKAPIYDRKWSKKKQSKKKIELKSLKKVGLEEGLIKILSSPNHSNKSWVTSQYDQMVMCDTAQRSGSDAAVIRIHKKNKAIAVSVDSSANYCKSHPITGGKQIVCENWRNIISVGARPLAITNCLNFGNPENSEVMGE

SEQ ID NO: 198001 - protein, 103 aa, Unknown
  Bacterial polypetide isolated from the Sargasso Sea
TITKDQIESHGLKLDEYNKIKKLLGREANLLELGIFSAMWNEHCSYKSSKIHLKKLPTKNKIVIQGPGENAGVIDIGDDDAIVFKIKSHNHPSFIEPYQGAAT

SEQ ID NO: 198002 - protein, 213 aa, Unknown
  Bacterial polypetide isolated from the Sargasso Sea
YQGAATGVGGIMRDVFTMGARPIANLNSIHFGSTQHKKTKNLLRGVVHGIGGYGNCMGVPTIAGQTSFDSSYNGNILVNAMTLGLVKKDKIFYSKAAGLNKPVIYVGSKTGRDGIHGASMASASFDDKIEEKKPTVQVGDPFTEKLLLEACLELMAGDSIIAIQDMGAAGLTSSSIEMASKGNLGIEINLNKVPCRETKMTPYEIMLSESQER

SEQ ID NO: 198003 - protein, 190 aa, Unknown
  Bacterial polypetide isolated from the Sargasso Sea
MPKSDLIVLPGGFSYGDYLRCGSIAGKSKIIQSVIDFANSGGLVLGICNGFQILTETGLLKGVLQQNKNIEFICKNVFVKINNSENKFFENIDKRVLELHIAHNEGNYFCSEDELKSLEDNNQIAAYYCSSDGKVDDKSNPNGAIKNIAGIFNEKKNILGMMPHPERMIDKYLSGEDGSKFFENLIRNLK

SEQ ID NO: 198004 - protein, 111 aa, Unknown
  Bacterial polypetide isolated from the Sargasso Sea
MEVNEKIAVEHGLKPDEYQKICDLLKRVPNLTELGIFSAMWNEHCSYKSSRLHLKKLNTKGKKVIQGPGENAGVIDIGDEDAIVFKIESHNHPSFIEPYQGAATGVGGIMR

SEQ ID NO: 198005 - protein, 220 aa, Unknown
  Bacterial polypetide isolated from the Sargasso Sea
YLSLGLSDSEYQLVCELLGRKPNLTETGIYGVMWSEHCSYKTSKMQLSRFPTEGPNVLQGPGEGAGVVDLGDGWAVVFKVESHNHPSAIEPYQGAATGVGGILRDIYSMGARPVAFLNSLRFGPLSDKKDPGSPTSKRNQYLFAGVVAGIAGYGNCIGVPTVAGEVGFDSCYSGNPLVNAMCVGVIRHEDLQHGRAEGIGNPVIYVGAATGRDGIHGATF

SEQ ID NO: 198006 - protein, 286 aa, Unknown
  Bacterial polypetide isolated from the Sargasso Sea
PFTEKLLLEACPELMAGNSIIAIQDMGAAGLTSSSVEMASKGKLGIELNLNKVPCREEKMTPYEIMLSESQERMLIVLENGKEDHAKKIFDKWNLDFAVIGKTTNTKKIDLFFNNKNVASIPIDFLAEDAPVYDRKWKKTKLPQKLKFDKQQFKSLNLSDCLNKILSSPNVSDKKWIWDQYDHTVMGDTIQKPGGDAGVVRVHGTSKAVAASVDASATYCFSHPLTGGKQIVCESWRNLISVGAKPIAITNCLNFGNPEKEKNMGEFVECVEGITEASKYLDFPVV

SEQ ID NO: 198007 - protein, 121 aa, Unknown
  Bacterial polypetide isolated from the Sargasso Sea
MEVNEQIAIDHGLKPDEYKKICDLLKRVPNLTELGIFSAMWNEHCSYKSSRLHLKKLNTKGKKVIQGPGENAGIIDIGDDDAIVFKIESHNHPSFIEPYQGAATGVGGIMRDVFTMGARPI

SEQ ID NO: 198008 - protein, 279 aa, Unknown
  Bacterial polypetide isolated from the Sargasso Sea
MKGTCFPTDVTPRYCYANPYEGGKQAVAEAYRNLIASGAEPMALTDNLNFGNPENKKVMGQLVFCVKGIAEASRELNMPVVSGNVSLYNETDGKAIMPTPTIGAVGLINNYLERIPMYKTGENVLIMLGKTSGHINQSALKTEILNDRIGDAPRVNLRDEKKAGIFILKCNKLGLIEAAHDLSDGGLILAAAEMAISGNVGLHLYSSDISLCFAEDQSRYLLACTQENLNKIYQLAAESEINIEEIGVTGGEFFMVGREKICLQTLKEAYATGLTKLIN

SEQ ID NO: 198009 - protein, 282 aa, Unknown
  Bacterial polypetide isolated from the Sargasso Sea
MALGLLETNKIPFVLGAKNIGSPVLYVGNTTGRDGVGGASFASSELTANSLDDRPAVQVGDPFIEKSLIEACLDAFKTGDVIAAQDMGAAGLTCSSAEMAANGNLGISIDLDLVPSREDDMSPYQYLLSESQERMLFVVKEEKVNDLIEKFNKWGLFANVIGQVIGTNEVVISHKGEIVAQIPTSALSDDTPVNFHNVMTNPPDHLLKKWEWKENDLPEIHEQKIFSLKENKNFSYSEIILKLLSNPSIASKRWIYKQYDSQVQSNTVFKPGKSDAAVIRLR

SEQ ID NO: 198010 - protein, 318 aa, Unknown
  Bacterial polypetide isolated from the Sargasso Sea
WIKPKKVKDLKRIIFPKKNKLKEVILKLLKSPNLTSKKWIWEQYDHMVMCDTIKPPSYGAAIIRVHGTEKSLAITTDCNSNYCKHDPFIGTEHAVSEARRNIISTGATPLAITNNLNFGNPEDKSIMGQFVMSVKGMINSCKKYSLPVISGNVSLYNETNGIGISPTPVIGMVGLLKNKNYVDNILLKENDKIYLIGKKTNNISCSNFLEIIYQKNNKNLGPPPKVNYNEEINNGNFVTNLFKNKLIKCCNDISSGGLITSLLKMLINKKFGAEINKNFVNKNISNETFYKLLFGENSGNYVVVTNNEVEIKEAAKKN

SEQ ID NO: 198011 - protein, 224 aa, Unknown
  Bacterial polypetide isolated from the Sargasso Sea
MNEPGITKELIELHGLKSDEYDLILTIINREPTFTELGIFSAMWNEHCSYKSSKKWLRTLPTEGPQVICGPGENAGIIDIGDNQALVFKMESHNHPSYIEPYQGAATGVGGILRDVFTMGARPIAVMNSLSFGDINHYKTNQLVNGVVSGIGGYGNCFGVPTVGGETRFDSSYNGNCLVNAFAAGLVDKDKIFYSAASGIGMPVVYLGAKTGRDGVGGATMASA

SEQ ID NO: 198012 - protein, 197 aa, Unknown
  Bacterial polypetide isolated from the Sargasso Sea
VWHDEINLPKSDLIVLPGGFSYGDYLRCGSIAGKSRIIKSVIDFANSGGLVLGICNGFQILTETGLLPGVLQQNKNLEFICKNVFIKISDLNNKYFKDIKKEILELHIAHNEGNYFCSSDELKSIQDNSQIAVKYCDKNGKTSEDSNPNGALNNIAGIFNKKKNILGMMPHPERMIDKYLSGEDGSLFFKNLLGNLK

SEQ ID NO: 198013 - protein, 201 aa, Unknown
  Bacterial polypetide isolated from the Sargasso Sea
IFSAMFSEHCSYKSSKKWLKTMPTKAKHVIQGPGENAGVIDIGNNLAAVFKIESHNHPSFIEPYQGAATGVGGILRDVFTMGARPIALLNALRFGSPSELLTKHHVSGVVKGIGGYGNCIGIPTVGGETNFDKSYDGNILVNAMAVGLANKNRIFYSAATGAGNPVIYVGAKTGRDGIHGATMASTEFTDNSSEKRPTVQV

SEQ ID NO: 198014 - protein, 275 aa, Unknown
  Bacterial polypetide isolated from the Sargasso Sea
MNVNEQVAIDHGLKKEEYAKICKLLKRTPNITELGIFSAMWNEHCSYKSSRLHLKKLPTKGKHVIQGPGENAGVVDIGDNDAIVFKIESHNHPSFIEPYQGAATGVGGIMRDVFTMGARPIANLNSIHFGSPQHKKTKNLLRGVVHGIGGYGNCMGVPTIAGQTNFDSSYNGNILVNAMTLGLVKKDKIFYSKAAGLNKPVIYVGSKTGRDGIHGASMASANFDEKIEEKKPTVQVGDPFTEKLLLEACLELMAGDSIIAIQDMGAAGLTSSSIE

SEQ ID NO: 198015 - protein, 275 aa, Unknown
  Bacterial polypetide isolated from the Sargasso Sea
KGKKVIQGPGENAGVIDIGDDDAIVFKIESHNHPSFIEPYQGAATGVGGIMRDVFTMGARPIANLNSIHFGSTQHKKTKNLLRGVVKGIGGYGNCIGVPTIAGQTCFDQSYNGNILVNAMTLGLVNKNKIFYSKAAGINKPVIYVGSKTGRDGIHGASMASAIFDDKIEEKKPTVQVGDPFTEKLLLEACLELMSDKSIIAIQDMGAAGLTSSSIEMASKGNLGIELSLDKVPCREEKMTPYEIMLSESQERMLIVLENGKEDSAKKIFDKWNLD

SEQ ID NO: 198016 - protein, 281 aa, Unknown
  Bacterial polypetide isolated from the Sargasso Sea
IEPYQGAATGVGGIMRDVFTMGARPIANLNSIHFGSPDHEKTRNLLRGVVKGIGGYGNCIGVPTIAGQTCFDESYNGNILVNAMTIGLVNKNKIFFSKAAGINKPVIYVGSKTGRDGIHGASMASAIFDDKIEEKKPTVQVGDPFTEKLLLEACLELMAGKSIISIQDMGAAGLTSSSIEMASKGDLGIEIDLTKVPCREENMTPYEIMLSESQERMLIVLEEGKESEAKKIFDKWNLDFAVIGKTTDSKKIELFYENEKVAEIPINFLAENAPMYDREWA

SEQ ID NO: 198017 - protein, 189 aa, Unknown
  Bacterial polypetide isolated from the Sargasso Sea
IPKSDLIVLPGGFSYGDYLRCGSIAGKSRIIKSVIDFANSGGLVLGICNGFQILTETGLLPGILQQNKYLNFICKNVFVKIKNKENKYFKNIKKEVLELHIAHNEGNYFCSNDELKSIEDNGQIAVTYCDDKGNDNENNNPNGAIQNIAGIFNKDKNILGMMPHPERMIDPFLSGEDGSLFFENLIGSM

SEQ ID NO: 198018 - protein, 252 aa, Unknown
  Bacterial polypetide isolated from the Sargasso Sea
MEVNEKIAIEHGLKKEEFKKICNLLNRNPNITELGIFSAMWNEHCSYKSSKIHLKKLNTKGKKVIQGPGENAGVIDIGDDDAIVFKIESHNHPSFIEPYQGAATGVGGIMRDVFTMGARPIANLNSIHFGSPQHKKTKNLLRGVVQGIGGYGNCIGVPTVAGQTCFDECYNGNILVNAMTVGLVNKNKIFYSKAAGINKPVIYVGSKTGRDGIHGASMASTIFDEKIEEKKPTVQVGDPFTEKLLLEACLEL

SEQ ID NO: 198019 - protein, 301 aa, Unknown
  Bacterial polypetide isolated from the Sargasso Sea
KLVGNLPIKPLADSSPEYDRPSEKPKLKKKRRNQKNLSIEEALIKIISSPNHSSKEWVYNQYDRSVMCDTILSSEQGDAAVVRVHNSNKAISITCDCNPVFCESDPLLGAAIGVAESWRNLIASGAEPIAITDNLNFGNPEKKEIMYQIKQSIKGIKIACEALNYPVVSGNVSLYNETKKKSIFPTPVIGGVGLIKNINHAKGFRINERDKIYLVGESSGHLELSEYNRMCNNFDGCPPSLNLKKELKNGLFVQKFIQKYNNIVSGCHDISDGGIILALAELAIRNKKGLRIQSKKSLKDL

SEQ ID NO: 198020 - protein, 227 aa, Unknown
  Bacterial polypetide isolated from the Sargasso Sea
MKSSVITFPGSNCDRDMDVALTKFGFKNKMVWHNDQELPKSDLIVLPGGFSYGDYLRCGSMASKSKIMNSVINFAKSGGLVMGICNGFQILVEAGLVPGVLLRNKYLQFICKNVHVKVDNKENTFFKNLDKKVLEFHIAHNEGNYFCTNDQLKEIEDNNQIAIYYCDQNGNTNDQINPNGSIKNIAGIFNKEKNVLGMMPHPERMIDESLSGEDGSIFFKNLLNNIK

SEQ ID NO: 198021 - protein, 252 aa, Unknown
  Bacterial polypetide isolated from the Sargasso Sea
MEVNEKIAIDHGLKKEEFKKICDLLKRTPNITELGIFSAMWNEHCSYKSSRKHLKNLHTKGKKVIQGPGENAGIIDIGDDDAIVFKIESHNHPSFIEPYQGAATGVGGIMRDVFTMGARPIANLNSIHFGSPQHKKTKNLLRGVVKGIGGYGNCIGVPTIAGQTSFDESYNGNILVNAMTLGLVNKKKIFYSKAAGIDKSVIYVGSKTGRDGIHGASMASAIFDDKIEEKKPTVQVGDPFTEKLLLEACFGV

SEQ ID NO: 198022 - protein, 233 aa, Unknown
  Bacterial polypetide isolated from the Sargasso Sea
MIKDKIFYSAASGIGMPVVYLGAKTGRDGVGGATMASAEFDDTIEEKRPTVQVGDPFTEKRLMEACLELMATGAVISIQDMGAAGLTCSAVEMGDKGDLGISLDLEKVPTREPNMSAYEMMLSESQERMLMVLDPKKENIAKTIFDKWDLDFAIVGETISEDRFLIKLDGIVKADLPLKALAGNAPEYDRPWIEAQPSNELKDVVEINAIDGLKALISSVNYCSKGWIYEQYD

SEQ ID NO: 198023 - protein, 256 aa, Unknown
  Bacterial polypetide isolated from the Sargasso Sea
TKFNSTYNENILVNAMAVGLVNKKKIFYSKAKGINKAVVYVGSKTGRDGIHGASMASAEFDENSGDKKPTVQVGDPFTEKLLMEACLELMKKDSIISIQDMGAAGLTSSSVEMAYKGGLGIELDLDKIPCREENMSPYEMMLSESQERMLIILEDGKENEARQIFKKWDLDFVVIGKTTDTKNLSLKFKNEVVASIPIGALSSKAPLYDRKWVKKKLDKKKINIKEHKKIKFDKAFFELISSPNHSNKKWVTEQYD

SEQ ID NO: 198024 - protein, 299 aa, Unknown
  Bacterial polypetide isolated from the Sargasso Sea
YKSSRLHLKNLPTKGKKVIQGPGENAGVIDIGDDDAIVFKIESHNHPSFIEPYQGAATGVGGIMRDVFTMGARPIANLNSIHFGSPQHKKTKNLLRGVVQGIGGYGNCIGVPTVGGQTCFDESYNGNILVNAMTLGLVKKNKIFYSKAAGINKPVIYVGSKTGRDGIHGASMASAVFDEKIEEKKPTVQVGDPFTEKLLLEACLELMAGDSIISIQDMGAAGLTSSSIEMASKGKLGIELNLNKVPCRESNMTPYEIMLSESQERMLIVLEKGKENQAKKIFDKWNLDFSVIGKTTNTK

SEQ ID NO: 198025 - protein, 250 aa, Unknown
  Bacterial polypetide isolated from the Sargasso Sea
GVGGILRDIFTMGARPIAVLNSLRFGNLDRSSNVDLLRGVVSGIAHYGNCVGVPTVGGEIDFDDSYSGNPLVNVMALGLLETNEIVCSGAKNIGSPVLYVGNTTGRDGVGGASFASSELTSTSLDDRPAVQVGDPFIEKSLIEACLDAFKTGDVIAAQDMGAAGLTCSSAEMAANGKLGISIDLDLVPSREDDMSSYQYLLSESQERMLFVVKEEKINDLVEKFNKWGLYASVIGEVIGTNEVIISHKGK

SEQ ID NO: 198026 - protein, 158 aa, Unknown
  Bacterial polypetide isolated from the Sargasso Sea
MVNEKIAIEHGLKKKEYSKICDLLKRTPNITELGIFSAMWNEHCSYKSSKIHLKNLPTNNDKVIQGPGENAGIIDINDNDAIVFKIESHNHPSFIEPYQGAATGVGGIMRDVFTMGARPIANLNSIHFGSPEHKKTRNLLRGVVRGIGGYGNCMGIPT

SEQ ID NO: 198027 - protein, 295 aa, Unknown
  Bacterial polypetide isolated from the Sargasso Sea
MPFDVAAALRQEGLTEDDYLEIQRRLGRDPNRAELGMFGVMWSEHCCYRNSRPLLSGFPTEGPRILVGPGENAGVVDLGDGHRLAFKIESHNHPSAVEPFQGAATGVGGILRDIFTMGARPIALLNALRFGPLEETSTRGLVEGVVAGIAHYGNCVGVPTVGGEVAFDASYSGNPLVNAMALGLMETDDIVKSGASGVGNPVVYVGSTTGRDGMGGASFASAELSAASLDDRPAVQVGDPFLEKGLIEACLEAFQSGDVVAAQDMGAAGLTCSCSEMAAKGDVGVELDLDKVPAR

SEQ ID NO: 198028 - protein, 280 aa, Unknown
  Bacterial polypetide isolated from the Sargasso Sea
LVGPGENAGVIDVGNNQKLVFKIESHNHPSAIEPFQGAATGVGGILRDIFTMGARPIAVLNSLRFGNIDKLSNVNLLQGVVSGIAHYGNCVGVPTVGGEIDFDDSYSGNPLVNVMALGLLETDEIVCSGAKNVGSPVLYVGNTTGRDGVGGASFASSELTTTSLDDRPAVQVGDPFIEKSLIEACLDAFKTGDVIAAQDMGAAGLTCSSAEMAANGNLGISIDLDLVPSREDNMSSYQYLLSESQERMLFVVKEEKVNNLIEKFNKWGLNANVIGEVIEA

SEQ ID NO: 198029 - protein, 216 aa, Unknown
  Bacterial polypetide isolated from the Sargasso Sea
NCDRDMDVALKKFGFKNKMVWHDDEKLPESDLIVLPGGFSYGDYLRCGSIAGKSKIIKSVIDFAKKGGLVLGVCNGFQILTETGLLPGVLQQNKNIEFICKNVFVKVNNKNNKYFKRIDKDILKLHIAHNEGNFFCTDDELKMLKDNNLIAVSYCNDKGEINEKSNPNGALQNIAGIFNKEKNILGMMPHPERMIDKYLSGEDGSIFFKNLINNLK

SEQ ID NO: 198030 - protein, 162 aa, Unknown
  Bacterial polypetide isolated from the Sargasso Sea
MWNEHCSYKSSRLHLKKLPTKGKKVIQGPGENAGVIDIEDGDAIVFKIESHNHPSFIEPYQGAATGVGGIMRDVFTMGARPIANLNSIHFGSPQHKKTKNLLRGVVHGIGGYGNCMGVPTIAGQTSFDSSYNGNILVNAMTLGLVKKNKIFYSKATGLNKPV

SEQ ID NO: 198031 - protein, 269 aa, Unknown
  Bacterial polypetide isolated from the Sargasso Sea
TEKLLLEACLELMTDNSIIAIQDMGAAGLTSSSVEMASKGKLGIEINLNKIPCREEKMTPYEIMLSESQERMLIVLQNGKEDHAKKIFDKWNLDFAIIGKTTNSKKIELIFENNKVAEIPINLLAENAPIYDRKWKKTKLPQKLKFKKDEFKSLNLSDCLKKILINPNISDKQWVWNQYDHTVMGDTIQKPGGDAGVIRVHGTKKAVAASVDSSASYCYSHPFTGGKQIVCESWRNLISVGAKPVAITNCLNFGNPEKEKNMGEFVECV

SEQ ID NO: 198032 - protein, 172 aa, Unknown
  Bacterial polypetide isolated from the Sargasso Sea
MQVTEKLAIEHGLKKEEFSKICDLLKRIPNLTELAIFSAMWNEHCSYKSSRKHLKKLHTKGKQVIQGPGENAGIVDIGDDDAIVFKIESHNHPSFIEPYQGAATGVGGIMRDVFTMGARPIANLNSIHFGSPQNKKTRNLLRGVVKGIGGYGNCIGVPTIAGQTSFDESYNG

SEQ ID NO: 198033 - protein, 274 aa, Unknown
  Bacterial polypetide isolated from the Sargasso Sea
DSSYNGNILVNAMTLGLVKKNKIFYSKAAGLNKPVIYVGSKTGRDGIHGASMASASFDDKIEEKKPTVQVGDPFTEKLLLEACLELMAGDSIIAIQDMGAAGLTSSSIEMASKGNLGIEINLNKVPCRETKMSPYEIMLSESQERMLIVLENGKEDLAKKIFDKWNLDFAVIGKTTNSKSIELFFDNEQIANIPVNTLVENSPMYDRKWKKAKLPKKNKIKKEVINKFKIKDILKKILSSPNVCSKEWIWQQYDHTVMGDTIQKPGGDSGVVKI

SEQ ID NO: 198034 - protein, 138 aa, Unknown
  Bacterial polypetide isolated from the Sargasso Sea
RVLGICNGFQVLTELGLLPGALTRNRDLHFICEDAPLKVVSQRSAWMQGYSDGGGTLTLPIAHGEGRYQCSDDTLKKLQDEDAIALSYGNNPNGSVADIAGITNPSGNVLGLMPHPERACDPATGGTDGRCMLEALLG

SEQ ID NO: 198035 - protein, 183 aa, Unknown
  Bacterial polypetide isolated from the Sargasso Sea
LPGGFSYGDYLRAGCMAAKSPIMQEVIKRATKGVPVLGVCNGFQILTESGILPGALMRNAALKYVCRDVHLKIAVNDTVFTDQYTPNQLIRIPIAHHDGNYFADDETLMELEDTGRVAFYYCDETGAVTDAANPNGSRLGIAGIYNKCKTVLGMMPHPERLADSELGGADGRPMFEGLVQALS

SEQ ID NO: 198036 - protein, 272 aa, Unknown
  Bacterial polypetide isolated from the Sargasso Sea
VGKVTSSGTLRIVDEFDGEVLGEVPASSLHEDAPLYERPMAQPDKLADQEMQSATPEGIEKDLIDMLMSPQWATSQYDSQLFLNTVVGPGSDAAVLRLKHPTSGADTGRGMALTTDGNHRWCAVNPRIGAAMTVAESVLNLACVGAVPQALVNCLNFGNPENPAVMWQLSEAVDGMAEACTAFELPVVGGNVSLYNESQGKNIDPTPIVGVIGLIDDLAKPPPGLAWNDGDRIILLGPEARALDGSAWAFKNGYKGGSLEPIDFDLHRQVCA

SEQ ID NO: 198037 - protein, 229 aa, Unknown
  Bacterial polypetide isolated from the Sargasso Sea
KVAVITFPGSNCDYDLFKAAQQVGGDAKFIWHRERGLKNYDAVLLPGGFSYGDYLRAGAIARMSPIMEDVIAFAKTGRPVLGICNGFQILCESGLLPGALMHNISLKFESKDVMLRVDRTDTMFTKDYKTGQVLRIPIAHGEGNYGADNETLKALEDQGRVVFRYVDRDGELSDEANPNGSWNNIAGITNATGNVLGMMPHPERAMEKLLGSTDGLALFTSMVGSMQPS

SEQ ID NO: 198038 - protein, 224 aa, Unknown
  Bacterial polypetide isolated from the Sargasso Sea
IVFPGSNCDRDMQVALRNAMDSEPVMVWHGDSEMPDVDLITVPGGFSYGDYLRAGCMAAKSPIMKEVVNRATKGVPVLGVCNGFQVLTESGLLPGALMRNAALKYVCRDVHLKVAANDTVFTSQYRPDQLIRIPIAHHDGNYFADDETLKKLEDTDRVAFHYCDETGAVTDAANPNGSQLGIAGIYNKRKTVLGMMPHPERLADAELGGTDGQSMFKGLVQALS

SEQ ID NO: 198039 - protein, 273 aa, Unknown
  Bacterial polypetide isolated from the Sargasso Sea
GSTQHKKTKNLLRGVVKGIGGYGNCIGVPTIGGQTCFDSSYNGNILVNAMTLGLVNKNKIFYSKAAGLNKPVIYVGSKTGRDGIHGASMASAIFDDKIEEKKPTVQVGDPFTEKLLLEACLELMSDDSIIAIQDMGAAGLTSSSVEMASKGNLGIELVLDKVPCREEKMTPYEIMLSESQERMLIILENGKEEKAKKIFNKWNLDFSIIGKTTDSKKIEIYYKESKVADIPIDFLSEKAPEYDRKWKKTKIPQKIKFEKKIFKPFKLFDCLKK

SEQ ID NO: 198040 - protein, 257 aa, Unknown
  Bacterial polypetide isolated from the Sargasso Sea
GSTQHKKTKSLLRGVVRGIGGYGNCIGVPTIAGQTTFDSSYNGNILVNAMTLGLVKKNKIFYSKAAGINKSVIYVGSKTGRDGIHGASMASAVFDDKIEEKKPTVQVGDPFTEKLLLEACLELMADNSIIAIQDMGAAGLTSSSVEMASKGNLGIKLDLSKVPCREKGMTPYEIMLSESQERMLIVLETGKEDKAKKIFDKWNLDFSIIGKTTNSKNIEIYYEKKKYADIPVTFLTENAPMYERKWKKRKLPQKIKF

SEQ ID NO: 198041 - protein, 203 aa, Unknown
  Bacterial polypetide isolated from the Sargasso Sea
MSISNWKYNTEQSLVENHGLKHDEFESIVEGLGREPNLTELGIFSAMWNEHCSYKSSKYWLKKLPTSGDRVVQGPGENAGVIDIDDGDVAVFKMESHNHPSFIEPYQGAATGVGGILRDVFTMGARPVANLNALRFGEIDHPKTKHLLSGVVEGIGGYGNCIGIPTVGGEVNFHPSYNGNILVNAMTIGIAKKDKIFYSAAAG

SEQ ID NO: 198042 - protein, 208 aa, Unknown
  Bacterial polypetide isolated from the Sargasso Sea
ALKKFGFKNQMVWHNDKSIPKCDLIVLPGGFSYGDYLRCGSIASKSKIINSVIDFANSGGLVIGICNGFQILTEAGLLPGILQQNKYLNFICKNVFIKVKDKKNKYFKNIEKDILELHIAHNEGNYFCSDAEYKSMEDNSQIAVTYCDSKGIENDENNPNGALKNIAGIFNKNKNVLGMMPHPERMIDKYLSGEDGSLFFENLLRNLK

SEQ ID NO: 198043 - protein, 287 aa, Unknown
  Bacterial polypetide isolated from the Sargasso Sea
AGQTCFDESYNGNILVNAMTLGLVNKNKIFYSKAAGINKPVIYVGSKTGRDGIHGASMASAIFDDKIEEKKPTVQVGDPFTEKLLLEACLELMAGKSIISIQDMGAAGLTSSSIEMASKGDLGIEIDLTKVPCREENMTPYEIMLSESQERMLIVLEEGKENEAKKIFDKWNLDFAVIGKTTNSKNIELFFKNEKVAEIPIDFLAENAPMYDRKWIKAKLPKENNFSKEQFKSLKLGHCLKKILIDPNIADKGWIWDQYDHTVMGDTIQKPGGNAGVVRVHGTNKAV

SEQ ID NO: 198044 - protein, 290 aa, Unknown
  Bacterial polypetide isolated from the Sargasso Sea
EDDAIVFKIESHNHPSFIEPYQGAATGVGGILRDVFTMGARPIALMNSIHFGSPKNNKTRNLLNGVVSGIGGYGNSVGIPTVGGETKFNDTYNENILVNAMAIGLADKNKIFYSKAKGLNKAVVYVGSKTGRDGIHGATMASAEFDENSEEKKPTVQVGDPFTEKLLLEACLELMKDNSIISIQDMGAAGLTSSSIEMASKGKLGIELDLNKVPCRENNMTPYEMMLSESQERMLLILNDNKEEEAKKIFDKWDLDFVVIGKTTDSNRLILNFNNKKVADIPIPALADKA

SEQ ID NO: 198045 - protein, 278 aa, Unknown
  Bacterial polypetide isolated from the Sargasso Sea
YKKIKELLGRDSNLLELGIFSAMWNEHCSYKSSKIHLKKLPTKNNIVIQGPGENAGVIDIGDDDAIVFKIESHNHPSFIEPYQGAATGVGGILRDVFTMGARPIALMNSIHFGSPENKKTQNLLSGVVSGIGGYGNSVGIPTVGGETKFNSTYNENILVNAMAIGHANKNKIFYSKAKGINKPVVYVGSKTGRDGIHGATMASAEFDENSEEKKPTVQVGDPFTEKLLLEACLELMKDNSIISIQDMGAAGLTSSSVEMASKGKLGIELNLNKIPCRK

SEQ ID NO: 198046 - protein, 295 aa, Unknown
  Bacterial polypetide isolated from the Sargasso Sea
LSLGLSDSEYQLVCELLGRKPNLTETGIYGVMWSEHCSYKTSKMQLSRFPTEGPNVLQGPGEGAGVVDLGDGWAVVFKVESHNHPSAIEPYQGAATGVGGILRDIYSMGARPVAFLNSLRFGPLSDKKDSGSPNSKRNQYLFGGVVAGIAGYGNCIGVPTVAGEVGFDTCYSGNPLVNAMCVGVIRHEDLQHGRAEGIGNPVIYVGAATGRDGIHGATFASEELNEKSEAKRPSVQVGDPFMGKLVLEACLELFQSGAVISVQDMGAAGLTCSSTEMAEKGGNGMELDLDLVPQR

SEQ ID NO: 198047 - protein, 270 aa, Unknown
  Bacterial polypetide isolated from the Sargasso Sea
RKHLKKMHTKGKQVIQGPGENAGVIDIGDDDAIVFKIESHNHPSFIEPYQGAATGVGGIMRDVFTMGARPIANLNSIHFGSPQHKKTRNLLRGVVKGIGGYGNCIGVPTIAGQTTFDESYNGNILVNAMTLGLVNKNKIFYSKAAGLDKPVIYVGSKTGRDGIHGASMASATFDDKIEEKKPTVQVGDPFTEKLLLEACLELMADNSIIAIQDMGAAGLTSSSVEMASKGNLGIELNLSEVPCREEKMSPYEIMLSESQERMLIVLKKEK

SEQ ID NO: 198048 - protein, 186 aa, Unknown
  Bacterial polypetide isolated from the Sargasso Sea
MINQENNDLYDLNEALKVENLTLKDYEEICKRLKRNPNRTELGMFGVMWSEHCCYRNSKTLLSKFPTKGKNVLVGPGENAGVIDVGNNQKLVFKIESHNHPSAIEPFQGAATGVGGILRDIFTMGARPIAVLNSLRFGNLDKSSNVDLLRGVVSGISHYGNCVGVPTVGGEIDFDDSYSGNPLVNV

SEQ ID NO: 198049 - protein, 203 aa, Unknown
  Bacterial polypetide isolated from the Sargasso Sea
MKSSVITFPGSNCDRDMDVALNKFGFKNKMVWHNDNELPKSDLVVLPGGFSYGDYLRCGSMASKSKIMQSVINFAKSGGLVMGICNGFQILVETGLVPGVLLRNKYLEFICKNVFVKINNRENPYFKNLDKDIFEFHIAHNEGNYFCTKDQIKEIEDNNQVAIYYCDNNGEIDEHINPNGSKNNIAGIFNKEKNVLGMMPHPE

SEQ ID NO: 198050 - protein, 271 aa, Unknown
  Bacterial polypetide isolated from the Sargasso Sea
DDKIEEKKPTVQVGDPFTEKLLLEACLELMEGKSIISIQDMGAAGLTSSSIEMASKGNLGIELNLNKVPCREEKMTPYEIMLSESQERMLIILENGKEAEAKKIFDKWNLDFAVIGKTTDSKKIELFFDNNKVAELPINILAENAPVYNRKWKKTKLPQKIKFNKDDYKKLKITEVLKKILGLPNISSKEWIWQQYDHTVMGDTIQKPGSDSGVVRVHGTNKAVATSVDSSAVYCYAHPLTGGKQVVCESWRNLISCGSKPIAITNCLNFG

SEQ ID NO: 198051 - protein, 155 aa, Unknown
  Bacterial polypetide isolated from the Sargasso Sea
MDEPGITKEIVELHGLNSDEYNLILSIIKRTPTFTELGIFSAMWNEHCSYKSSKKWLRTLPTEGPQVICGPGENAGIVDIGDDQALVFKMESHNHPSYIEPYQGAATGVGGILRDVFTMGARPIAVMNSLSFGNIDHCKTIQLVNGVVSGIGGYG

SEQ ID NO: 198052 - protein, 274 aa, Unknown
  Bacterial polypetide isolated from the Sargasso Sea
HANKNKIFYSKAKGVGKPVVYVCSKTGRDGIHGATMASAEFDENSEEKKPTVQVGDPFTEKLLLEACLELMKDNSIISIQDMGAAGLTSSSVEMASKGKLGIELNLNKVPCREDNMKPYEMMLSESQERMLIILDENKEVQAKKIFDKWDLDFVVIGKTTNSNRLILNFNDEKVADIPISALADKAPLYDRKWAESKVSKDKIKIKDLKKIKIEDALIKILSSPNHSNKNWITDQYDQVVMCDTIQKSGGDSAVIRIHNKNKAIAISVDSSANY

SEQ ID NO: 198053 - protein, 197 aa, Unknown
  Bacterial polypetide isolated from the Sargasso Sea
VWHDDDELPKSDLIVLPGGFSYGDYLRCGSIAGKSKIIQSVIDFANSGGLVLGICNGFQILTETGLLKGVLQQNKNIEFICKNIFVKVNNSENKFFENIDKDVLELHIAHNEGNYFCTEDELKSLEDNNQIAAYYCSSDGKVDDKSNPNGAIKNIAGIFNEKKNILGMMPHPERMIDQSLSGEDGSIFFENLLKNLK

SEQ ID NO: 198054 - protein, 98 aa, Unknown
  Bacterial polypetide isolated from the Sargasso Sea
MEVNEKIAVDHGLKPDEYKKICDLLKRVPNLTELGIFSAMWNEHCSYKSSRLHLKKLNTKGKKVIQGPGENAGVIDIGDDDAIVFKIESHNHPSFIEP

SEQ ID NO: 198055 - protein, 187 aa, Unknown
  Bacterial polypetide isolated from the Sargasso Sea
MEVTEAVAIDHGLKKEEFSKICELLKRTPNLTELAIFSAMWNEHCSYKSSRKHLKKMHTKGKQVIQGPGENAGVVDIGDDDAIVFKIESHNHPSFIEPYQGAATGVGGIMRDVFTMGARPIANLNSIHFGSPQHKKTRNLLRGVVKGIGGYGNCIGVPTIAGQTTFDEYYNGNILVNAMTLGLVNKN

SEQ ID NO: 198056 - protein, 211 aa, Unknown
  Bacterial polypetide isolated from the Sargasso Sea
MDVALKKFGFTNKMVWHDDSELPKSDLVVLPGGFSYGDYLRCGSMASKSRIMQSVINFAKSGGLVMGICNGFQILVETGLVPGVLLRNKYLEFICKNVFVKLNNKENAYFKNLNKDVLEFHIAHNEGNYFCTKDQLKEIKDNNQIAIYYCNSEGKIEDQYNPNGSIKNIAGIFNKEKNVLGMMPHPERMIDQSLSGEDGSIFFKNLIDNIK

SEQ ID NO: 198057 - protein, 249 aa, Unknown
  Bacterial polypetide isolated from the Sargasso Sea
TCSGGRPLALTNGLNFGNPEKSEIFWQLREAVTGICEACQSLELPVTGGNVSLYNETEGEAVYPTPLIGVVGLVEHPEHETTQHWKQAGDVILLLGETEEELGASALQQFMTGSIFGMPPALDLEKEKNLQEVVLEAIRQNLIASAHDLSQGGLALALLTSCKGELGVHVDWESGIRDDLALFSESQSRILLSTVPQNLLMLEKLMQSRNIPYERIGVVMPGRFDFALNGKLLIQEELPELQQLWEKAL

SEQ ID NO: 198058 - protein, 227 aa, Unknown
  Bacterial polypetide isolated from the Sargasso Sea
MNSSVIIFPGSNCDRDMDVALKKFGFKNKMVWHNDDELPNSDLIVLPGGFSYGDYLRCGSIAGKSKIIQSVIDFANSGGLVLGICNGFQILTETGLLKGVLQQNKNIEFICKNIFVKVNNSENKFFENIDKDVLELHIAHNEGNYFCTEDELKSLEDNNQIAVYYCGSDGKVDDKSNPNGAIKNIAGIFNEKKNILGMMPHPERMIDQSLSGEDGSIFFENLLKNLK

SEQ ID NO: 198059 - protein, 318 aa, Unknown
  Bacterial polypetide isolated from the Sargasso Sea
GVLKGNGGYGNCIGVPTIAGQTCFDQSYNENILVNAMTLGLVNKNKIFYSKAAGLNKPVIYVGSKTGRDGIHGASMASAIFDDKIEEKKPTVQVGDPFTEKLLLEACLELMSDKSIIAIQDMGAAGLTSSSIEMASKGNLGIELHLDKVPCREEKMTPYEIMLSESQERMLIVLENGKEDSAKKIFDKWNLDFAVIGKTTNSKNIELYFEKEKVANVPIKFLANEAPMYDRPWKKTKLPQKIKFSNSELKKLKFNDVIKKMISHPNICSKQWIWEQYDHTVMGDTIQKPGGDAGVVRVHGTNKAVASSVDSSASYCYA

SEQ ID NO: 198060 - protein, 293 aa, Unknown
  Bacterial polypetide isolated from the Sargasso Sea
MGAAGLTSSSVEMASKGSLGIELELDKVPCREENMTPYEMMLSESQERMLIILEDGKEGHARKIFNKWDLDFVIIGKTTDTNKLTLKFKNKIEGEIPLEALASKAPIYNRKWSKKKLSKKKLNLKKLKKIKIEESLIKILSSPNHSNKSWITHQYDQMVMCDTAQKSGSDAAIIRIHNKNKAIALSVDSSANYCKSHPITGGKQIVCENWRNLISVGSRPLAITNCLNFGNPENEEIMGEFAECLEGIKEACEFLKFPVVSGNVSFYNGTNKKNIYPTPVIGGVGLIHNLNKP

SEQ ID NO: 198061 - protein, 259 aa, Unknown
  Bacterial polypetide isolated from the Sargasso Sea
EEYQSIQKLLKRNPNLLELGIFSAMWNEHCSYKSSRLHLKKLPTKGKHVLQGPGENAGVIDIGDDDAIVFKIESHNHPSYIEPYQGAATGVGGILRDVFTMGARPIALLNSIHFGSPTHSKTKSLLNGVVSGIGGYGNCIGVPTVAGETKFNDTYNENILVNAMAVGHANKERIFYSKAKGLGKSVVYVGSKTGRDGIHGASMASAEFDENSEEKKPTVQVGDPFTEKLLLEACLELMKDDSIIAIQDMGAAGLTSSSV

SEQ ID NO: 198062 - protein, 221 aa, Unknown
  Bacterial polypetide isolated from the Sargasso Sea
MDIFTVGVVVFPGSNCDRDVSWALEGCLDIRTKYLWHESSDLSDIDAIVLPGGFSYGDYLRCGAIARFSPLINALDDFVKSGKRVLGICNGFQILTESGFLPGALVANKNLNFICDDVELDIVSSKGGWFNNVDEKQTIKLPIAHGEGRYHCDSDTLKKLVDNELIALRYKNNPNGSSFDIAGITNEKGNVLGLMPHPERACDETIGGTDGLFTLKSLILR

SEQ ID NO: 198063 - protein, 280 aa, Unknown
  Bacterial polypetide isolated from the Sargasso Sea
MWNEHCSYKSSRKHLKKLHTKGKQVIQGPGENAGVIDIDDNDAIVFKIESHNHPSFIEPYQGAATGVGGIMRDVFTMGARPIANLNSIHFGSPQHKKTKNLLRGVVKGIGGYGNCIGVPTIAGQTSFDESYNGNILVNAMTLGLVDKKKIFYSKAAGLDKPVIYVGSKTGRDGIHGASMASATFDDKIEEKKPTVQVGDPFTEKLLLEACLELMADNSIIAIQDMGAAGLTSSSVEMASKGSLGIELDLSKVPCREEKMTPYEIMLSESQERMLIVLESG

SEQ ID NO: 198064 - protein, 176 aa, Unknown
  Bacterial polypetide isolated from the Sargasso Sea
MNITAKIIENHGLKKEEYENIKKLLKRSPNLLELGIFSAMWNEHCSYKSSRIHLKNLPTKGKHVIQGPGENAGVVDIGDNDAIVFKIESHNHPSYIEPYQGAATGVGGILRDVFTMGARPIALLNSIHFGSPSHPKTKSLLNGVVSGIGGYGNCIGIPTVAGETKFNETYNENILV

SEQ ID NO: 198065 - protein, 204 aa, Unknown
  Bacterial polypetide isolated from the Sargasso Sea
MRNQDNNDLYDLNEVLKFENLTINDYEEICNRLKRKPNRTELGMFGVMWSEHCCYRNSKPLLSKFPTKGKNVLVGPGENAGVIDVGNNQKLVFKIESHNHPSAIEPFQGAATGVGGILRDIFTMGARPIAVLNSLRFGNIDKPSNVDLLRGVISGIAHYGNCVGVPTVGGEIYFDDSYSGNPLVNVMSLGLLETNEIVCSGAKN

SEQ ID NO: 198066 - protein, 215 aa, Unknown
  Bacterial polypetide isolated from the Sargasso Sea
MKNTRFGIVVFPGTWSDKDCYHAVTDILGNESVYIWHKETSLKDIDCLILPGGFSYGDYLRPGAIARFSPIMKEIIKFSNSGKPVIGICNGFQILCEANLLPGILLPNNVMEFRCKSTHLTVQNNKSTFTNECGNNQVLNIPISHGEGNYFADKNTVEELENTDRILFRYSSENGEISNKYNPNGSVNNIAGIINKNKNVLGMMPHPERSCEPIL

SEQ ID NO: 198067 - protein, 277 aa, Unknown
  Bacterial polypetide isolated from the Sargasso Sea
MGLVKKDKIFYSKAAGLNKPVIYVGSKTGRDGIHGASMASASFDEKIEEKKPTVQVGDPFTEKLLLEACLELMAGDSIIAIQDMGAAGLTSSSIEMASKGNLGIEIDLNKVPCRESKMTPYEIMLSESQERMLIILENGKEEKAKKIFDKWNLDFAVIGKTTKSKKIELYFNNEKVTDIPVNTLVENSPMYDRKWKKAKIPKKNKIKKEDLKNLKIIDVLKKILSNPNVCSKEWIWQQYDHTVMGDTIQKPGGDSGVVRVHGTNKAVAASVDSSAVY

SEQ ID NO: 198068 - protein, 272 aa, Unknown
  Bacterial polypetide isolated from the Sargasso Sea
KRTPNITELGVFSAMRNEHCSYKSSRRHLKKLHTKGDRVIQGPGENAGVVDIDDDDAIVFKIESHNHPSFIEPYQGAATGVGGIMRDVFTMGARPIANLNSIHFGSPNHEKTRNLLRGVVKGIGGYGNCIGVPTIAGQTCFDQSYNGNILVNAMTLGLVNKNKIFYSKAAGINKPVIYVGSKTGRDGIHGASMASAIFDDKIEEKKPTVQVGDPFTEKLLLEACLELMAGKSIISIQDMGAAGLTSSSIEMASKGNLGIEIDLTKVPCREEI

SEQ ID NO: 198069 - protein, 225 aa, Unknown
  Bacterial polypetide isolated from the Sargasso Sea
MKSSVIVFPGSNCDRDIAVALEKLQFKNSMVWHKETELPKSDLIVVPGGFSYGDYLRSGAIAAKSNILSEVINAGKKGALILGICNGFQILIECGLLQGALLRNSGLKFISKDIFVKVQSNKNKFFKKYKAGETLKLNIAHNEGNYFTDKKHLKELEDNDLIPLKYCDEKGNIDFISNPNGSINNIAGIFNKNKNILGMMPHPERMADKVLSGEDGLGLFLSLMN

SEQ ID NO: 198070 - protein, 290 aa, Unknown
  Bacterial polypetide isolated from the Sargasso Sea
VFTMGARPIALLNSIHFGSIDYPKTKSLLNGVVSGIGGYGNCIGIPTVAGETKFNGTYNENILVNAMAVGHVKKNKIFYSKAKGLNKSVVYVGSKTGRDGIHGASMASAEFDENSEEKKPTVQVGDPFTEKLLLEACLELMKDDSIIAIQDMGAAGLTSSSVEMASKGSLGIELELSKVPCREENMTPYEMMLSESQERMLIVLEDGKEHHAQKIFEKWDLDFVIIGKTNNTKNLTLKFKNEIVGEIPIEVLASKAPMYDRKWVKKKLNHKKIDIKKLKKIELEEALIKI

SEQ ID NO: 198071 - protein, 231 aa, Unknown
  Bacterial polypetide isolated from the Sargasso Sea
MEIVFGVPTIAGQTTFDESYNGNILVNAMTLGLVNKNKIFYSKAAGLDKPVIYVGSKTGRDGIHGASMASATFDDKIEEKKPTVQVGDPFTEKLLLEACLELMADNSIIAIQDMGAAGLTSSSVEMASKGNLGIELNLNEVPCREEKMTPYEIMLSESQERMLIVLEKGKEEHAKKIFDKWNLDFAVIGKTTNSKKIELTFDNKKVAEIPIDLLAENAPIYDRPWKKTKLP

SEQ ID NO: 198072 - protein, 186 aa, Unknown
  Bacterial polypetide isolated from the Sargasso Sea
PSDLIVVPGGFSYGDYLRSGAIAGKSLIINEVIKAANQGRLILGICNGFQILTETGLLEGVLLRNKNLKFINNDVNIKVLNNNTKFSNKYKKNQILKINIAHNEGNYFTNAKHLNVLNEENLIAFKYCNENGETNESSNPNGSLENIAGIYNSKKNILGMMPHPERMIDNLISNTDGENLFSSLLN

SEQ ID NO: 198073 - protein, 303 aa, Unknown
  Bacterial polypetide isolated from the Sargasso Sea
EEKKPTVQVGDPFTEKLLLEACLELMAGDSIIAIQDMGAAGLTSSSIEMASKGNLGIEINLNKVPCRESKMTPYEIMLSESQERMLIVLENGKEEQAKKIFDKWNLDFAVIGKTTKSKKIELYFDEEKVADIPVNTLVENSPMYDRKWKKTKLPKKNKIKKEDIKHLKIIDALKKILANPNVCSKEWIWQQYDHTVMGDTIQKPGGDAGVVRVHGTDKAVAASVDSSAVYCWAHPLTGGKQVVCESFRNLISVGAKPIAITNCLNFGSPENEENMGEFCECVQGIGEASEYLKFPVVSGNVSF

SEQ ID NO: 198074 - protein, 202 aa, Unknown
  Bacterial polypetide isolated from the Sargasso Sea
DVQWATEGCLGMPTRRIWHEETDLSGLDAVVLPGGFSYGDYLRCGAIARFAPALQALLDFAAQGGRVLGICNGFQVLTELGLLPGVLTRNRDLHFICEDAPLQVASSRTPWLEHYGTDRTLTLPIAHGEGRYQCSDDTLKQLQDADAIALRYQANPNGSVGDIAGITNDSGNVLGLMPHPERACDPATGGTDGRVLLQGLLS

SEQ ID NO: 198075 - protein, 281 aa, Unknown
  Bacterial polypetide isolated from the Sargasso Sea
LVRGVVRGIGGYGNCIVVPTIAGQTCFDESYNGNILVNAMTLGLVKKNKIFYSKATGIDKPVIYVGSKTGRDGIHGASMASAVFDDQIEEKKPTVQVGDPFTEKLLLEACLELMSDNSIISIQDMGAAGLTSSSIEMASKGNLGIELNLNKVPCRESNMNPYEIMLSESQERMLIVLENGKEGKAKKIFDKWNLDFAIIGKTTSSKKIEIYFDGNKVVDVPIEFLSDKAPEYDRKWKKTKLPIKNKYNKDIYKNLKILNVLKKILSNPNVCSKEWIWRQYD

SEQ ID NO: 198076 - protein, 217 aa, Unknown
  Bacterial polypetide isolated from the Sargasso Sea
MVSLSDSPGYNHLAALRQEGLKPRDWDEICRRLGRAPNRVELGMFGVMWSEHCCYRNSRPLLRGFPTEGPRILVGPGENAGVVDLGDGHRLAFKIESHNHPSAVEPFQGAATGVGGILRDIFTMGARPIALLNALRFGPLEDSVNVGLMEGVVAGIAHYGNCVGVPTVGGEVVFDPSYSGNPLVNAMALGLMETEEIVCSGAAGLANPVVYVGSTTG

SEQ ID NO: 198077 - protein, 132 aa, Unknown
  Bacterial polypetide isolated from the Sargasso Sea
YKTSKKWLKKLPTDNEIVIQGPGENAGVIDLQDNDGIAFKIESHNHPSYIEPFNGSATGVGGILRDIFTMGARPIATLDSIRFGLIETEKTKYLLNGVVHGIGQYGNCIGIPNIGGECEFESTYDFNNLVNA

SEQ ID NO: 198078 - protein, 258 aa, Unknown
  Bacterial polypetide isolated from the Sargasso Sea
MINFFDKDKYDVNESLKVENLTSNDYEEICKRLGRKPNRTELGMFGVMWSEHCCYRNSKPLLANFPITGKNVLVGPGENAGVIDVGNNQKLVFKIESHNHPSAIEPFQGAATGVGGILRDIFTMGARPIAVLNSLRFGNLDKSSNISLLRGVVAGISHYGNCVGVPTVGGEIDFDDSYSGNPLVNVMALGLLETDEIVCSGAKEVGSPVLYVGNTTGKDGVGGASFASSELTTNSLDNRPAVQVGDPFIEKSLIEACL

SEQ ID NO: 198079 - protein, 304 aa, Unknown
  Bacterial polypetide isolated from the Sargasso Sea
YGNCVGVPTVGGECEFHSSYDGNILVNAMTVGLVDTDKIFYSTASGVGNSVVYVGSKTGRDGIHGATMASSEFNEDSEEKRPTVQVGDPFTEKLLIEACLELMSTDAIVSIQDMGAAGLTSSSVEMSSKGAVGIELNLDQIPVRETGMTPYEIMLSESQERMLMVLNPGAEERAKKIFDKWELDFAIIGQVIEEQRLVLRDNGHIVADIPVPPLVSEAPEYDRPCSSPPRPMPFPENLPDLETPINDALLTLLGSPNLCSKRWIWEQYDHMVMADTVQRPGGDAAVVRIHGSNKAVAMTSDCTP

SEQ ID NO: 198080 - protein, 188 aa, Unknown
  Bacterial polypetide isolated from the Sargasso Sea
MDDFTVGVVVFPGSNCDRDVSWALEGCLDIRTKYLWHESSDLSDVDAIVLPGGFSYGDYLRCGAIARFSPLINALDEFVKSGKRVLGICNGFQILTESGFLPGALVANKNLNFICDDVELDIVSSKGGWFNNGDEKQTIKLPIAHGEGRYHCDSDTLKKLVDNELIALRYKNNPNGSSFDIAGITKKR

SEQ ID NO: 198081 - protein, 160 aa, Unknown
  Bacterial polypetide isolated from the Sargasso Sea
MKVTESVAIDHGLKKEEFKKICELLNRVPNITELAIFSAMWNEHCSYKSSRIHLKKLHTSGKQVIQGPGENAGIVDIGDNEAIVFKIESHNHPSFIEPYQGAATGVGGIMRDVFTMGARPIANLNSIHFGSPQHKKTKNLLRGAVKGIGGYGNCIGVPTI

SEQ ID NO: 198082 - protein, 293 aa, Unknown
  Bacterial polypetide isolated from the Sargasso Sea
VVSGIGGYGNCIGIPTVAGETKFNSTYNENILVNAMAVGLANKKKIFYSKAKGLNKAVVYVGSKTGRDGIHGASMASAEFDENSEDKKPTVQVGDPFTEKLLMEACLELMQKESIISIQDMGAAGLTSSSVEMAHKGNLGIELNLDKIPCREENMSPYEMMLSESQERMLIILEDGKEDEARAIFKKWDLDFVIIGKTTETKNLSLRFKTKIVATIPIDALSSKAPLYDRKWSKKNLSKKKTNIKDLKKINFDEAFFKILSSPNHSNKRWVTEQYDQMVMGDTIERSGANAAI

SEQ ID NO: 198083 - protein, 297 aa, Unknown
  Bacterial polypetide isolated from the Sargasso Sea
NSTYNENILVNAMAVGHAKKNKIFYSKAKGLNKSVVYVGSKTGRDGIHGASMASAEFDENSEEKKPTVQVGDPFTEKLLMEACLELMKDNSIISIQDMGAAGLTSSSVEMASKGELGIELYLDKVPCREENMTPYEMMLSESQERMLIILEDGKEKHAEEIFKKWDLDFVIIGKTTNTNKLTLKYKNKVEGEIPLDALSSKAPMYDRKWIKKKLTKSKIDTKKLKNIKIEDALIKILSSANHSNKSWITNQYDQMVMCDTAQRSGSDAAIIRIHNKEKAIAVSVDSSSNYCKAHPLT

SEQ ID NO: 198084 - protein, 156 aa, Unknown
  Bacterial polypetide isolated from the Sargasso Sea
MEVTEAVAIDHGLKKEEFSKICELLKRIPNLTELAIFSAMWNEHCSYKSSRKHLKKMHTKGKQVIQGPGENAGVIDIGDDDAIVFKIESHNHPSFIEPYQGAATGVGGIMRDVFTMGARPIANLNSIHFGSPQHKKTRNLLRGVVKGIGGYGNCIG

SEQ ID NO: 198085 - protein, 285 aa, Unknown
  Bacterial polypetide isolated from the Sargasso Sea
GKKVIQGPGENAGVIDIGDDDAIVFKIESHNHPSFIEPYQGAATGVGGIMRDVFTMGARPIANLNSIHFGSTQHKKTKNLLRGVVKGIGGYGNCIGVPTIAGQTCFDQSYNGNILVNAMTLGLVNKNKIFYSKAAGINKPVIYVGSKTGRDGIHGASMASAIFDDKIEEKKPTVQVGDPFTEKLLLEACLELMSDKSIIAIQDMGAAGLTSSSIEMASKGNLGIELYLDKVPCREDKMTPYEIMLSESQERMLIVLENGKEDSAKKIFDKWNLDFAIIGKTTNSK

SEQ ID NO: 198086 - protein, 301 aa, Unknown
  Bacterial polypetide isolated from the Sargasso Sea
TGRDGIHGASMASAIFDDKIEEKKPTVQVGDPFTEKLLLEACLELMAGKSIISIQDMGAAGLTSSSIEMASKGNLGIELNLNKVPCREEKMSPYEIMLSESQERMLIVLESGKEAEAKKIFDKWNLDFAVIGKTTDSKKIELFFDNKKVAEVPINILAENAPIYDRKWKKTKLPQKIKFNKDDFKKLNITEVLKKILSLPNISSKEWIWEQYDHTVMGDTIQKPGSDSGVIRVHGTNKAVATSVDSSAIYCYAHPLTGGKQVVCESWRNLISCGAIPIAITNCLNFGNPEKEKNMGEFVEC

SEQ ID NO: 198087 - protein, 195 aa, Unknown
  Bacterial polypetide isolated from the Sargasso Sea
WHNDSEIPKSDLIVLPGGFSYGDYLRCGSIAGKSRIIKSVIDFANSGGLVLGICNGFQILTETGLLPGILQQNKYLNFICKNVFVKIKNKENKYFKNIKKEVLELHIAHNEGNYFCSNDELKSIEDNGQIAVTYCDDKGNDNEHNNPNGAIKNIAGIFNKDKNILGMMPHPERMIDPFLSGEDGSLFFENLMGSI

SEQ ID NO: 198088 - protein, 244 aa, Unknown
  Bacterial polypetide isolated from the Sargasso Sea
MLVDEKIAIEHGLKSDEYKKICKLLKRVPNITELGIFSAMWNEHCSYKSSRIHLKKLHTKGKKVIQGPGENAGVIDIEDGDAIVFKIESHNHPSFIEPYQGAATGVGGIMRDVFTMGARPIANLNSIHFGSSQNKKTKNLLRGVVHGIGGYGNCMGVPTIAGQTSFDSSYNGNILVNAMTLGLVKKNKIFYSKAAGLNKPVIYVGSKTGRDGIHGASMASASFDDKIEEKKPTVQVGDPFTEKL

SEQ ID NO: 198089 - protein, 130 aa, Unknown
  Bacterial polypetide isolated from the Sargasso Sea
MQVNEKVAIEHGLKAEEYKKICDLLKRNPNITELGIFSAMWNEHCSYKSSRLHLKKLPTKGKKVIQGPGENAGVIDIEDGDAIVFKIESHNHPSFIEPYQGAATGVGGIMRDVFTMGARPIANLNSIHFG

SEQ ID NO: 198090 - protein, 296 aa, Unknown
  Bacterial polypetide isolated from the Sargasso Sea
DAIVFKIESHNHPSFIEPYQGAATGVGGIMRDVFTMGARPIANLNSIHFGSPDHEKTRNLLRGVVKGIGGYGNCIGVPTIAGQTCFDESYNGNILVNAMTLGLVNKNKIFYSKAAGINKPVIYVGSKTGRDGIHGASMASAIFDDKIEEKKPTVQVGDPFTEKLLLEACLELMAGKSIISIQDMGAAGLTSSSIEMASKGDLGIEIDLTKVPCREKNMTPYEIMLSESQERMLIVLEEGKENEAKKIFDKWNLDFAIIGKTTNSKNIELFFKNEKVAEIPIDFLAENAPMYDRKWI

SEQ ID NO: 198091 - protein, 170 aa, Unknown
  Bacterial polypetide isolated from the Sargasso Sea
MVKVNEKIAIEHGLKKDEYKKICDLLKRIPNITELGIFSAMWNEHCSYKSSRRHLKKLHTKGDQVIQGPGENAGVVDIEDDDAIVFKIESHNHPSFIEPYQGAATGVGGIMRDVFTMGARPIANLNSIHFGSPDHEKTRNLLRGVVKGIGGYGNCIWCPTIAGQTCFDES

SEQ ID NO: 198092 - protein, 221 aa, Unknown
  Bacterial polypetide isolated from the Sargasso Sea
MDNFTVGVVVFPGSNCDRDVSWALEGCLDIRTKYLWHESSDLSDVDAIVLPGGFSYGDYLRCGAIARFSPLINALDEFVKSGKRVLGICNGFQILTESGFLPGALTANKNLNFICDDVELDIVSSKGGWFNNVDEKQTIKLPIAHGEGRYHCDSDTLKKLVDKELIALRYKNNPNGSSFDIAGITNEKGNVLGLMPHPERACDETIGGTDGLFTLKSLILK

SEQ ID NO: 198093 - protein, 195 aa, Unknown
  Bacterial polypetide isolated from the Sargasso Sea
HNDNELPKSDLVVLPGGFSYGDYLRCGSMAAKSKIMQSVINFAKSGGLVMGICNGFQILVETGLVPGVLLRNKYLEFICKNVFVKLDNKENTYFKNLDKKVLEFHIAHNEGNYFCTKDQLKEIEDNNQIAIYYCNNEGKVEDQFNPNGSLKNIAGIFNKEKNVLGMMPHPERMIDQSLSGEDGSIFFKNLINNIK

SEQ ID NO: 198094 - protein, 301 aa, Unknown
  Bacterial polypetide isolated from the Sargasso Sea
SSSVEMASKGNLGIELNLSEVPCREEKMTPYEIMLSESQERMLIVLEKGKEEHAKKIFDKWNLDFAVIGKTTNSKKIQLIFDNKKVAEIPIDLLAENAPIYDRPWKKTKLPQKLKFDKDEFKSLKLPDCLKKILSNSNISDKKWIWDQYDHTVMGDTIQKPGGDAGVVRVHGTNKAVAASVDSSALYCFSHPLTGGKQIVCESYRNLISVGAKPIAITNCLNFGNPEKEKNMGEFVECVEGITEASKYLDFPVVSGNVSFYNETKDKGIKPTPTIGGVGLISDYQQMLTMDFKTEGNLVYV

SEQ ID NO: 198095 - protein, 191 aa, Unknown
  Bacterial polypetide isolated from the Sargasso Sea
HGLKKDEFVKIFELLKRVPNITELGIFSAMWNEHCSYKSSRKHLKKLHTSGNQVIQGPGENAGVVNIGDDDALVFKIESHNHPSFIEPYQGAATGVGGIMRDVFTMGARPIANLNSIHFGSPQHKKTKNLLRGVVKGIGGYGNCIGVPTIAGQTSFDDSYNGNILVNAMTLGLVNKKKIFYSKAAGIGKPV

SEQ ID NO: 198096 - protein, 113 aa, Unknown
  Bacterial polypetide isolated from the Sargasso Sea
MKVTEAVAIEHGLKKDEFAKICELLKRVPNINELAIFSAMWNEHCSYKSSRKHLKKLNTSGKQVIQGPGENAGVIDIGDDDAIVFKIESHNHPSFIEPYQGAATGVGGIMRDV

SEQ ID NO: 198097 - protein, 313 aa, Unknown
  Bacterial polypetide isolated from the Sargasso Sea
NEQIAIDHGLKKDEYKKICDLLKRTPNITELGIFSAMWNEHCSYKSSRRHLKKLHTKGDQVIQGPGENAGVVDIEDDDAIVFKIESHNHPSFIEPYQGAATGVGGIMRDVFTMGARPIANLNSIHFGSIDHEKTRNLLRGVVKGIGGYGNCIGVPTIAGQTCFDESYNGNILVNAMTLGLVNKNKIFYSKAAGVDKPVIYVGSKTGRDGIHGASMASAIFDDKIEEKKPTVQVGDPFTEKLLLEACLELMAGKSIISIQDMGAAGLTSSSIEMASKGDLGIEIDLTKVPCREENMTPYEIMLSESQERMLIVL

SEQ ID NO: 198098 - protein, 120 aa, Unknown
  Bacterial polypetide isolated from the Sargasso Sea
MTVNEQVAIDHGLKKDEYAKICELLKRTPNITELGIFSAMWNEHCSYKSSRLHLKKLPTKGKQVIQGPGENAGVIDIGDDDAIVFKIESHNHPSFIEPYQGAATGVGGIMRDVFTMGARP

SEQ ID NO: 198099 - protein, 160 aa, Unknown
  Bacterial polypetide isolated from the Sargasso Sea
CGAIARFSPLINALDEFVKSGKRVLGICNGFQILTESGFLPGALVANKNLNFICDDVELEIVSSKGGWFNNVDEKQTIKLPIAHGEGRYHCDSDTLKKLVDNELIALRYKNNPNGSSFDIAGITNEKGNVLGLMPHPERACDEIIGGTDGLFTLKSLILK

SEQ ID NO: 198100 - protein, 263 aa, Unknown
  Bacterial polypetide isolated from the Sargasso Sea
AIVFKIESHNHPSFIEPYQGAATGVGGIMRDVFTMGARPIANLNSIHFGSPQHPKTKNLLRGVVKGIGGYGNCMGIPTVGGQTSFDDSYNGNILVNAMTLGLVNKNKIFYSKAAGVNKPVIYVGSKTGRDGIHGASMASAIFDDKIEEKKPTVQVGDPFTEKLLLEACLELMSGKSIISIQDMGAAGLTSSSIEMASKGNLGIELNLNKVPCREEKMTPYEIMLSESQERMLIVLESGKEDEAKKNFDKWNLDFAVIGKTTDS

SEQ ID NO: 198101 - protein, 216 aa, Unknown
  Bacterial polypetide isolated from the Sargasso Sea
MINQENNDLYDLNEALQVENLTLKDYEEICKRLKRKPNRTELGMFGVMWSEHCCYRNSKPLLSKFPTKGKNVLVGPGENAGVIDVGNNQKLVFKIESHNHPSAIEPFQGAATGVGGILRDIFTMGARPIAVLNSLRFGNLDKSSNVDLLRGVVSGISHYGNCVGVPTVGGEIDFDDSYSGNPLVNVMALGLLETEEIVCSGAKNVGSPVLYVGNTT

SEQ ID NO: 198102 - protein, 238 aa, Unknown
  Bacterial polypetide isolated from the Sargasso Sea
SGAKNVGSPVLYVGNTTGRDGVGGASFASSELTTTSLDDRPAVQVGDPFVEKSLIEACLDAFKTGDVIAAQDMGAAGLTCSSAEMAANGNLGISIDLDLVPSREDDMSSYQYLLSESQERMLFVVKEEKINDLIEKFNKWGLYASVIGEVIRTNEVIISHKGKIVAQIPTSALSDDTPVNFHNVINNPPDDLLNKWEWKENDLPEIHEQKIFSLKENKNFSFSEIILKLLSNPSIASK

SEQ ID NO: 198103 - protein, 123 aa, Unknown
  Bacterial polypetide isolated from the Sargasso Sea
MIVNEQVAVDHGLKKDEYAKICELLRRTPNITELGIFSAMWNEHCSYKSSRLHLKKLPTKGKKVIQGPGENAGVIDIEDDDAIVFKIESHNHPSFIEPYQGAATGVGGIMRDVFTMGARPIAN

SEQ ID NO: 198104 - protein, 143 aa, Unknown
  Bacterial polypetide isolated from the Sargasso Sea
MLVNEKIAIEHGLKSDEYKKICKLLKRTPNITELGIFSAMWNEHCSYKSSRIHLKKLHTKGKKVIQGPGENAGVIDIEDGDAIVFKIESHNHPSFIEPYQGAATGVGGIMRDVFTMGARPIANLNSIHFGSSQNKKTKNLLRG

SEQ ID NO: 198105 - protein, 238 aa, Unknown
  Bacterial polypetide isolated from the Sargasso Sea
TKDEYLSIVKKLNREPNTNEIGVIAAMWSEHCSYKSSKFYLKKLPTKGKHVIQGPGENAGIIDIGDNQCAVFKIESHNHPSFIEPYQGAATGVGGILRDVFTMGARPIALMNSLRFGNPKLKITKKLINGVVSGIAGYGNCMGIPTVGGEIYFDKSYNGNPLVNAFALGITTKDKIFLGRADGPGNPVYYLGAKTGKDGVKGAIMASDVFENEEELDRPTVQIGDPFKEKLLLEACLE

SEQ ID NO: 198106 - protein, 284 aa, Unknown
  Bacterial polypetide isolated from the Sargasso Sea
MRALNMTAYELMLSESQERMLMVIDPSKEKMAREIFKKWDLEFEVIGEVTDTKKLVLHMNGNEEASIPINILVEDAPEYQREYIVSKPSPPVIFNPNEFDDKKILDELVLMVSHPNLCSRKWIWEQYDHMVMADTVVRPGSDAAVVRVHGTNKGIAISTDCSPTYCKHNSFEGGKHAVVETWRNLISSGAIPIAITDCMNFGNPEKPEIMGQFVECIRGMGEACSKLKYPVISGNVSLYNETNGVGIYPTPAIGGVGLIRDLSKTMTIDFKSEGNIVFVIGESH

SEQ ID NO: 198107 - protein, 285 aa, Unknown
  Bacterial polypetide isolated from the Sargasso Sea
YLNLEFFQQWWNEHCSYKSSKIHLKKLPTKGNHVIQGPGENAGVIDIGDNDAIIFKIESHNHPSYIEPYQGAATGVGGILRDVFTMGARPIALLNSIHFGSPSHPKTKSLLNGVVSGISGYGNCIGIPTVAGETKFNETYNENILVNAMAVGHAKKDKIFYSKAKGLNKSVVYVGSKTGRDGIHGASMASAEFDEKSEEKKPTVQVGDPFTEKLLLEACLELMKDDSIIAIQDMGAAGLTSSSVEMASKGSLGIQLELDKVPCRENNMTPYEMMLSESQERMLII

SEQ ID NO: 198108 - protein, 228 aa, Unknown
  Bacterial polypetide isolated from the Sargasso Sea
TVIAFGVPTVGGEVNFHPSYNGNILVNAMTVGIAKKDKIFYSAAAGIGNPVVYVGSKTGRDGIHGATMASAEFDEDSEEKKPTVQVGDPFTEKLLLEACLELMKEEAIIAIQDMGAAGLTSSSIEMASKGDVGLEIDLSKVPMRAQNMSAYELMLSESQERMLMVLDPSKEDMARDIFKKWDLEFEVIGKVTDTKRLILMMNGKEEASIPINILVEDAPEVSKRIYCQ

SEQ ID NO: 198109 - protein, 211 aa, Unknown
  Bacterial polypetide isolated from the Sargasso Sea
MEFFQKKIGVELAKSHGLTSKEYKTILELIEREPTITELGVFSAMWNEHCSYKSTKKWLRTLPTTGPKVICGPGENAGIIDIDDGDALVFKIESHNHPSYIDPFQGAATGVGGILRDIFTMGARPIVTMNALSFGCKDRKKVNHLLSEVVNGIGSYGNSFGVPNLGGELRFDESYEGNCLVNVFAAGVVKSDKIFYSSATQSNLPVVYLGA

SEQ ID NO: 198110 - protein, 299 aa, Unknown
  Bacterial polypetide isolated from the Sargasso Sea
LLLEACLELMSDKSIIAIQDMGAAGLTSSSIEMASKGNLGIELHLDKVPCREEKMTPYEIMLSESQERMLIVLESGKEDSAKKIFDKWNLDFAVIGKTTNSKNIELYFEKEKVANVPIKFLANEAPMYDRPWKKTKLPQKIKFSNNDFKKLKFNDVIKKMISHPNICSKQWIWEQYDHTVMGDTIQKPGGDAGVVRVHGTKKAVASSVDSSASYCHAHPFTGGKQVVCEAWRNLVSVGAEPIAITNCLNFGNPEKKENMGEFVECIDGINEASKYLNFPVVSGNVSFYNETKDKGIKPY

SEQ ID NO: 198111 - protein, 178 aa, Unknown
  Bacterial polypetide isolated from the Sargasso Sea
VIDIGDDDAIVFKIESHNHPSFIEPYQGAATGVGGILRDVFTMGARPIATLNSIHFGSHENAKTKNLLSGVVSGIGGYGNCMGIPNVGGEVKFDSTYNDNILVNAMAVGLVKKNKIFYSKAKGINQSVIYVGSKTGRDGIHGASMASAKFDKNTEEKKPTVQVGDPFTEKLLLEACLE

SEQ ID NO: 198112 - protein, 331 aa, Unknown
  Bacterial polypetide isolated from the Sargasso Sea
RIPTIGGETNFDKCYNENILVNAMAVGLAKTNKIFYSKAKGMNMPVIYVGSKTGRDGIHGASMASAEFDSTSEEKKPTVQVGDPFKEKLLLEACLELMKENSIISIQDMGAAGLTSSSIEMASKGNLGIQLNLDKVPCREYGMTPYEIMLSESQERMLIILKKGKEESAKKIFDKWNLDFSIIGKTNDSKNLLIMEKGKIVCDLPLKSLSSMAPVYDRKWTKHPLPKSNKPIDQYKNKIDESLIKLVQTTRLSNKSWVWEQYDQTVMGDTIQKPGGNSGVIRIHETNKAISVSVDSSANYCKAHPLTGGKQVVCENLEKFDCCRLKTNCDN

SEQ ID NO: 198113 - protein, 279 aa, Unknown
  Bacterial polypetide isolated from the Sargasso Sea
GYGNCIGIPTVAGETKFNDTYNENILVNAMAVGHAKKNKIFYSKAKGIGKSVVYVGSKTGRDGIHGASMASAEFDENSEEKKPTVQVGDPFTEKLLLEACLELMKDDSIIAIQDMGAAGLTSSSVEMASKGSLGIELDLEKVPCREENMTPYEMMLSESQERMLIILEEGKEESARKIFKKWDLDFVVIGKTTQTKNLTLKFNKKIKGEIPIEFLANKAPMYDRKWKKKNIKKNKIEVKKLKKVKIEDALTKILSSPNHSNKSWITEQFDQMVMCDTLQ

SEQ ID NO: 198114 - protein, 258 aa, Unknown
  Bacterial polypetide isolated from the Sargasso Sea
MEVTEALAIDHGLKKEEYSKICELLKRVPNITELGIFSAMWNEHCSYKSSKKHLKNLHTIGKQVIQGPGENAGVIDIGDNDAIVFKIESHNHPSFIEPYQGAATGVGGIMRDVFTMGARPIANLNSIHFGSPQNKMTRNLLRGVVKGIGGYGNCIGVPTIAGQTSFDESYNGNILVNAMTLGLVNKNKIFYSKPTGINKPVIYVGSKTGRDGIHGASMASTIFDEKIEEKKPTVQVGDRFTEKLLLEAWFRINDTDNS

SEQ ID NO: 198115 - protein, 209 aa, Unknown
  Bacterial polypetide isolated from the Sargasso Sea
GSNCDRDVSWALEGCLDIRTKYLWHESSDLSDVDAIVLPGGFSYGDYLRCGAIARFSPLINALDEFVKSGKRVLGICNGFQILTESGFLPGALVANKNLNFICDDVELDIVSSKGGWFNNVDEKQTIKLPIAHGEGRYHCDSDTLKKLVDNELIALRYKNNPNGSSFDIAGITNEKGNVLGLMPHPERACDETIGRTDGLFTLKSLILK

SEQ ID NO: 198116 - protein, 129 aa, Unknown
  Bacterial polypetide isolated from the Sargasso Sea
MEVNEQIAVDHGLKTDEYKKICDLLKRVPNLTELGIFSAMWNEHCSYKSSRLHLKKLNTKGKKVIQGPGENAGVIDIGDDDAIVFKIESHNHPSFIEPYQGAATGVGGIMRDVFTMGARPIANLNSIHF

SEQ ID NO: 198117 - protein, 172 aa, Unknown
  Bacterial polypetide isolated from the Sargasso Sea
MKITNKIIEKHGLKFEEFESIKKLMKRDPNLLELGIFSAMWNEHCSYKSSRIHLKKLPTKGKQVIQGPGENAGVVDIGDNDAIVFKIESHNHPSYIEPYQGAATGVGGILRDVFTMGARPIALLNSIHFGSPSHPKTKSLLNGVVSGIGGYGNCIGIPTVAGETKFNETYNE

SEQ ID NO: 198118 - protein, 221 aa, Unknown
  Bacterial polypetide isolated from the Sargasso Sea
MDYFTVGIVVFPGSNCDRDVSWALEGCLDIRTKYLWHESSDLSDVDAIVIPGGFSYGDYLRCGAIARFSPLINALDEFVKSGKRVLGICNGFQILTESGFLPGALVANKNLNFICDDVELDIVSSKGGWFNNGEEKQTIKLPIAHGEGRYHCDSDTLKKLVDNELIALRYKNNPNGSSFDIAGITNEKGNVLGLMPHPERACDETIGGTDGLFTLKSLILK

SEQ ID NO: 198119 - protein, 227 aa, Unknown
  Bacterial polypetide isolated from the Sargasso Sea
MKSSVIVFPGSNCDRDVAVALEKFQIKNQMVWHNESNLPKSDLIVLPGGFSYGDYLRTGCIASKSRIINDVLKHANRGGLVLGICNGFQILIETGLLPGVLLRNKKLRFISKNVFLRVMNVNSRFCLNYNKKNIIKLPIAHNEGNYFANDELLKKLEDENLIAFKYCSKKGDISENFNPNGSSKNIAGILNKEKNILGMMPHPERLIDPLLSGEDGSIMFESLVKSH

SEQ ID NO: 198120 - protein, 174 aa, Unknown
  Bacterial polypetide isolated from the Sargasso Sea
MPPEPTPEEISTQQSYLSLGLSDSEYQLVCKLLGRKPNLTETGIYGVMWSEHCSYKTSKMQLSRFPTEGPNVLQGPGEGAGVVDLGDGWAVVFKVESHNHPSAIEPYQGAATGVGGILRDIYSMGARPVAFLNSLRFGPLSDKKDPGSPTSKRNQYLFGGVVAGIAGYGNCIGV

SEQ ID NO: 198121 - protein, 104 aa, Unknown
  Bacterial polypetide isolated from the Sargasso Sea
SFTSRYQQGELIRLPIAHGEGNYICDELSLRHLQSENRIVFRYASGSNPNGSIDNIAGILNPKGNVLGMMPHPERAMADWMGSSDGRRLFESALNLFPETADAA

SEQ ID NO: 198122 - protein, 284 aa, Unknown
  Bacterial polypetide isolated from the Sargasso Sea
MLKREPNLLELGIFSAMWNEHCSYKSSKIHLKKLPTNGKHVIQGPGENAGVIDIGDNDAIIFKIESHNHPSYIEPYQGAATGVGGILRDVFTMGARPIALLNSIHFGSPDHSKTKSLLNGVVSGIGGYGNCIGIPTVAGETKFNKTYNENILVNAMAVGHAQKDKIFYSKAKGINKSVVYVGSKTGRDGIHGASMASAEFDENSEDKKPTVQVGDPFTEKLLMEACLELMKYNSIISIQDMGAAGLTSSSVEMASKGNLGIELNLDKVPSREENMTPYEMMLSE

SEQ ID NO: 198123 - protein, 226 aa, Unknown
  Bacterial polypetide isolated from the Sargasso Sea
MTPKDHSPIIIRAHGLTTEEYNQIKKILDRTPNITELGIFSAMWNEHCSYKSSRKWLKELPTEGNQVICGPGENSGIVAIDEKLALAFKMESHNHPSYIEPFNGAATGVGGILRDVFTMGARPIAVMNSLSMGSSDKIETKEILRGVVKGISHYGNSFGVPNVGGEIRFHASYNGNCLVNAFAAGIVNRKEIFYSKATGIGSPIVYMGAKTGKDGVGGASMASGKL

SEQ ID NO: 198124 - protein, 196 aa, Unknown
  Bacterial polypetide isolated from the Sargasso Sea
MINQENNVLYDLNEALQVENLTVNDYEEICKRLKRKPNRTELGMFGVMWSEHCCYRNSKPLLSKFPTKGKNVLVGPGENAGVIDVGNNQKLVFKIESHNHPSAIEPFQGAATGVGGILRDIFTMGARPIAVLNSLRFGNLDKSSNIDLLRGVVSGIAHYGNCVGVPTVGGEIEFDDSYSGNPLVNVMALGLLETEQ

SEQ ID NO: 198125 - protein, 261 aa, Unknown
  Bacterial polypetide isolated from the Sargasso Sea
MGARPIALMNSIHFGSPENKKTQNLLNGVVSGIGGYGNSVGVPTVGGETKFNSTYNENILVNAMAIGHAKKNKIFYSKAKGINKPVVYVGSKTGKDGIHGATMASAEFDENSEEKKPTVQVGDPFTEKLLLEGCLELMKKNSIISIQDMGAAGLTSSSIEMASKGKLGIELDLDKVPCRERNMSPYEMMLSESQERMLIILDDKKEDEAKKIFDKWDLDFVVIGKTTDTNRLVLNFNSKKVADIPIPALADEAPKYDRKWN

SEQ ID NO: 198126 - protein, 192 aa, Unknown
  Bacterial polypetide isolated from the Sargasso Sea
AELPKSDLVVLPGGFSYGDYLRCGSMASKSKIMQSVINFANSGGMVMGICNGFQILVETGLVPGVLLRNKYLEFICKNVFVKIKDKKNKYFKNINNEVLEFHIAHNEGNYFCTNDQLKEIEDNNQIAINYCDENGKIEDRFNPNGSIKNIAGIFNKEKNILGMMPHPERMIDTSLSGEDGSLFFKNLINNLK

SEQ ID NO: 198127 - protein, 110 aa, Unknown
  Bacterial polypetide isolated from the Sargasso Sea
MIVNEQVAIDHGLKKDEYAKICKLLKRTPNITELGIFSAMWNEHCSYKSSRLHLKKLPTKGKKVIQGPGENAGVIDIEDNDAIVFKIESHNHPSFIEPYQGAATGVGGIM

SEQ ID NO: 198128 - protein, 139 aa, Unknown
  Bacterial polypetide isolated from the Sargasso Sea
MIVNEKIAIDHGLKKEEYQKICELLKRTPNITELGIFSAMWNEHCSYKSSRLHLKKLPTKGKQVIQGPGENAGVVDIGDNDAIVFKIESHNHPSFIEPYQGAATGVGGIMRDVFTMGARPIANLNSIHFGSTQHKKTKN

SEQ ID NO: 198129 - protein, 192 aa, Unknown
  Bacterial polypetide isolated from the Sargasso Sea
MKITENIITKHGLTLSEFKQIVSLLSRDPNLLELGIFSAMWNEHCSYKSSKIHLKKLPTKNKNVIQGPGENAGVIDIEGDDAIIFKIESHNHPSFIEPYQGAATGVGGILRDVFTMGARPIALLNSIHFGSPKNNKTKGLFNGVVSGIAGYGNCVGIPTVAGETKFNDCYNNNNLVNAMAVGHAKKDKIFYS

SEQ ID NO: 198130 - protein, 255 aa, Unknown
  Bacterial polypetide isolated from the Sargasso Sea
PQHKKTKNLLRGVVHGIGGYGNCMGVPTIAGQTSFDSSYNGNILVNAMTLGLVKKNKIFYSKAAGLNKPVIYVGSKTGRDGIHGASMASASFDEKIEEKKPTVQVGDPFTEKLLLEACLELMAGDSIIAIQDMGAAGLTSSSIEMASKGNLGIEINLNKVPCRETKMTPYEIMLSESQERMLIVLENGKEEHAKKIFDKWNLDFAVIGKTNNSKNIELFFDNEKVANIPVNTLVENSPMYDRKWKKSKLPKKNKN

SEQ ID NO: 198131 - protein, 227 aa, Unknown
  Bacterial polypetide isolated from the Sargasso Sea
KPTVQVGDPFTEKLLMEACLELMKKDSIISIQDMGAAGLTSSSVEMAYKGGLGIELDLDKIPCREENMSPYEMMLSESQERMLIILEDGKENEARQIFKKWDLDFVVIGKTTDTKNLSLKFKNEVVASIPIGALSSKAPLYDRKWVKKKLDKKKINIKEHKKIKFDKAFFELISSPNHSSKKWVTEQYDQMVMGDTIERSGGDAAIVKIHQKDKAIAMTVDSSANYL

SEQ ID NO: 198132 - protein, 282 aa, Unknown
  Bacterial polypetide isolated from the Sargasso Sea
MTKVNEKIAIDHGLKADEYKKICELLNRIPNITELAIFSAMWNEHCSYKSSRKHLKSLHTTGEKVIQGPGENAGVIDIGDEDAIVFKIESHNHPSFIEPYQGAATGVGGIMRDVFTMGARPIANLNSIHFGSPQHKKTKNLLRGVVKGIGGYGNCIGVPTIGGQTSFDESYNGNILVNAMTLGLVNKNKIFYSKAAGINKPVIYVGSKTGRDGIHGASMASAVFDDQIEEKKPTVQVGDPFTEKLLLEACLELMAEDSIIAIQDMGAAGLTSSSVEMASKGN

SEQ ID NO: 198133 - protein, 263 aa, Unknown
  Bacterial polypetide isolated from the Sargasso Sea
HKKTKNLLRGVVKGIGGYGNCIGVPTIGGQTCFDESYNGNILVNAMTLGLVNKKKIFYSKAAGIGKPVIYVGSKTGRDGIHGASMASAVFDDKIEEKKPTVQVGDPFTEKLLLEACLELMADDSIISIQDMGAAGLTSSSIEMASKGKLGIELDLSKVPCREEKMTPYEIMLSESQERMLIVLENGKEENAKKIFDKWDLDFAVIGKTTTSKKIELYFDSKKVADIPIDFLAEDAPEYDRKWKKTKLPQKIKFKKENFKSLKI

SEQ ID NO: 198134 - protein, 227 aa, Unknown
  Bacterial polypetide isolated from the Sargasso Sea
MKSSVITFPGSNCDRDMDVALKKFGFKNKMIWHDDLEIPKSDLVVLPGGFSYGDYLRCGSMASKSKIMNSVINFAKSGGLIIGICNGFQILVESGLVPGVLLRNKYLEFICKNVFVKINNKQNAYFKNINNNVLEFHIAHNEGNYFCTDDQLKEIEDNDQVAINYCDKEGKIEDQFNPNGSIKNIAGIFNKEKNILGMMPHPERMIDPSLSGEDGSIFFKNLINNLK

SEQ ID NO: 198135 - protein, 289 aa, Unknown
  Bacterial polypetide isolated from the Sargasso Sea
NITELGIFSAMWNEHCSYKSSRKWLKDLPSIGDQVICGPGENAGVVAIDSNLALAFKMESHNHPSYIEPFNGAATGVGGILRDVFTMGARPIAVMNSLSMGSVDNIKTKELLRGVVKGISHYGNSFGVPNVGGELRFHARYNGNCLVNAFAAGIVNKDEIFYSKASGIGSPIVYMGAKTGRDGVGGASMASESFESDEEQNKAKRPTVQIGDPFLEKKLMEACFELMRSGCVIAIQDMGAAGLTCSSIEMGDKGNLGIFLNLDKVPTREDKMTAYEIMLSESQERCLQL

SEQ ID NO: 198136 - protein, 280 aa, Unknown
  Bacterial polypetide isolated from the Sargasso Sea
QIGKVISKKRFFIKSQKKIVVDLPVDLLTDDCPMYKREIKKPKKMAGIDKLTDANIRRIQFNPLVLLKKLLSNENICSREWIYNQFDYMVGTNTLVRPGSDSAIIRIKGTKKAIAMSTNCNSNYCQLDPYTGAAIAVAESTRNIIASGGKPLALTNCLNFGNPEKPEIMWQFAKSIDGLSKASKTFNVPVVSGNVSLYNETFNEPIKPTPTISMVGIVEDKKFLKTQWFKNEGDQIILIGNIKNDFGGSQALKYINTKKNLRKPPEINFSNHLKINNFCL

SEQ ID NO: 198137 - protein, 227 aa, Unknown
  Bacterial polypetide isolated from the Sargasso Sea
MKSSVITFPGSNCDRDMDVALKKFGFNNKMVWHDDNELPKSDLVVLPGGFSYGDYLRCGSMASKSKIMQSVINFAKSGGLVMGICNGFQILVETGLVPGVLLRNKYLEFICKNVFVKLDNKENSYFKNLNKDILEFHIAHNEGNYFCTKDQLKEIEDNNQIAIYYCNKEGKIEDQYNPNGSIKNIAGIFNKEKNVLGMMPHPERMIDQSLSGEDGSIFFKNLINNIK

SEQ ID NO: 198138 - protein, 211 aa, Unknown
  Bacterial polypetide isolated from the Sargasso Sea
MDVALKKFGFKNKMVWHNDKNIPSSDLIVLPGGFSYGDYLRCGSIASKSKIIKSVIDFANSGGLVLGICNGFQILTETGLLPGILQQNKYLNFICKNVFVKIKDTKNKYFKNIKKEILELHIAHNEGNYFCTKEELKNLKDNSQIAVTYCDQSGMENEENNPNGALNNIAGIFNKNKNVLGMMPHPERMIDSYLSGEDGSLFFENLLGNLK

SEQ ID NO: 198139 - protein, 169 aa, Unknown
  Bacterial polypetide isolated from the Sargasso Sea
MEVSESVALDHGLKKEEYKKICELLKRVPNITELAIFSAMWNEHCSYKSSRKHLKKLHTSGKQVIQGPGENAGVIDIGDDDAIVFKIESHNHPSFIEPYQGAATGVGGIMRDVFTMGARPIANLNSIHFGSPQHKKTKNLLRGVVKGIGGYGNCIGVPTIAGQTSFDDS

SEQ ID NO: 198140 - protein, 227 aa, Unknown
  Bacterial polypetide isolated from the Sargasso Sea
MKSSVITFPGSNCDRDMDVALKKFGFKNKMVWHANTELPKSDLVVLPGGFSYGDYLRCGSMASKSKIMQSVINFANSGGMVMGICNGFQILVETGLVPGVLLRNKYLEFICKNVFVKINDKQNKYFKNVNNEVLELHIAHNEGNYFCTNDQLKEIEDNNQIAIKYCDQNGKIEDQFNPNGSIKNIAGIFNKEKNVLGMMPHPERMIDTSLSGEDGSLFFKNLINNLK

SEQ ID NO: 198141 - protein, 125 aa, Unknown
  Bacterial polypetide isolated from the Sargasso Sea
MSIGVLVFPGSNCDRDVQWATEGCLGMPTRRIWHEETDLSGLDAVVLPGGFSYGDYLRCGAIARFAPALQALLDFAAQGGRVLGICNGFQVLTELGLLPGALTRNRDLHFICEDAPLQVASSRTP

SEQ ID NO: 198142 - protein, 323 aa, Unknown
  Bacterial polypetide isolated from the Sargasso Sea
QGAATGVGGIMRDVFTMGARPIANLNSIHFGSTQHKKTKNLLRGVVNGIGGYGNCMGVPTIAGQTSFDSSYNGNILVNAMTLGLVKKDKIFYSKAAGLNKPVIYVGSKTGRDGIHGASMASASFDEKIEEKKPTVQVGDPFTEKLLLEACLELMAGDSIIAIQDMGAAGLTSSSIEMASKGNLGIEINLNKVPCRETKMTPYEIMLSESQERMLIVLENGKEEHAKTIFDKWNLDFAVIGKTTKSKKIELYFDSEKVADIPVNTLVENSPMYDRKWKKSKLPKKNKINKDDINNLKIIEVLKKILANPNICSKEWIGNSRPYS

SEQ ID NO: 198143 - protein, 209 aa, Unknown
  Bacterial polypetide isolated from the Sargasso Sea
MVVNEKIAIEHGLKKEEFEKICNLLKRNPNITELAIFSAMWNEHCSYKSSKVHLKTLNSKSKKVIQGPGENAGVVDIGDDDAIVFKIESHNHPSFIEPYQGAATGVGGIMRDIFTMGARPIANLNSLHFGSPQHKKTKNLLRGVVQGIGGYSNCIGVPTIAGQTCFDESYNGNILVNAMTIGLVNKNKIFYSKAVGINKPVIYVGSKTG

SEQ ID NO: 198144 - protein, 196 aa, Unknown
  Bacterial polypetide isolated from the Sargasso Sea
MKITNKVVAKHGLKPEEYSSIKKLLKREPNLLELGIFSAMWNEHCSYKSSRKHLKNLPTKGKQVIQGPGENAGVIDIGDDDAIIFKIESHNHPSYIEPYQGAATGVGGILRDVFTMGARPIALLNSIHFGSPDHFKTKSLLNGVVSGIGGYGNCIGIPTVAGETKFNSTYNENILVNAMAVGHAKKDKIFYSKAKG

SEQ ID NO: 198145 - protein, 211 aa, Unknown
  Bacterial polypetide isolated from the Sargasso Sea
MPPEPTPEEISTQQRYLSLGLSDSEYQLVCELLGRKPNLTETGIYGVMWSEHCSYKTSKMQLSRFPTEGPNVLQGPGEGAGVVDLGDGWAVVFKVESHNHPSAIEPYQGAATGVGGILRDIYSMGARPVAFLNSLRFGPLSDKKDPGSPTSKRNQYLFGGVVAGIAGYGNCIGVPTVAGEVGFDACYSGNPLVNAMCVGVIRHEDLQHGRA

SEQ ID NO: 198146 - protein, 96 aa, Unknown
  Bacterial polypetide isolated from the Sargasso Sea
GELIRLPIAHGEGNYICDELTLRHLKAENRIVFRYASGSNPNGSIDNIAGILNPKGNVLGMMPHPERAMAHWMGSSDGRRLFESALNLFPETADAA

SEQ ID NO: 198147 - protein, 173 aa, Unknown
  Bacterial polypetide isolated from the Sargasso Sea
MLEPAITSELIESHGLNSSEYDLLLEIIGRNPTFTELGIFSAMWNEHCSYKSSKKWLRLLPTKGENVICGPGENAGIVDIGDNQAVVFKMESHNHPSYIEPHQGAATGVGGILRDVFTMGARPIAAMNALSFGEINHPRTKELVHGVVEGIGSYGNSFGVPTVGGEIRFNKSY

SEQ ID NO: 198148 - protein, 314 aa, Unknown
  Bacterial polypetide isolated from the Sargasso Sea
PYQGAATGVGGILRDVFTMGARPIALLNSIHFGSPSHPKTRSLLNGVVSGIGGYGNCIGIPTVAGETKFNETYNENILVNAMAVGHANKNKIFYSKAKGINKAVVYVGSKTGRDGIHGASMASAEFNENSDEKKPTVQVGDPFTEKLLLEACLELMKDDSIIAIQDMGAAGLTSSSVEMASKGSLGIELDLEKVPCREENMSPYEMMLSESQERMLIILEDGKEDHAKKIFKKWDLDFVVIGKTTKNKNLTLKYNGVIEGELPIEALSSKAPVYDRKWVKKNLSKKKFEIKKLKKIKLEDALIKVLSSPNHSNK

SEQ ID NO: 198149 - protein, 310 aa, Unknown
  Bacterial polypetide isolated from the Sargasso Sea
SALSDDTPVNFHNVINNPPDDLLKKWEWKENDLPEICEQKIFSLKENKIFSFNEIILKLLSNPSIASKRWIYNQYDSQVQANTVFKPGKSDAAVVRLREQNKKNKSKVFSAVAASVDCNSRWVALDPFRGSIAAVAESARNVSCVGAEPVAITNNLNFSSPENEIGYWQLSSSCNGIAEACKALETPVTGGNVSLYNESKNKDNLITPINPTPVIGMVGKIDNVEKAVSSEWKNIEDQIWLIGSSKSEIKIAASSYLEYFHGKITGRPPKIDLLDEKFCQSFLRNAILNSLVVSSHDISDGGLAIALAES

SEQ ID NO: 198150 - protein, 202 aa, Unknown
  Bacterial polypetide isolated from the Sargasso Sea
FKNKMVWHNDNEMPKSDLIVLPGGFSYGDYLRCGSIAAKSKIIEPVINFAKKGGLVLGICNGFQILSETELLPGILQQNKYLNFICKNVFVKIKNKDNIYFNKIKKDILELHIAHNEGNYFCSQDQLKSLKYNNQIAVTYCNEEGIEKEENNPNGALENIAGIFNKSKNILGMMPHPERMIDKYLSSDDGSYFFKNILESFK

SEQ ID NO: 198151 - protein, 127 aa, Unknown
  Bacterial polypetide isolated from the Sargasso Sea
MIEVNEKIATEHGLTKEEFIKICDLLKRNPNLTELGIFSAMWNEHCSYKSSRFHLKKLNTKGKKVIQGPGENAGVVDINDNDAIVFKIESHNHPSFIEPYQGAATGVGGICEMFYYGRKTDLQFKTH

SEQ ID NO: 198152 - protein, 268 aa, Unknown
  Bacterial polypetide isolated from the Sargasso Sea
MESHNHPSFIDPYQGAATGVGGIMRDIFTMGARPIANMNCLHFGEPENFKTKYLVSGVVSGIGGYGNCVGVPTIGGQTIFNKSYNGNNIVNAMTLGIAPSNKIFYSTAAGVGNPLIYVGSKTGKDGIHGATMASASFEETTENKRPTVQVGDPFTEKLLLEACLELMEKDVIISIQDMGAAGLTSSAFEMASKGGVGIELQLEKVPQREKNMQPFELMLSESQERMLLVIKAGKEIEARQVFTKWDLPFSIIGNLTDTGRMVLKYNNI

SEQ ID NO: 198153 - protein, 241 aa, Unknown
  Bacterial polypetide isolated from the Sargasso Sea
GLANKNKIFYSKAKGVNKPVVYVGSKTGRDGIHGASMASAEFDENSDEKKPTVQVGDPFTEKLLMEACLELMKEESIISIQDMGAAGLTSSSVEMAHKGGLGIELNLDEIPCREENMSPYEMMLSESQERMLIILEDGKEESAKKIFKKWDLDFVVIGRTTETKNLSLKFKKEVVATIPIDALSSKAPVYDRKCKKKKLSKKNINLKDLKKIKFDDAFFKIITSPNQSNKKWVTDQYDQMV

SEQ ID NO: 198154 - protein, 226 aa, Unknown
  Bacterial polypetide isolated from the Sargasso Sea
MKSSVIIFPGSNCDRDMDVALKKFGFENQMVWHDDTEIPKSDLIVLPGGFSYGDYLRCGSIAGKSRIIKSVIEFANSGGLVLGICNGFQILTETGLLPGILQQNKYLNFICKNVFVKIKNKENKYFKKIKKEVLELHIAHNEGNYFCSNDELKSIEDNGQIAVTYCDHKGNDDEKNNPNGALKNIAGIFNKDKNILGMMPHPERMIDPFLSGEDGSLFFKNLIESL

SEQ ID NO: 198155 - protein, 203 aa, Unknown
  Bacterial polypetide isolated from the Sargasso Sea
MKITPEIVDKHGIKPEEYKKIVSLIKKEPNLLELGIFSAMWNEHCSYKSSKKYLKALPTKNKKVIQGPGENAGVIDIEDNDAIVFKIESHNHPSFIEPYQGAATGVGGILRDIFTMGARPIATLNSIHFGSENHPKTKNLLNGVVAGIGGYGNCMGIPTVGGEVKFDSSYNENILVNAMAVGLVKKNKIFYSKAKGFDRPVIY

SEQ ID NO: 198156 - protein, 227 aa, Unknown
  Bacterial polypetide isolated from the Sargasso Sea
MKSAVIVFPGSNCDRDMDVALKKFGFKNQMVWHNDHEIPKSDLIVLPGGFSYGDYLRCGSIAGKSKIIKSVVEFANSGGLVLGICNGFQILTETGLLPGVLLQNKYQKFVCKNIHVRINDKENKYFKNIRKEILELHIAHNEGNYFCSEDELKSIINNNQIAVTYCNEKGKLSDEFNPNGALSNIAGIFSKNKNILGMMPHPERMIDKYLSSNDGSIFFENLIENLK

SEQ ID NO: 198157 - protein, 302 aa, Unknown
  Bacterial polypetide isolated from the Sargasso Sea
IAPLVDEAPEYDRPHIKSPVRPTLASTKINATTSITQTLKSMLGHVDLASRRWIYEQYDSQVMADTIFGPGGDAALIRLHGSKRGLAISTDCTPRYVQADPKNGGAQAVAEAYRNLSAIGAKPLAITNNLNFGNPQKPEIMTQLVESVTGMGEAALALDTPVVSGNVSLYNETDGEAIQPCPVVGMVGIIENIEKAVNNQFTEAGHEVFVIGQDCTVNDGWLGASIYQQHFGKQRIYAPPPINLAAELKHSSFVRQQILDSNINAAHDVSDGGLVVAIAEMAVRAGLGAEIITPASGQIHGW

SEQ ID NO: 198158 - protein, 257 aa, Unknown
  Bacterial polypetide isolated from the Sargasso Sea
AEFNEDAEEKRPTVQVGDPFTEKLLLEACLELMESDAIIAIQDMGAAGLTSSSVEMAGKGGLGMKLNLEHVPVREEGMSAYEIMLSESQERMLMILDPNTEDLAREIFKKWGLDFAIIGTLNDTGHLEVVKNGISEANIPIDPMVDQSPEYDRPWSETPKQEQIRSSDYPPKSSLQDVFEVLIGCPDLSSRRWIWEQYDHMVMNNTIARPGGDAAVVRVNDTNKAITMSVDCTPRYCLADPKVGGAQAVAEAWRNIT

SEQ ID NO: 198159 - protein, 288 aa, Unknown
  Bacterial polypetide isolated from the Sargasso Sea
HPILCSRKWIWEQYDHMVMADTVVRPGSDAAVVRVHGTNKGIAISTDCSPTYCKHNSFEGGKHAVVETWRNLIASGAMPIAITDCMNFGNPEKPEIMGQFVECIRGMGEACSKLKYPVISGNVSLYNETNGVGIYPTPVIGGVGLIRDLSKTMTIDFKSEGNIVFVIGESRNHLGNSQYLSIVKNREDGGPPTINLEEELKNGEFVLNCINQNTFQSVHDLGEGGLLIAIAEMCLAGNKGIYIDIKKEFLHGYFFGEDQARYLVEVSKDKLNNFENQARDHNVQIEKV

SEQ ID NO: 198160 - protein, 282 aa, Unknown
  Bacterial polypetide isolated from the Sargasso Sea
SKRWIYKQYDSQVQANTVFKPGNSDAAVVRLREQNKKNKSKVFSGVAASVDCNSRWVALDPFRGSIAAVAESARNVSCVGAEPVAITNNLNFSSPENEIGYWQLSSSCNGIAEACKALETPVTGGNVSLYNESKNKDNLITPINPTPVIGMVGKIDNVEKAISSEWKNIEDQIWLIGSSKSEIKIAASSYLEYFHGEITGRPPKIDLLDEKFCQSFLRNAILNSLVVSSHDISDGGLAIALAESCILSARGATIELEKNLNRVDNLLFAEGGSRIIFSISKM

SEQ ID NO: 198161 - protein, 210 aa, Unknown
  Bacterial polypetide isolated from the Sargasso Sea
MTTVNEQVAIDHGLKKDEFKKICDLMKRTPNLTELGIFSAMWNEHCSYKSSRKHLKNLHTQGKRVIQGPGENAGVIDVDDEDAIVFKIESHNHPSFIEPYQGAATGVGGIMRDVFTMGARPIANLNSIHFGSTQHKKTKNLLRGVVKGIGGYGNCIGVPTIGGQTCFDESYNGNILVNAMTLGLVNKKKIFYSKAAGIGKPVIYVGSKTG

SEQ ID NO: 198162 - protein, 309 aa, Unknown
  Bacterial polypetide isolated from the Sargasso Sea
FYSKAKGLNKSVVYVGSKTGRDGIHGASMASAEFDENSDDKKPTVQVGDPFTEKLLLEACLELMQDDSIIAIQDMGAAGLTSSSVEMASKGSLGIELNLEKVPCREENMTPYEMMLSESQERMLIILEDNKEEHAKKIFEKWDLDFVIIGKTTNSKNLTLKYNNKVEGEIPLEALAAKAPVYNRKWVKKKILKSKLNLKKLKKFKIEESLIKILSSPNHSNKSWITNQFDQMVMCDTAQRSGSDAAIIRIHNKDKAIAVSVDSSANYCKSHPELGGKQIVCENWRNLIATGAKPLAITNCLNFGNPENS

SEQ ID NO: 198163 - protein, 221 aa, Unknown
  Bacterial polypetide isolated from the Sargasso Sea
MDNFTVGVVVFPGSNCDRDVSWALEGCLDIRTKYLWHESSDLSDVDAIVLPGGFSYGDYLRCGAIARFSPLINALDEFVKSGKRVLGICNGFQILTESGFLPGALVANKNLNFICDDVELDIVSSKGGWFNNVDEKQTIKLPIAHGEGRYHCDSDTLKKLVDNELIALRYKNNPNGSSFDIAGITNEKGNVLGLMPHPERACDETIGRTDGLFTLKSLILK

SEQ ID NO: 198164 - protein, 223 aa, Unknown
  Bacterial polypetide isolated from the Sargasso Sea
ITELGIFSAMWSEHCSYKSSRKWLKTLPTEAPWVIQGPGENAGIIDIGNNLAAVFKMESHNHPSFIEPYQGAATGVGGIMRDVFTMGARPVANLNCLRFGNPLHAKTKHLLSGVVSGIGGYGNCMGVPTIGGECTFDEGYNGNILVNAMTVGIVKKDKIFYAKAGSPGSPVVYVGAKTGRDGIHGASMASASFDADSESKRPTVQVGDPFTEKLLLEACLELM

SEQ ID NO: 198165 - protein, 307 aa, Unknown
  Bacterial polypetide isolated from the Sargasso Sea
RIESHNHLSAIEPYQGAATGVGGILRDIFTMGARPIAVMDPLRFGPIDDPRSRWIAEGVISGVSGYGNSVGVPTVGGEIVFDETYKGNPLVNVLAMGVLPTERLVLGQASGVGNLAVLLGASTGRDGIGGVSVLASAGFDESSEDIDKRPSVQVGDPFEEKRLLEACLELLDQGLVSGIQDLGGAGITCATSETASRGGAGMDVDVTAIHARENNMEPFELMTSESQERMLAIIKPEDLAHVEEISARWEIQASVIGRVTGTGQLRILDGFDGDVLASLPASTLHDDAPEYKRPIAPPADLESAGPK

SEQ ID NO: 198166 - protein, 119 aa, Unknown
  Bacterial polypetide isolated from the Sargasso Sea
MKITNEQIENHGLKLEEYKKIKELLGREANFLELGIFSAMWNEHCSYKSSKIHLKKLPTKNNIVIQGPGENAGVIDIGDDDAIIFKIESHNHPSFIEPYQGAATGVGGILRDVFTMGAR

SEQ ID NO: 198167 - protein, 293 aa, Unknown
  Bacterial polypetide isolated from the Sargasso Sea
MGVPTIAGQTSFDSSYNGNILVNAMTLGLVKKNKIFYSKAAGLNKPVIYVGSKTGRDGIHGASMASASFDEKIEEKKPTVQVGDPFTEKLLLEACLELMSGDSIISIQDMGAAGLTSSSIEMASKGNLGIEINLNKVPCRETKMTPYEIMLSESQERMLIILENGKEELAKKIFDKWNLDFAIIGKTTNSKNIELFFNNEQVANIPINTLVENSPMYDRKWKKSKLPKKNKVEKKTLNKLKIKDILKKILSSPNICNKDWIWHQFDHTVMGDTIQKPGGDSGVVRVHGTNKAI

SEQ ID NO: 198168 - protein, 227 aa, Unknown
  Bacterial polypetide isolated from the Sargasso Sea
MRSSVIIFPGSNCDRDMDVALKKFGFKNQMVWHNDQSIPKSDLIVLPGGFSYGDYLRCGSIASKSKIIKSVIDFANSGGLVLGICNGFQILTETGLLNGILQQNKFLNFICSNVFVKVKDKENKFFKNLKKNLLELHIAHNEGNYFCSDDELKSLEDNSQIAVTYCGADGTENETTNPNGAIKNIAGIFNKNKNVLGMMPHPERMIDKYLSGEDGSLFFKNILDNFK

SEQ ID NO: 198169 - protein, 225 aa, Unknown
  Bacterial polypetide isolated from the Sargasso Sea
MKSSVIVFPGSNCDRDIAVALEKMQFKNKMVWHKETSLPNSDLIVIPGGFSYGDYLRSGAIAGKSLIINEVIKAANSGCLILGICNGFQILTETGLLKGTLLRNKNLKFINNDVYIKVINNKTRFSIKYKQNQVLKINIAHNEGNYFTDDNHLNQLNKENLIAFKYCNKKGIANEDSNPNGAINNIAGIFNAKKNILGMMPHPERMVDDIISNTDGMNLFSSLIN

SEQ ID NO: 198170 - protein, 227 aa, Unknown
  Bacterial polypetide isolated from the Sargasso Sea
MKSSVITFPGSNCDRDMDVALKKFGFNNKMVWHDDNELPKSDLVVLPGGFSYGDYLRCGSMASKSKIMQSVINFAKSGGLVMGICNGFQILVETGLVPGVLLRNKYLEFICKNVFVKLDNKENPYFKNIDKDVFELHIAHNEGNYFCTDDQLKEIKDNNQVAIYYSNNKGQIDENSNPNGSIKNIAGIFNKEKNVLGMMPHPERMIDQSLSGEDGSIFFKNLINNIK

SEQ ID NO: 198171 - protein, 274 aa, Unknown
  Bacterial polypetide isolated from the Sargasso Sea
ICKRLKRKPNRTELGMFGVMWSEHCCYRNSKPLLSKFPTKGANVLVGPGENAGVIDVGNNQKLVFKIESHNHPSAIEPFQGAATGVGGILRDIFTMGARPIAVLNSLRFGNLDKLSNVDLLRGVVSGIAHYGNCVGVPTVGGEINFDDSYSGNPLVNVMALGLLETNEIVCSGAKNVGSPVLYVGNTTGRDGVGGASFASSELTTTSLDNRPAVQVGDPFIEKSLIEACLDAFKTGDVISAQDMGAAGLTCSSAEMAANGNLGISIDLDLVLLE

SEQ ID NO: 198172 - protein, 316 aa, Unknown
  Bacterial polypetide isolated from the Sargasso Sea
MSTGSYKSSRRHLKKLHTKGDQVIQGPGENAGVVDIEDDDAIVFKIESHNHPSFIEPYQGAATGVGGIMRDVFTMGARPIANLNSIHFGSTNHEKTRNLLRGVVKGIGGYGNCIGVPTIAGQTCFDESYNGNILVNAMTLGLVNKNKIFYSKAAGINKPVIYVGSKTGRDGIHGASMASAIFDDKIEEKKPTVQVGDPFTEKLLLEACLELMAGKSIISIQDMGAAGLTSSSIEMASKGDLGIEIDLTKVPCREENMTPYEIMLSESQERMLIVLEAGKEEEAKKIFDKWNLDFAVIGKTTNSKNIELFFKNKKSC

SEQ ID NO: 198173 - protein, 159 aa, Unknown
  Bacterial polypetide isolated from the Sargasso Sea
MKITNQIVEKHGLKLEEYSVIKKLLKREPNLLELGIFSAMWNEHCSYKSSRKHLKNLHTTGKQVIQGPGENAGVIDIGDDDAIIFKIESHNHPSYIEPYQGAATGVGGILRDVFTMGARPIALLNSIHFGSPSHFKTKTLLNGVVSGIGGYGNCIGIPT

SEQ ID NO: 198174 - protein, 301 aa, Unknown
  Bacterial polypetide isolated from the Sargasso Sea
LRFGAADHEKTRHLLSGVVSGIGGYGNCIGIPTIGGEVNFDPSYNGNILVNAMAVGLANSDRIFRSAATGPGNPVIYVGAKTGRDGIHGATMASAEFSDETESKRPTVQVGDPFTGKLLMEACLELMASDSVLSIQDMGAAGLTSSSVEMASKGGLGMEMDLDLVPAREEAMSAYELMLSESQERMLMVLKPDATEIARQIFDKWDLDFMPIGKVTETGRLVLLKDGEVACDIPLAPLVDDAPEYDRPQAEVAPRPVLASSEIAGQAPVVDVLKDLLGSVDLASRRWIYEQYDSQVMADTI

SEQ ID NO: 198175 - protein, 191 aa, Unknown
  Bacterial polypetide isolated from the Sargasso Sea
MHAAVIVFPGSNCDRDMAVALERAGAKVSMVWHKDTALPEGIDLIGVPGGFSFGDYLRCGAIAANSPICRSVVAHAEKGGYVLGICNGFQVLTETGLLPGVLLRNAGLKYICKPVDLTVQTADSAYTCGYEAGQTVTFPIAHHDGNYFADAETLKRLHGEARVAFTYNDNPNGSVDDIAGGPVGKTVACSA

SEQ ID NO: 198176 - protein, 227 aa, Unknown
  Bacterial polypetide isolated from the Sargasso Sea
MKSSVIIFPGSNCDRDMDVALKKFGFKNQMVWHNDQSIPKSDLIVLPGGFSYGDYLRCGSIASKSRIIKSVIEFANKGGLVLGICNGFQILTETGLLTGILQQNKYLNFICKNVFVKIKDKKNKYFKNIKKEILELHIAHNEGNYFCTDDELKILKNNNQIAVTYCNELGLENTENNPNGAINNIAGIFNKNKNVLGMMPHPERMIDSYLSGEDGSLFFNNLLNNFG

SEQ ID NO: 198177 - protein, 296 aa, Unknown
  Bacterial polypetide isolated from the Sargasso Sea
KGINKPVVYVGSKTGRDGIHGATMASAEFDENSEEKKPTVQVGDPFTEKLLLEACLELMKKNSIISIQDMGAAGLTSSSIEMASKGNVGIELNLNKVPCRENNMTPYEMMLSESQERMLIILDDKKENEAKKIFDKWDLDFVVIGKTTDSKRLILNFDDKKVADIPITALADEAPQYNRKWTISQNKKKELKLKNLKKIKIEEALQKILSSPDHSNKSWITNQFDQAVMCDTIQKSGGDAAVIRIHKKEKAISISVDSSANYCNADAKIGGKQIICENWRKMISVGSKPLAITNCL

SEQ ID NO: 198178 - protein, 272 aa, Unknown
  Bacterial polypetide isolated from the Sargasso Sea
MRDVFTMGARPIANLNSIHFGSPQHKKTRNLLRGVVKGIGGYGNCIGVPTIAGQTTFDESYNGNILVNAMTLGLVNKNKIFYSKAAGLDKPVIYVGSKTGRDGIHGASMASATFDDKIEEKKPTVQVGDPFTEKLLLEACLELMADNSIIAIQDMGAAGLTSSSVEMASKGSLGIELNLSEVPCREEKMTPYEIMLSESQERMLIVLEKGKEEHAKKIFDKWNLDFAVIGKTTDTKKIELIFDNKKVAEIPIDLLAENAPIYDRPWKKLNYL

SEQ ID NO: 198179 - protein, 157 aa, Unknown
  Bacterial polypetide isolated from the Sargasso Sea
MTVNEKIAIEHGLKADEYKKICDLLKRTPNITELGIFSAMWNEHCSYKSSRLHLKKLPTTGKKVIQGPGENAGVIDIEDGDAIVFKIESHNHPSFIEPYQGAATGVGGIMRDVFTMGARPIANLNSIHFGSPQHKKTKNLLRGVVHGIGGYGNCMGI

SEQ ID NO: 198180 - protein, 288 aa, Unknown
  Bacterial polypetide isolated from the Sargasso Sea
MFHHFPTEGETILTKTGEENAGAIDLGDGWCAVFKMESHNHPSAIEPYQGAATGVGGILRDIFAMGMRPIALLDSLRFGPLDDRNNKYLFNGVVSGIGGYGNCIGVPTVGGEVQFDKSYSGNPLVNAMCVGIGRVENLLSASASGPGNPLLLVGADTGRDGIHGATFASVELDENAEEMRPAVQVGNPFLEKLLLEACVELAEEHNDWIVGLQDLGAAGLTSSAIEAASRAGTGIDIDVTLVPRREEKMTAYEVMLSESQERMLVIPKKEHLDDVIHLFRRWEIRADV

SEQ ID NO: 198181 - protein, 272 aa, Unknown
  Bacterial polypetide isolated from the Sargasso Sea
NLDKSSNISLLRGVVAGISHYGNCVGVPTVGGEIDFDDSYSGNPLVNVMALGLLETDEIVCSGAKEVGSPVLYVGNTTGKDGVGGASFASSELTTNSLDNRPAVQVGDPFIEKSLIEACLDAFKTGDVLAAQDMGAAGLTCSSAEMAANGSLGISINLDLVPARENDMSAYQYLLSESQERMLMVVKEEKLNTLINQFKKWGLFANVIGEVISKREVIISQKNQIVAQIPTSALSDETPINIHNIIKEPPIHLLEKWKWTEEELPAISENKI

SEQ ID NO: 198182 - protein, 239 aa, Unknown
  Bacterial polypetide isolated from the Sargasso Sea
MHLTISEHGEMNSTIVIFPGTNREHDMVMAVQQASGKKPNFVWYNDTSFPKTDLIIVPGGFSYGDYLRSGAMAARSPAMNSVLEYASKGVPILGVCNGFQILTEVGLLPGALIRNKNLKFICRNVSIKVEVDDSIFTSRYSKGQILSIPVAHNDGNYFASEGLLQELHDKSQIAFKYTDQSGRVDASTNPNGSCENIAGILNAQKNVLGLMPHPENATDRNLGGIDGRPLFQSLVDAIT

SEQ ID NO: 198183 - protein, 254 aa, Unknown
  Bacterial polypetide isolated from the Sargasso Sea
LPITGAQVIQGPGENAGVVDIGDNQAIVFKIESHNHPSFIEPFQGAATGVGGILRDIFTMGARPIALMNVLRFGERKNSLTKHLVNGVVKGIGGYGNCIGIPTIGGETYFHKSYNENILVNAMAIGLADKNKIFYSAATGVGNPVIYVGAKTGRDGIHGATMSSAEFSDDTENKKPTVQVGDPFTGKLLLEACLELMESDSILSIQDMGAAGLTSSSVEMASKGNLGIKINLNKIPLREKNMSSYEIMLSESQE

SEQ ID NO: 198184 - protein, 195 aa, Unknown
  Bacterial polypetide isolated from the Sargasso Sea
MNEPEMTFENAASMGLSEDEWRLILKRLARTPNLCELGIFSAMWSEHCSYKSSKKWLKTLPVDGSQVIEGPGENAGVVDIGDGLAAIFKIESHNHPSYIEPYQGAATGVGGILRDVFTMGARPVALLNALRFGAADHEKTRHLLGGVVSGIGGYGNCIGIPTVGGEVNFDASYNGNILVNAMAVGLANSNRIFRS

SEQ ID NO: 198185 - protein, 263 aa, Unknown
  Bacterial polypetide isolated from the Sargasso Sea
MKKNKDSKNELSLKTVFAHGLSLNEYEKIKCLIGRAPNITELGIFSAMWNEHCSYKSSKKWLKNLYSKGDAVICGPGENAGIIAIDEKIALAFKMESHNHPSYIEPFNGAATGVGGILRDVFTMGARPIAVMNSLSMGSINYSSTKHILKGVVKGISHYGNSFGVPNIGGELRFHRSYNSNCLVNAFAAGLVERHKIFYSKASGVNAPIIYMGAKTGKDGVGGATMASESFSENLEDKNKKRPNVPIGDPFLEKKLMEACLEL

SEQ ID NO: 198186 - protein, 202 aa, Unknown
  Bacterial polypetide isolated from the Sargasso Sea
MKVTETVAIEHGLKKEEFKKICELLKRIPNITELGIFSAMWNEHCSYKSSRKHLKKLHTKGKHVIQGPGENAGVIDIGDDDAIVFKIESHNHPSFIEPYQGAATGVGGIMRDVFTMGARPIANLNSIHFGSPQHKKTKNLLRGVVKGIGGYGNCIGVPTIAGQTIFDESYNGNILVNAMTLGLVNKNKIFYSKAAGINKPVI

SEQ ID NO: 198187 - protein, 296 aa, Unknown
  Bacterial polypetide isolated from the Sargasso Sea
FYSKAAGLNKPVIYVGSKTGRDGIHGASMASASFDEKIEEKKPTVQVGDPFTEKLLLEACLELMAGDSIIAIQDMGAAGLTSSSIEMASKGNLGIEINLNKVPCRETKMTPYEIMLSESQERMLIVLESGKEEMAKKIFDKWNLDFAIIGKTTNSKNIELFFDNEQVANIPVNTLVENSPMYNRKWKKAKLPKKNKIKKETYSKLKIKDVLKKILSNPNVCNKEWIWQQYDHTVMGDTIQKPGGDSGVVRVHGTDKAVAASVDSSAVYCWAHPLTGGKQVVAESWRNLISVGATPI

SEQ ID NO: 198188 - protein, 225 aa, Unknown
  Bacterial polypetide isolated from the Sargasso Sea
MEVSESVALDHGLKNEEYKKICELLKRVPNITELAIFSAMWNEHCSYKSSRKHLKKLHTSGKQVIQGPGENAGVINIGDDDAIVFKIESHNHPSFIEPYQGAATGVGGIMRDVFTMGARPIANLNSIHFGLPQHKKTKNLLRGVVKGIGGYGNCIGVPTIAGQTSFDDSYNGNILVNAMTIGLVNKNKIFYSKAAGIGKPVIYVGIKTGRDGIHGASMASATFDD

SEQ ID NO: 198189 - protein, 290 aa, Unknown
  Bacterial polypetide isolated from the Sargasso Sea
GDPFTEKLLLEACLELMSDKSIIAIQDMGAAGLTSSSVEMASKGNLGIELDLSKVPCREENMTPYEIMLSESQERMLIVLENGKEDYAKKIFEKWNLDFAIIGKTTNSKQIEIKFNNEKVAEIPINLLAENAPVYDRKWKKTKIPQKLKLNKDEFKSLNLSDCLKKILANPNISEKKWIWDQFDHTVMGDTIQKPGGDAGVVRVHGTKKAIAASVDSSASYCYSHPLTGGKQIVCESWRNLISVGAKPIAITNCLNFGNPEKEKNMGEFVECVEGITESSKYLNFPSSFW

SEQ ID NO: 198190 - protein, 193 aa, Unknown
  Bacterial polypetide isolated from the Sargasso Sea
MEVNEKIAIDHGLKPDEYKKICDLLKRVPNLTELGIFSAMWNEHCSYKSSRLHLKKLNTKGKKVIQGPGENAGVIDIGDDDAIVFKIESHNHPSFIEPYQGAATGVGGIMRDVFTMGARPIANLNSIHFGSTQHKKTKNLLRGVVKGIGGYGNCIGVPTIAGQTCFDQSYNGNILVNAMTLGLVNKNKIFYSK

SEQ ID NO: 198191 - protein, 299 aa, Unknown
  Bacterial polypetide isolated from the Sargasso Sea
GLSEQDYMDCKSLLKRVPLRTELALFSAMWSEHCSYKSSKYWLKKLPHKAEYVIQGPGENAGVIDIGYDNALIFKIESHNHPSFIEPYQGAATGVGGIMRDIFTMGARPIANLNCLRFGNLHNRRTKYLFNGVVEGIGDYGNCTGIPTVAGECSFDSRYNQNILVNAMTIGITKKNKVFYAKAGKIGNKVVYLGSKTGRDGIHGASMSSESFSKDSKSLKPTVQVGDPFSEKLLMEACLELMRKQLVIGLQDMGAAGLTSSAVEIAASSNVGIRLNLDKVPLRDGEMNADEIMLSESQE

SEQ ID NO: 198192 - protein, 234 aa, Unknown
  Bacterial polypetide isolated from the Sargasso Sea
MLVNEKVAIEHGLKSDEYKKICELLKRTPNITELGIFSAMWNEHCSYKSSRLHLKKLPTTGKNVIQGPGENAGIIDIEDGDAIVFKIESHNHPSFIEPYQGAATGVGGIMRDVFTMGARPIANLNSIHFGSSQNKKTKNLLRGVVHGIGGYGNCMGVPTIAGQTSFDSSYNGNILVNAMTLGLVKKDKIFYSKAAGLNKPVIYVGSKTGRDGIHGASMASASFDDKIEEKKPTV

SEQ ID NO: 198193 - protein, 240 aa, Unknown
  Bacterial polypetide isolated from the Sargasso Sea
MSNLREGLSTFEIAEDLGLKKDEYEQICSLMGRIPNIQEISIFSAMWSEHCSYKSSRKWLKTLPTKGEVVIHGPGENAGAIDIGDGKVAIFKIESHNHPSFIEPYQGAATGVGGILRDVFTMGARPVALLNALRFGSIENNKTKYLLEGVVSGIGGYGNCIGIPTIGGETNFDKSYDGNILVNAMAIGITEKDKIFLSAARGVGYPLIYVGAKTGRDGIHGASMSSTEFDDKTEEKRPTV

SEQ ID NO: 198194 - protein, 245 aa, Unknown
  Bacterial polypetide isolated from the Sargasso Sea
MNYLGRDPSHTEIGIFSVMWSEHCSYKSSRHWLKKLHTEGIQVIQGPGENAGVVDIGDNQAIIFKMESHNHPSFIEPYQGAATGVGGIMRDVFTMGARPIALVNSIRFGELTHPKTKFLLSGVVAGIGGYGNCVGIPTIAGETGFDSSYNGNNLVNAMCVGLTTKDKIFYSKASGIGNPVVYVGAKTGRDGIHGATMASGEFDDESEKNRPTVQVGDPYAEKLLLEACLELMQKDAIISIQDMGA

SEQ ID NO: 198195 - protein, 210 aa, Unknown
  Bacterial polypetide isolated from the Sargasso Sea
LGDDDAVVFKIESLNHPSFIEPYQGAATGVGGILRDVFTMGARPIALMNSIHFGSPKNHKTKNLLSGVVSGIGGYGNSVGIPTVGGETKFNDTYNENILVNAMAVGLANKNKIFYSKAKGLNKAVVYVGSKTGRDGIHGATMASAEFDDNSEEKKPTVQVGDPFTEKLLLEACLELMKDNSIISIQDMGAAGLTSSSIEMASKGKLGIEL

SEQ ID NO: 198196 - protein, 298 aa, Unknown
  Bacterial polypetide isolated from the Sargasso Sea
RNLLHGVVSGIGGYGNCIGIPTVAGETKFNQTYNENILVNAMAVGLVKKNKIFYSKAKGIGKSVVYVGSKTGRDGIHGASMASAEFDDDSEEKKPTVQVGDPFTEKLLMEACLELMKDKSIISIQDMGAAGLTSSSVEMAFKGDLGMEINLDKVPCREEKMTPYEMMLSESQERMLIILEDGKENEAKKIFDKWDLDFVVIGKTIETKKLKLYYKNDIVADIPIEALSSSAPQYERKWTKTELPKKETNFKNLKKINFKESFLKIISSSNHSNKNWITEQYDQMVMCDTIQKSGSDAA

SEQ ID NO: 198197 - protein, 258 aa, Unknown
  Bacterial polypetide isolated from the Sargasso Sea
MLVNEKIAIDHGLKADEYKKICDLLKRTPNLTELGIFSAMWNEHCSYKSSRLHLKKLPTEGKKVIQGPGENAGVIDIEDGDAIVFKIESHNHPSFIEPYQGAATGVGGIMRDVFTMGARPIANLNSIHFGSPQHKKTKNLLRGVVHGIGGYGNCMGVPTIAGQTSFDSSYNGNILVNAMTLGLVKKNKIFYSKAAGINKPVIYVGSKTGRDGIHGASMASASFDEKIEEKKPTVQVGDPFTEKLLLEACLELMAGDSI

SEQ ID NO: 198198 - protein, 208 aa, Unknown
  Bacterial polypetide isolated from the Sargasso Sea
MSIGVLVFPGSNCDRDVQWATEGCLGMPTRRIWHEETDLSGLDVVVLPGGFSYGDYLRCGAIARFAPALQALLGFAAQGGRVLGICNGFQVLTELGLLPGALTRNRDLHFICEDAPLQVVSSRTPWLENYGKDTALTLPIAHGEGRYQCSDDTLKHLQDADAIALRYQANPNGSVGDIAGITNDSGNVLGLMPHPERACDPATGGTDG

SEQ ID NO: 198199 - protein, 193 aa, Unknown
  Bacterial polypetide isolated from the Sargasso Sea
DQEIPKSDLIVLPGGFSYGDYLRCGSIAGKSKIIKSVVEFANSGGLVLGICNGFQILTETGLLPGVLLQNKYQKFICKNVHVKINDKENKYFKNIKKEILELHIAHNEGNYFCSEDEIKSLNDNNQIAVTYCNEKGKEDERYNPNGALRNIAGIFSKNKNILGMMPHPERVIDKYLSSNDGNFFFENLFENLK

SEQ ID NO: 198200 - protein, 289 aa, Unknown
  Bacterial polypetide isolated from the Sargasso Sea
YSQAKGIDQPVIYVGSKTGRDGIHGASMASAEFDEDTENKKPTVQVGDPFTEKLLLEACLELMKEDAIISIQDMGAAGLTSSSVEMASKGNLGIEINLNKIPCREDKMSPYEMMLSESQERMLLILKSEKINIAENIFIKWGLDFSVIGKTSNTNKLVLKFNNKEVANLPLSSLSTDVPVYDRKWKKTKIKKKLNSDTNFKSIKILDSLKKILTSPNNSEKNWVWEQYDNTVMGDTIQKPGGDSAVIRIHGKNKAIAITVDSSAHYCLANPITGAKQVVSEAWRNLISV

SEQ ID NO: 198201 - protein, 307 aa, Unknown
  Bacterial polypetide isolated from the Sargasso Sea
YTQSQLNEIALSSEEYELIVEKLGRDPNYLELGLFGALWSEHCGYKHSKNLIKTLPNSSTALLAKPGEENAGVIDIGNNLAIVFKIESHNHPSAVEPYQGAATGVGGIIRDILAMGARPIAILNSLRFGHVNNNRNEYLFEGIVSGISGYGNCIGIPNIGGETKFSDSYSGNPLVNAFCLGITNKNNLMSAASYTPGNIIMVIGSPTGRDGIHGASGLASRNLNKNESEQDKRPTVQIGNPFMEKVLIESCLEIVSKNLIESLQDLGAAGLTSAIVETVDKGKTGFNIDLAKVHQRENNMTPYEIML

SEQ ID NO: 198202 - protein, 166 aa, Unknown
  Bacterial polypetide isolated from the Sargasso Sea
MEVTEAVAIDHGLKKEEFSKICKLLKRIPNLTELAIFSAMWNEHCSYKSSRKHLKKMHTKGKQVIQGPGENAGIIDIGDDDAIVFKIESHNHPSFIEPYQGAATGVGGIMRDVFTMGARPIANLNSIHFGSPQNKKTRNLLRGVVKGIGGYGNCIGVPTIAGQTTF

SEQ ID NO: 198203 - protein, 297 aa, Unknown
  Bacterial polypetide isolated from the Sargasso Sea
VGSKTGRDGIHGASMASAIFDDQIEEKKPTVQVGDPFTEKLLLEACLELMTDDSIISIQDMGAAGLTSSSVEMASKGKLGIELDLNKVPCREPNMTPYEIMLSESQERMLIVLENGKEDKAKKIFDKWNLDFAIIGKTTNSKKIEIYFDGKKNADIPIEFLSDKAPEYNRKWKKTKLPVKNKINKDLYKNLKIADVLKKILSNPNVCNKKWIWEQYDHTVMGDTIQKPGGNAGVVRVHGSNKAIAASVDSSANYCFAHPITGGKQIVCESWRNIISVGASPIAITNCLNFGNPEKDE

SEQ ID NO: 198204 - protein, 220 aa, Unknown
  Bacterial polypetide isolated from the Sargasso Sea
MKASIIVFPGSNCDRDIAVSIKKLTDLKPIMVWHKETSIPDSDLIVIPGGFTFGDYLRCGSIAANSPIMNDVIKKATDGLPTLGICNGFQILTESGLLPGTLIKNDCLSFLCKTVSIRVENNETNFSKKYKQNEVINIPIAHNEGNFFANEDTLKKIKDSNQIIFKYCNQNGEVNNEADPNGSIENIAGITNEQGNVLGMMPHPERATCEITKLSDGENP

SEQ ID NO: 198205 - protein, 197 aa, Unknown
  Bacterial polypetide isolated from the Sargasso Sea
MAQLDSELPKSDLLVLPGGFSYGDYLRCGSMASKSKIIQSVIKFAKSGGLLMGICNGFQILTETELLPGALLRNKYSEFICKNVFVKINDTKNNYFKNINKNILELHIAHNEGNFFCSSDQMKSLNDNNQVAVIYCDESGEVNDSSNPNGAINNIAGIFNKQKNILGMMPHPERMIDSYLSGNDGSIFFQNLITNLK

SEQ ID NO: 198206 - protein, 114 aa, Unknown
  Bacterial polypetide isolated from the Sargasso Sea
MEVNESLALEHGLNKDEYKKICDLLNRIPNITELGIFSAMWNEHCSYKSSRLHLKNLPTKGKKVIQGPGENAGVVDIGDDDAIVFKIESHNHPSFIEPYQGAATGVGGIMRDVF

SEQ ID NO: 198207 - protein, 217 aa, Unknown
  Bacterial polypetide isolated from the Sargasso Sea
MTAESNKMTFENATTMGLSRDEWDLINQRLGRVPNLCELGIFSAMWSEHCSYKSSKKWLKTLPVDGSQVIEGPGENAGAVDIGDGLAAIFKIESHNHPSYIEPYQGAATGVGGILRDVFTMGARPIALMNALRFGEADHEKTRHLVSGVVAGIGGYGNCIGIPTVGGEVNFHKSYNGNILVNAMAVGLANSDRIFRSAATGPGNPVIYVGAKTGRDG

SEQ ID NO: 198208 - protein, 275 aa, Unknown
  Bacterial polypetide isolated from the Sargasso Sea
ILVNAMTLGLVNKNKIFYSKATGINKPVIYVGSKTGRDGIHGASMASAVFDDKIEEKKPTVQVGDPFTEKLLLEACLELMADNSIIAIQDMGAAGLTSSSIEMASKGKLGIELDLNKVPCREKNMSPYEIMLSESQERMLIILENGKEINAKKIFDKWNLDFAIIGKTTDSKKIEIYFDKKKVADVPIDLFSENAPVYDRKWKKSKLPQKIKFKKENFKSLKLNDSLKKILSSPNICDKQWIWDQYDQTVMGDTIQKPGGDAGVVRVHGTKKAIA

SEQ ID NO: 198209 - protein, 262 aa, Unknown
  Bacterial polypetide isolated from the Sargasso Sea
VGGASFASSELTITSLDDRPAVQVGDPFVEKSLIEACLDAFKTGDVIAAQDMGAAGLTCSSAEMAANGNLGISIDLDLVPSREDDMSSYQYLLSESQERMLFVVKEEKINHLIEKFNKWGLYASVIGEVIGTNEVIISHKGKIVAQIPTSALSDDTPVNFHNVINNPPDDLLNKWKWKENDLPEIHEQKIFSLKENKNFSFAEIILKLLSNPSIASKRWIYEQYDSQVQTNTVFKPGKSDAAVVRLREQNKKNKSKVFSGVA

SEQ ID NO: 198210 - protein, 220 aa, Unknown
  Bacterial polypetide isolated from the Sargasso Sea
MKSSVIIFPGSNCDRDMDVALKKFGFKNQMVWHNDPKIPKSDLIVLPGGFSYGDYLRCGSIAAKSKIIKSVIEFANSGGLVLGICNGFQILTETGLLPGILQQNKYQKFICKNVYVKINDKENKYFKNIKKEILELHIAHNEGNYFCSEDELKSLNDNNQIAVTYCSENGNDADEFNPNGALKNIAGIFSKNKNILGMMPHPERMIDKCLSSNDGNFFFE

SEQ ID NO: 198211 - protein, 287 aa, Unknown
  Bacterial polypetide isolated from the Sargasso Sea
CIGVPHSWSTCFDESYNGNILVNAMTLGLVNKNKIFYSKAAGINKPVIYVGSKTGRDGIHGASMASAIFDDKIEEKKPTVQVGDPFTEKLLLEACLELMAGKSIISIQDMGAAGLTSSSIEMASKGDLGIEIDLTKVPCREENMTPYEIMLSESQERMLIVLEEGKENEAKKIFDKWNLDFAVIGKTTNSKNIELFFKNEKVAEIPIDFLADNAPMYDRKWIKAKLPKENNFSKDKFKSLKLSDCLKKVLIDPNIADKEWIWDQYDHTVMGDTIQKPGGNAGVVRVH

SEQ ID NO: 198212 - protein, 217 aa, Unknown
  Bacterial polypetide isolated from the Sargasso Sea
MGSNCDRDLKVAIEKCLNTKIELVWHQTSQIKKTNMIFIPGGFSYGDYLRAGILATKSPAIKEVIRWSKKEIPIIGICNGFQILTECKLLPGALIKNIDPKFLCKNINLKISTKNSFTSNYKKKVLKLPIAHSQGNYFLKKNEIKVLQDNEQIVFQYSDFNGLVNSSNNPNGSIDNIAGITNKKKNILGMMPHPERAIGNNNLKDGLNFFESLGKYL

SEQ ID NO: 198213 - protein, 271 aa, Unknown
  Bacterial polypetide isolated from the Sargasso Sea
GYGNCMGIPTVGGEVKFNSSYNENILVNAMAVGLVKKNKIFYSKAKGINQPVIYVGSKTGRDGIHGASMSSAEFDESTEEKKPTVQVGDPFTEKLLLEACLELMRDDSIISIQDMGAAGLTSSSIEMASKGDLGIEINLNKIPCREKNMNPYEIMLSESQERMLLILNDKKVEQAKKIFNKWNLDFAVIGKTTNTKNLVLNFNNKEVANLPISSLSSDAPIYDRKWKKNSISKKSDVRKGFDKFKIEDVLKKILTSPNNSEKRLGMGTIRS

SEQ ID NO: 198214 - protein, 254 aa, Unknown
  Bacterial polypetide isolated from the Sargasso Sea
MQLFFKIESHNHPSFIEPYQGAATGVGGIMRDVFTMGARPIANLNSIHFGSPQHKKTKNLLRGVVKGIGGYGNCIGVPTVAGQTSFDESYNGNILVNAMTLGLVNKNKIFYSKAAGVDKPVIYVGSKTGRDGIHGASMASAIFDDKIEEKKPTVQVGDPFTEKLLLEACLELMEGNSIIAIQDMGAAGLTSSSVEMASKGKLGIELNLNKVPCREEKMTPYEIMLSESQERMLIVLENGKEDHAKKIFDKWNLD

SEQ ID NO: 198215 - protein, 223 aa, Unknown
  Bacterial polypetide isolated from the Sargasso Sea
PGTWSESDTFYATKDILGINTEYIWHKDQKLNNTDLIILPGGFSYGDYLRTGAIASFSPIVNKVKEFANSGGPVIGICNGFQILCETQLLPGILLRNKDLSFVCEWSNLKVNNNSIFTNKFKNDEIIKIPISHGEGNFQADERTIKELEEENRVIFRYCSDEGETNLISNPNGSINNIAGIINKQGNVLGMMPHPEKACEKLIGGIDGLGIFESVIKRVTNGN

SEQ ID NO: 198216 - protein, 223 aa, Unknown
  Bacterial polypetide isolated from the Sargasso Sea
MEVTEAIAIDHGLKKEEFSKICELLKRTPNLTELAIFSAMWNEHCSYKSSRKHLKKMHTKGKQVIQGPGENAGVIDIGDDDAIVFKIESHNHPSFIEPYQGAATGVGGIMRDVFTMGARPIANLNSIHFGSPQHKKTRNLLRGVVKGIGGYGNCIGVPTIAGQTTFDESYNGNILVNAMTLGLVNKNKIFYSKATGLDKPVIYVGSKTGRDGIHGASMASATI

SEQ ID NO: 198217 - protein, 335 aa, Unknown
  Bacterial polypetide isolated from the Sargasso Sea
FIEPYQGAATGVGGIMRDVFTMGARPIANLNSIHFGSPEHKKTRNLLRGVVKGIGGYGNCIGVPTIAGQTTFDESYNGNILVNAMTLGLVNKNKIFYSKAAGIGKPVIYVGSKTGRDGIHGASMASATFDDKIEEKKPTVQVGDPFTEKLLLEACLELMADKSIIAIQDMGAAGLTSSSVEMASKGKLGIELDLSKVPCRETSMTPYEIMLSESQERMLIVLEKGKENHAKKIFDKWNLDFSVIGKTTNTKKIELIFDNKKVAEIPIELLAENAPIYDRKWKKTKLPQKIKFNKNKFKSLKLSDCLKKLLSNSNICDQQWIWDQYDHTVMGDTIQ

SEQ ID NO: 198218 - protein, 314 aa, Unknown
  Bacterial polypetide isolated from the Sargasso Sea
FGVPTVGGEVRFDPAYNGNCLVNAFAAGLADADKIFYSAASGVGMPVVYLGAKTGRDGVGGATMASAEFDETIEEKRPTVQVGDPFTEKRLMEATLELMATGAVISIQDMGAAGLTCSAVEMGDKGGLGVKLQLDRVPQREENMTAYEMMLSESQERMLMVLRPEKEAEARAVFEKWDLDFAIVGETIAEDRFLIMHGNDVKADLPLATLSGSAPEYDRPWNEPQPAEPLEADSVPGVDPIDGLKALVASPNYCSRQWVYEQYDTMVMADTARGPGLGAGLIRVHDTDKLLAFTSDVTPRYVKGEPRRRRQASR

SEQ ID NO: 198219 - protein, 289 aa, Unknown
  Bacterial polypetide isolated from the Sargasso Sea
MKKFEEKKPTVQVGDPFTEKLLLEACLELMAGDSIIAIQDMGAAGLTSSSIEMASKGNLGIEINLNKVPCRETKMTPYEIMLSESQERMLIVLENGKEEQAKKIFDKWNLDFAVIGKTTDSKNIELFFDSEKVASIPVHTLVENSPMYDRKWKKSKLPKKNKIKKETFSKLKIKDVLKKILSNQNICSKEWIWQQYDHTVMGDTIQKPGGDAGVVRVHGTNKAIAASVDSSAVYCWAHPLTGGKQVVAESWRNLISVGATPIAITNCLNFGSPENEDNMGEFVECVQGI

SEQ ID NO: 198220 - protein, 232 aa, Unknown
  Bacterial polypetide isolated from the Sargasso Sea
MEVNEQIAIDHGLKKEEFNKICDLLKRVPNITELGIFSAMWNEHCSYKSSRFHLKKLNTKGKKVIQGPGENAGVIDIEDDDAIVFKIESHNHPSFIEPYQGAATGVGGIMRDVFTMGARPIANLNSIHFGSPQHPKTKNLLRGVVKGIGGYGNCMGIPTIGGQTSFDESYNGNILVNAMTLGLVNKNKIFYSKAAGINKPVIYVGSKTGRDGIHGASMASAIFDEKIEEKKP

SEQ ID NO: 198221 - protein, 221 aa, Unknown
  Bacterial polypetide isolated from the Sargasso Sea
IFPGSNCDRDMDVALKKFGFKNKMVWHNDNVIPKSDLVVLPGGFSYGDYLRCGSIAAKSNIINSVIEFANKGGLVIGICNGFQILIETGLVTGALLRNKYLKFICKNIFVKANKTHNKYFNKIKKDILELHIAHNDGNYFCSQDDLKSIQDNDQIAVRYCDSNGEISENSNPNGSIQNIAGVFNEKKNILGMMPHPERVIDSCLSSNDGSYFFENLLSNMK

SEQ ID NO: 198222 - protein, 294 aa, Unknown
  Bacterial polypetide isolated from the Sargasso Sea
TELGIFSAMWNEHCSYKSSRLHLKKLPTKGKKVIQGPGENAGVIDIEDNDAIVFKIESHNHPSFIEPYQGAATGVGGIMRDVFTMGARPIANLNSIHFGSPQHKKTKNLLRGVVHGIGGYGNCMGVPTVAGQTSFDSSYNGNILVNAMTLGLVKKDKIFYSKAAGLNKPVIYVGSKTGRDGIHGASMASASFDDKIEEKKPTVQVGDPFTEKLLLEACLELMAGDSIIAIQDMGAAGLTSSSIEMASKGNLGIEMNLNKVPCREAKMTPYEIMLSESQERMLIVLENGKEKQAK

SEQ ID NO: 198223 - protein, 325 aa, Unknown
  Bacterial polypetide isolated from the Sargasso Sea
LVNGVVSGIGGYGNCFGVPTVGGETRLDSSYNGNCLVNAFAAGLVDKDKIFYSAASGIGMPVVYLGAKTGRDGVGGATMASAEFDDTIEEKRPTVQVGDPFTEKRLMEACLELMATGAVISIQDMGAAGLTCSAVEMGDKGNLGISLDLEKVPTREPNMSAYEMMLSESQERMLMVLDPEKENIAKTIFDKWDLDFAVVGETISEDRFLIKLNGVVKADLPLKALAGNAPEYDRPWIEAQPNSELKDVVEVNAIDGLKALISSANYCSKSWIYEQYDSQVMADTIERPGFGAGIVRVHGTKKSIAFTSEVTPRYVRANPLKEKAG

SEQ ID NO: 198224 - protein, 260 aa, Unknown
  Bacterial polypetide isolated from the Sargasso Sea
MLVNEKVAIEHGLKTDEYKKICKLLRRTPNITELGIFSAMWNEHCSYKSSRLHLKKLPTKGKKVIQGPGENAGVVDIEDGDAIVFKIESHNHPSFIEPYQGAATGVGGIMRDVFTMGARPIANLNSIHFGSPQHKKTKNLLRGVVHGIGGYGNCMGVPTIAGQTSFDSSYNGNILVNAMTLGLVKKNKIFYSKAAGLNKPVIYVGSKTGRDGIHGASMASASFDEKIEEKKPTVQVGDPFTEKLLLEACLELMAGDSIIA

SEQ ID NO: 198225 - protein, 167 aa, Unknown
  Bacterial polypetide isolated from the Sargasso Sea
MAARTPVLKALIRAAERGVRVIGICNGFQVLTECGLLPGALQRNSGLHFICDTPLIEVIQDRSCFTSRYQKGELIRLPIAHGEGNFICDELTLRHLQVENRIVFRYVSGSNPNGSVDNIAGILNSKGNVLGMMPHPERAMADWMGSSDGRRLFESALNLFPETADAA

SEQ ID NO: 198226 - protein, 145 aa, Unknown
  Bacterial polypetide isolated from the Sargasso Sea
MNDADYPKPAITPEIIAEHGLSASEYDKVLEIMGREPNITELGIFSVMWSEHCSYKSSKHWLKLLPTEAPWVICGPGENAGIIDIGDGQAAVFKMESHNHPSYIEPYQGAATGVGGILRDVFTMGARPVANMNALRFGQPTHPKT

SEQ ID NO: 198227 - protein, 234 aa, Unknown
  Bacterial polypetide isolated from the Sargasso Sea
RDIFAMGAYPIALLNSLRFGPQDVPRNRYLLNGVVEGISTYGNCLGIPDVGGEIEFEECFTTNPLVNAMCVGIIDSNSPVLNAKADKEGDLAILVGADTGRDGIHGASGLASQSLEEGLDSRSAVQVGNPFLEKVLLESCLISAKMEGIIGMQDLGAAGLTSSVIEVAEKSNLGIELNLDRVHTKEEGMTPYEIMLSESQERMLVIVDPKSEDAFLKFFQDRDLKANTIGTFNK

SEQ ID NO: 198228 - protein, 269 aa, Unknown
  Bacterial polypetide isolated from the Sargasso Sea
WLWNCIGVPTIGGQTLFDESYNGNILVNAMTLGLVNKKKIFYSKAAGLNKPVIYVGSKTGRDGIHGASMASTIFDEKIEEKKPTVQVGDPFTEKLLLEACLELMADNSIIAIQDMGAAGLTSSSVEMASKGKLGIELNLNKVPCREENMTPYEIMLSESQERMLIVLENGKEKKAKKIFDKWNLDFSVIGKTTNTKNIEIYFDKKVVANVPIDYLSENAPLYERKWKKTKLPQKLKFKKEKFKSLKILDCLKKVLSNPNVCDKEWVWEQ

SEQ ID NO: 198229 - protein, 257 aa, Unknown
  Bacterial polypetide isolated from the Sargasso Sea
IHFGSPDHPKTKNLLRGVVKGIGGYGNCMGIPTIGGQTSFDESYNGNILVNAMTLGLVNKNKIFYSKAAGVNKPVIYVGSKTGRDGIHGASMASAIFDDKIEEKKPTVQVGDPFTEKLLLEACLELMSGKSIISIQDMGAAGLTSSSIEMASKGNLGIELYLDKVPCREEGMTPYEIMLSESQERMLIVLEKGKEAEAKKIFDKWNLDFAIIGKTTNSKKIELFFDKKNVGTIPIDILAENAPLYDRKWKKTKLPNK

SEQ ID NO: 198230 - protein, 316 aa, Unknown
  Bacterial polypetide isolated from the Sargasso Sea
ATSFDSSYNGNILVNAMTLGLVKKNKIFYSKAAGLNKPVIYVGSKTGRDGIHGASMASASFDDKIEEKKPTVQVGDPFTEKLLLEACLELMAGDSIIAIQDMGAAGLTSSSIEMASKGNLGIEINLNKVPCRESKMTPYEIMLSESQERMLIVLENGKEEQAKKIFDKWNLDFAVIGKTTKSKKIQLYFDNELVANIPVNTLVENSPMYDRKWKKAKLPKKIKIKKEDINNLKIIEVLKKILANPNICSKEWIWQQYDHTVMGDTIQKPGGDSGVVRVHGTNKAVAASVDSSAVYCWAHPLTGGKQIVCESFRNLI

SEQ ID NO: 198231 - protein, 313 aa, Unknown
  Bacterial polypetide isolated from the Sargasso Sea
VGGIMRDVFTMGARPIANLNSIHFGSPQNKRTKNLLRGVVHGIGGYGNCMGVPTIAGQTSFDSSYNGNILVNAMTIGLVKKNKIFYSKAAGLNKPVIYVGSKTGRDGIHGASMASASFDEKIEEKKPTVQVGDPFTEKLLLEACLELMAGDSIIAIQDMGAAGLTSSSIEMASKGNLGIEINLNKVPCRETKMTPYEIMLSESQERMLIVLENGKEEQAKKIFDKWNLDFAVIGKTTNTKNIELFFDNKRVANIPVNSLVENSPMYDRKWKRSKLPKKNIIKKDALKKLKIKDVLKKILSNQNVVAKSGLATI

SEQ ID NO: 198232 - protein, 167 aa, Unknown
  Bacterial polypetide isolated from the Sargasso Sea
MKVTKEQIESHGLKFEEYEKIKELLGREANLLELGIFSAMWNEHCSYKSSKIHLKKLPTKNKIVIQGPGENAGVIDIGDDDAIVFKIESHNHPSFIEPYQGAATGVGGILRDVFTMGARPIALMNSIHFGSPENKKTQNLLSGVVSGIGGYGNSVGVPTVGGETKFN

SEQ ID NO: 198233 - protein, 273 aa, Unknown
  Bacterial polypetide isolated from the Sargasso Sea
MKRTPNITELGIFSAMWNEHCSYKSSRKHLKNLHTQGKRVIQGPGENAGVIDVDDEDAIVFKIESHNHPSFIEPYQGAATGVGGIMRDVFTMGARPIANLNSIHFGSTQHKKTKNLLRGVVKGIGGYGNCIGVPTIGGQTCFDESYNGNILVNAMTLGLVNKKKIFYSKAAGIGKPVIYVGSKTGRDGIHGASMASAVFDDKIEEKKPTVQVGDPFTEKLLLEACLELMADDSIISIQDMGAAGLTSSSVEMASKGKLGIELDLSKVPCREDK

SEQ ID NO: 198234 - protein, 131 aa, Unknown
  Bacterial polypetide isolated from the Sargasso Sea
MQTGVITFPGSNCDRDMFDALSKVSSKCHKIWHGDTELPSNLDFIAIPGGFSYGDYLRCGSIAANSAIMSEVKKFAAKGGYILGVCNGFQILTEAGLLPGTLLRNKNLKFICDQVELEIINKNTKFTKSFK

SEQ ID NO: 198235 - protein, 196 aa, Unknown
  Bacterial polypetide isolated from the Sargasso Sea
MKITDSLVEKHGIKKEEYKKILTLIGREPNLLELGIFSAMWNEHCSYKSSKKILKRLPTKNKKVIQGPGENAGIVDIGDNDAIVFKIESHNHPSYIEPYQGAATGVGGILRDVFTMGARPIAILNSLHFGSPTHFKTKNLLSGVVSGIGGYGNCIGIPTVGGEVKFDSSYNENILVNAMAVGLVKKDKIFYSKAQG

SEQ ID NO: 198236 - protein, 297 aa, Unknown
  Bacterial polypetide isolated from the Sargasso Sea
YKSSKKWLKTLPTKNERVIQGPGENAGVIDIDDNDVAIFKIESHNHPSFIEPYQGAATGVGGILRDIFTMGARPVASLNSLRFGSADHPKTKYLLNGVVSGIAGYGNCIGVPTVGGEIEFDSCYNGNILVNAMNIGITKKNKVFYSIASGVGNPVIYVGSKTGRDGIHGASMASQEFDENTEAKKPTVQVGDPFSEKLLLEACLELMKTNAIVSIQDMGAAGLTSSSVEMASKGKVGIEINLDKVPCREKGMSPYEIMLSESQERMLIVLKEGKEKDCEKIFNKWGLDFSIIGKLTK

SEQ ID NO: 198237 - protein, 197 aa, Unknown
  Bacterial polypetide isolated from the Sargasso Sea
MVEVNEQIAIDHGLKKDEYKKICDLLKRTPNITELGVFSAMWNEHCSYKSSRRHLKKLHTKGDQVIQGPGENAGVVDIEDDDAIVFKIESHNHPSFIEPYQGAATGVGGIMRDVFTMGARPVANLNSIHFGSIDHEKTRNLLRGVVKGIGGYGNCIGVPTIAGQTCFDESYNGNILVNAMTLGFSNKNKYFTLKLLE

SEQ ID NO: 198238 - protein, 284 aa, Unknown
  Bacterial polypetide isolated from the Sargasso Sea
MIVNEQVAINHGLKKDEYAKICELLKRTPNITELGIFSAMWNEHCSYKSSRLHLKKLPTKGKKVIQGPGENAGVIDIEDNDAIVFKIESHNHPSFIEPYQGAATGVGGIMRDVFTMGARPIANLNSIHFGSPQHKKTKNLLRGVVNGIGGYGNCMGVPTVAGQTSFDSSYNGNILVNAMTLGLVKKDKIFYSKAAGLNKPVIYVGSKTGRDGIHGASMASASFDDKIEEKKPTVQVGDPFTEKLLLEACLELMAGDSIIAIQDMGAAGLTSSSIEMASKGNLWN

SEQ ID NO: 198239 - protein, 299 aa, Unknown
  Bacterial polypetide isolated from the Sargasso Sea
AVQVGDPFTEKCLMEACFELMNAGAVRSIQDMGAAGLTCSAVEMGDKGDLGIELYLERVPTREKSMTAFEMMLSESQERMLFVLSPDKEKLAENIAKKWNLEFAIVGKTIKQDRFRVFLNGEIEANLPLKALSRSAPEYDRPWTKPPQHKNYAHNVANLNSLDCLKIIISSPNYCSRKKVWQQYDHTILSNTLIGPGSDAAVIRIENTEKALALTCDVTPRYCLANPLEGGKQAVAESFRNIIASGATPIAITDNLNFGNPERPEIMGQFVDCIKGISEACVKLNMPVVSGNVSLYNET

SEQ ID NO: 198240 - protein, 258 aa, Unknown
  Bacterial polypetide isolated from the Sargasso Sea
MIEVNEKIAIEHGLKKEEYKKICDLLKRTPNITELGIFSAMWNEHCSYKSSRLHLKKLHTKGEQVIQGPGENAGVVNIDDNDAIVFKIESHNHPSFIEPYQGAATGVGGIMRDVFTMGARPIANLNSIHFGSPDHEKTRNLLRGVVKGIGGYGNCIGVPTIAGQTCFDESYNGNILVNAMTLGLVNKNKIFYSKAAGINKPVIYVGSKTGRDGIHGASMASAIFDDKIEEKKPTVQVGDPFTKKLLLEACLELMAGKS

SEQ ID NO: 198241 - protein, 287 aa, Unknown
  Bacterial polypetide isolated from the Sargasso Sea
MEIVLGVPTIAGQTSFDSSYNGNILVNAMTLGLVKKDKIFYSKAAGLNKPVIYVGSKTGRDGIHGASMASASFDEKIEEKKPTVQVGDPFTEKLLLEACLELMAGDSIISIQDMGAAGLTSSSIEMASKGNLGIEINLNKVPCRESKMTPYEIMLSESQERMLIVLENGKEEQAKKIFDKWNLDFAVIGKTTKSKKIELYFDNEKVANIPVNTLVENSPMYDRKWKKAKLPKKNKIKKNELNNLKILNVLKKILSNPNVCSKEWIWQQYDHTVMGDTIQKPGWRFLV

SEQ ID NO: 198242 - protein, 227 aa, Unknown
  Bacterial polypetide isolated from the Sargasso Sea
MKSSVIVFPGSNCDRDIDVALKKFQIDNKMVWHDESVLPKTDLVVLPGGFSYGDYLRSGCIASKSKIINEVIKHGKRGGLILGICNGFQILIESGLLPGVLLRNKKLRFISKDVFLKVTNVNNRFCLNYKKKNIIKLPIAHNEGNYFAKKKLLNELEDNNLIAFKYTNNKGVIDENSNPNGSLNNIAGILNYERNILGMMPHPERLIDRHLSGVDGSIMFESLLKSN

SEQ ID NO: 198243 - protein, 281 aa, Unknown
  Bacterial polypetide isolated from the Sargasso Sea
NTVFKPGKSDAAVVRLREQNKKNKSKVFSGVAASVDCNSRWVALDPFRGSIAAVAESARNVSCVGAEPVAITNNLNFSSPENDIGYWQLSSSCNGIAEACKVLETPVTGGNVSLYNESKNKDNLITPINPTPVIGMVGKIDNVEKAISSEWKNIEDEIWLIGSSKSEIKIAASSYLEYFHGEITGRPPKIDLLDEKFCQSFLRNAILNSLVVSSHDISDGGLAIALAESCILSSRGATIELERDVNRVDNLLFAEGGSRIIFSISKIKQNEWFNFLKQNQI

SEQ ID NO: 198244 - protein, 227 aa, Unknown
  Bacterial polypetide isolated from the Sargasso Sea
MKSSVIIFPGSNCDRDMDVALKKFGFKNQMIWHNDKSIPKSDLIVLPGGFSYGDYLRCGSIASKSNIIKSVIDFANSGGLVLGICNGFQILTETGLLPGILQQNKYLNFICKNVYVKVKDKKNKYFNNIKKDILELHIAHNEGNYFCSKDELKSLEDNKQIAVTYCDEKGIENDQENPNGAIKNIAGIFNKNKNVLGMMPHPERMIDKYLSGEDGSLFFENLLGNFK

SEQ ID NO: 198245 - protein, 121 aa, Unknown
  Bacterial polypetide isolated from the Sargasso Sea
MEVNEKIAVDHGLKPDEYKKICDLLTRVPNLTELGIFSAMWNEHCSYKSSRIHLKKLNTKGKKVIQGPGENAGVIDIGDDDAIVFKIESHNHPSFIEPYQGAATGVGGIMKDVFTMGARPI

SEQ ID NO: 198246 - protein, 245 aa, Unknown
  Bacterial polypetide isolated from the Sargasso Sea
MIVNEQVAIDHGLKKDEYSKICELLKRTPNITELGIFSAMWNEHCSYKSSRLHLKKLPTKGKKVIQGPGENAGVIDIEDNDAIVFKIESHNHPSFIEPYQGAATGVGGIMRDIFTMGARPIANLNSIHFGSPQHKKTKNLLRGVVHGIGGYGNCMGVPTIAGQTSFDSSYNGNILVNAMTLGLVKKDKIFYSKAAGLNKPVIYVGSKTGRDGIHGASMASASFDEKIEEKKPTVQVGDPFTEKLL

SEQ ID NO: 198247 - protein, 223 aa, Unknown
  Bacterial polypetide isolated from the Sargasso Sea
VITFPGSNCDRDMNVALKKFGFTNKMVWHDDNELPKSDLVVLPGGFSYGDYLRCGSMASKSRIMQSVINFAKSGGLVMGICNGFQILVETGLVPGVLLRNKYLEFICKNVFVKLDNKENVYFKNLNKNVLEFHIAHNEGNYFCTKDQLREIKENNQIAIYYCNKEGKIEDQYNPNGSIKNIAGIFNKEKNVLGMMPHPERMIDQSLSGEDGSIFFKNLLNNIK

SEQ ID NO: 198248 - protein, 253 aa, Unknown
  Bacterial polypetide isolated from the Sargasso Sea
ELMDTKSIVAIQDMGAAGLTSSSFEMAAKGGVGLEINIDKIPAREKKMTAYEFLLSESQERMLMVIKPGSEGEAKKVFEKWGLDFSVIGNLDSSGRMKIMENKKLIADLPIEPLVSKAPEYDRPWEKPIPGSIVKAEDIPEPDSVVSVLKTLLGSSDLCSKRWIWEQYDYLVMGKTIQAPGGDAAVVGLEGTKKAVAMTTDCTPRYCLADPFEGAKQAVVEAWRNLISVGAKPLAITDNLNFGNPEKPEIMGE

SEQ ID NO: 198249 - protein, 225 aa, Unknown
  Bacterial polypetide isolated from the Sargasso Sea
MNSSVIVFPGSNCDRDIATALEKMQFKNQMVWHKETKLPKSDLIVVPGGFSYGDYLRSGAIAGKSLIINEVIKAANEGCLILGICNGFQILTETGLLKGVLLRNKNLKFINKDINIKVINNNTKFSNKYKKNQILKINIAHNEGNYFTNSDHLNELKNENLIAFKYCDKDGNVNEKTNPNGSLENIAGIFNSKKNILGMMPHPERMVDNLISNTDGVNLFSSLLK

SEQ ID NO: 198250 - protein, 274 aa, Unknown
  Bacterial polypetide isolated from the Sargasso Sea
ILVNAMTLGLVDKNKIFYSKAAGINKPVIYVGSKTGRDGIHGASMASAIFDDKIEEKKPTVQVGDPFTEKLLLEACLELMAGKSIISIQDMGAAGLTSSSIEMASKGNLGIEIDLTKVPCREENMSPYEIMLSESQERMLIVLEEGKESEAKKIFDKWNLDFAVIGKTTNTKNIELFFKKEKVAKIPIDFLADNAPIYDRKWVKTKLPKENKFSKNYFKSLKLKNCLQKILTDPNIADKEWIWNQYDHTVMGDTIQKPGGDAGVIRVHGTKKAV

SEQ ID NO: 198251 - protein, 285 aa, Unknown
  Bacterial polypetide isolated from the Sargasso Sea
IHFGSIDHEKTRNLLRGVVKGIGGYGNCIGVPTIAGQTCFDESYNGNILVNAMTLGLVNKNKIFYSKAAGVDKPVIYVGSKTGRDGIHGASMASAIFDDKIEEKKPTVQVGDPFTEKLLLEACLELMAGKSIISIQDMGAAGLTSSSIEMASKGDLGIEIDLTKVPCREENMTPYEIMLSESQERMLIVLEAGKEDEAKKIFDKWNLDFAVIGKTTNSKNIELFFENNKVAEIPIDFLAENAPMYDRKWIKAKLPKENNFSKDDFKSLKLSDCLNKILTDPKHCR

SEQ ID NO: 198252 - protein, 221 aa, Unknown
  Bacterial polypetide isolated from the Sargasso Sea
MDDFTVGVVVFPGSNCDRDVSWALEGCLDIRTKYLWHESSDLSDVDAIVIPGGFSYGDYLRCGAIARFSPLINALDEFVKSGKRVLGICNGFQILTESGFLPGALVANKNLNFICDDVELDIVSSKGGWFNNGDEKQTIKLPIAHGEGRYHCDSDTLKKLVDNELIALRYKNNPNGSSFDIAGITNEKGNVLGLMPHPERACDETIGGTDGLFTLKSLILK

SEQ ID NO: 198253 - protein, 399 aa, Unknown
  Bacterial polypetide isolated from the Sargasso Sea
MTVNEKVAIDHGLKKDEYKKICDLLKRTPNITELAIFSAMWNEHCSYKSSRKHLKNLHTKGKKVIQGPGENAGVIDIGDDDAIVFKIESHNHPSFIEPYQGAATGVGGIMRDVFTMGARPIANLNSIHFGSPQHKKTKNLLRGVVKGIGGYGNCIGVPTIAGQTSFDESYNGNILVNAMTLGLVNKKKIFYSKAAGINKPVIYVGSKTGRDGIHGASMASAVFDDKIEEKKPTVQVGDPFTEKLLLEACLELMSDDSIISIQDMGAAGLTSSSVEMASKGKLGIELNLNKVPCREEKMNPYEIMLSESQERMLIVLENGKEEKAKKIFDKWDLDFAIIGKTTDSKKIELYFDDKKVCDIPVDFLAENAPVYDRKWKKIKLPQSIKFKKQEFKSLKIENC

SEQ ID NO: 198254 - protein, 297 aa, Unknown
  Bacterial polypetide isolated from the Sargasso Sea
MGGGAPRFVVSSPAYDIAAALKQEGLKPTDWDEICRRLGREPNRAELGMFGVMWSEHCCYRNSRPLLSGFPTEGPRILVGPGENAGVVDLGGGHRLAFKIESHNHPSAVEPFQGAATGVGGILRDIFTMGARPIALLNALRFGPLEDPANVGLMEGVVAGIAHYGNCVGVPTVGGEVAFDPSYSGNPLVNAMALGLMETEEIVKSGAIGVGNPVVYVGSTTGRDGMGGASFASAELSADSLDDRPAVQVGDPFLEKGLIEACLEAFASGDVVAAQDMGAAGLTCSCSEMAAKGGLGV

SEQ ID NO: 198255 - protein, 227 aa, Unknown
  Bacterial polypetide isolated from the Sargasso Sea
MKSAVIIFPGSNCDRDMDVALKKFGFKNEMVWHNEQEIPKSDLIVLPGGFSYGDYLRCGSIAGKSKIIKSVIEFANSGGLVLGICNGFQILTETGLLPGVLLQNKYQKFICKNVHVKINNKENKYFKNIKKEILQLHIAHNEGNYFCSEDELKSLINNNQVAVTYCNENGKEADEFNPNGALSNIAGIFNKNKNILGMMPHPERVIDKSLSSDDGNYFFENLIKNLK

SEQ ID NO: 198256 - protein, 187 aa, Unknown
  Bacterial polypetide isolated from the Sargasso Sea
MEVTEKLAIDHGLKKEEFSKICELLKRVPNITELAIFSAMWNEHCSYKSSRKHLKKLHTKGKQVIQGPGENAGVIDIGDDDAIVFKIESHNHPSFIEPYQGAATGVGGIMRDVFTMGARPIANLNSIHFGSPHHKKTRNLLRGVVKGIGGYSNCIGVPTIAGQTSFDESYNGNILVNAMTLGLVNKN

SEQ ID NO: 198257 - protein, 510 aa, Unknown
  Bacterial polypetide isolated from the Sargasso Sea
CIFDDKIEEKKPTVQVGDPFTEKLLLEACLELMAKKSIISIQDMGAAGLTSSSIEMASKGNLGIELNLNKVPCREEKMTPYEIMLSESQERMLIVLENGKEDEAKRIFDKWNLDFAIIGKTTDTRKIELFFDSNKVAEIPINILAENAPIYERKWKKTKLPQKIKFKKDDFKKLKITEVLKKILSLPNISSKEWIWQQYDHTVMGDTIQKPGSDAGVVRVHGTNKAIATSVDSSAVYCYAHPLTGGKQVVCESWRNLISCGATPVAITNCLNFGNPEKEKNMGEFVECVEGINEASKFLDYPVVSGNVSFYNETKDKGIKPTPTIGGVGLLKDYKKMITMNLKKNENLILVIGKTEGYIDQSIFARNILDEKKGPPPEVNLFNEKNNGETILRLINEELVESVHDVSLGGIVTAVSKMAIKGKKGFKLSKLKVLINKFDYYFGEDQGRYIIEIDPKNLSKVQKILKDNSVHCDEIGIVTENEVIINNEPILHIDELIESNKNWLIDYMNK

SEQ ID NO: 198258 - protein, 772 aa, Unknown
  Bacterial polypetide isolated from the Sargasso Sea
AAQVKQEGLTREDYDEIVRRLGRHPNRAELGMFGVMWSEHCCYRNSRPLLKQFPTEGPRILVGPGENAGVVDLGEGHRLAFKIESHNHPSAVEPFQGAATGVGGILRDIFTMGARPLALLNALRFGPLEDPRNAGLMEGVVAGIAHYGNCVGVPTVAGEVAFDPSYSGNPLVNAMALGLMETEEIVRSGASGVGNPVVYVGSTTGRDGMGGASFASAELSEDSLDDRPAVQVGDPFLEKGLIEACLEAFKSGDVVAAQDMGAAGLTCSCAEMAAKGDVGIELDLDLVPARESGMTAYEYLLSESQERMLFVVEQGREQPLMQRFRRWGLQAAVVGRVLEEPVVRVLQQGQVAAEVPSRALAEDTPINRRALLEQPPESIQQHWRWSEQTLPALHAAEVPEVLLALLDDPTIASKRWVWRQYDHQVQANTVVPPGGADAAVVRLRPQEGARALQASERGVASTVDCPNRWVALDPERGGMAAVAEAARNLSCVGAEPVAVTDNLNFPSPETPTGYWQLAMACQGLAEGCRALATPVTGGNVSLYNETRLPDGQVQPIQPTPVVGMVGLVERLERLVGLAWPQPEHDAAAHQVLLLGLPLDCSAEDDRLGLAGSSYLQVRHGLCTGRPPRPDLALERQVQGALRAAITQGLVSAAHDLSDGGLLVAASEMALAAGCGAQLELPSSALRLERLLFAEGGARILVSVSPDQQQALESMLLAQGCPSQWLGTVQQDPQLVVRQAGSTLVDLPLISLHDAHDQGLPRRLQQQALGHNG

SEQ ID NO: 198259 - protein, 274 aa, Unknown
  Bacterial polypetide isolated from the Sargasso Sea
MVNEKIAIDHGLKKEEYKKICDLLKRTPNITELGIFSAMWNEHCSYKSSKLHLKNLPTKGKKVIQGPGENAGVIDIGDDDAIVFKIESHNHPSFIEPYQGAATGVGGILRDVFTMGARPIANLNSIHFGSPQHKKTKNLLRGVVHGIGGYGNCMGIPTIAGQTSFDESYNGNILVNAMTLGLVKKNKIFYSKAAGLNKPVIYVGSKTGRDGIHGASMASAIFDDKIDEKKPTVQVGDPFTEKLLLEACLELMAGDSIIAIQDMGAAGLTSSSMK

SEQ ID NO: 198260 - protein, 176 aa, Unknown
  Bacterial polypetide isolated from the Sargasso Sea
MLVNEKVAIEHGLKTDEYKKICELLKRTPNITELGIFSAMWNEHCSYKSSRIHLKKLPTSGKKVIQGPGENAGVVDIEDGDALVFKIESHNHPSFIEPYQGAATGVGGIMRDVFTMGARPIANLNSIHFGSPQHKKTKNLLRGVVHGIGGYGNCMGVPTIAGQTSFDSSYNGKYTC

SEQ ID NO: 198261 - protein, 227 aa, Unknown
  Bacterial polypetide isolated from the Sargasso Sea
MKSSVITFPGSNCDRDMDVALKKFGFNNKMIWHNDNELPKSDLVVLPGGFSYGDYLRCGSMASKSKIMHPVINFAKSGGLVLGICNGFQILVEAGLVPGVLLRNKYLEFVCKNVFIKVNNKENTFFKNLDKNICEFHIAHNEGNYFCTKDQLKEIEDHNQIAIYYCNEKGQIDEKFNPNGSIKNIAGIFNKEKNVLGMMPHPERMIDESLSGEDGSLFFKNLINNIR

SEQ ID NO: 198262 - protein, 449 aa, Unknown
  Bacterial polypetide isolated from the Sargasso Sea
MNEPDVTKELIEVHGLKSDEYDLILSIINRNPTFTELGIFSAMWNEHCSYKSSKKWLRTLPTEGPQVICGPGENAGIVDIGDGQALVFKMESHNHPSYIEPYQGAATGVGGILRDVFTMGARPIAVMNSLSFGDVNHYKTRQLVNGVVSGIGGYGNCFGVPTVGGETRFDSSYNGNCLVNAFAAGLVDKDKIFYSAASGIGMPVVYLGAKTGRDGVGGATMASAEFDDTIEEKRPTVQVGDPFTEKRLMEACLELMATGAVISIQDMGAAGLTCSAIEMGDKGNLGITLDLEKVPTREPNMSAYEMMLSESQERMLMVLNPEKEKIAKTIFDKWDLDFAVVGETISEDRFLIKLEGVVKADLPLKALAGNAPEYDRPWVEAQPNNELKDVVEVNAIDGLKALISSANYCSKNWIYEQYDSQVMADTIERPGFGAGIVRVHGTEKSIALP

SEQ ID NO: 198263 - protein, 227 aa, Unknown
  Bacterial polypetide isolated from the Sargasso Sea
MKSSVITFPGSNCDRDMDVALNKFGFKNKMVWHDDNELPKSDLVVLPGGFSYGDYLRCGSMASKSKIMQSVINFAKSGGLVMGICNGFQILVETGLVPGVLLRNKYLEFICKNVFVRLDNKENLYFKNLEKDIFEFHIAHNEGNYFCTKDQLKEIQDNNQIAIYYCNKNGQTEEQYNPNGSIKNIAGIFNKEKNVLGMMPHPERMIDQSLSGEDGSLFFKNLINNIK

SEQ ID NO: 198264 - protein, 298 aa, Unknown
  Bacterial polypetide isolated from the Sargasso Sea
MALEHGLRNDEYKKICDLLKRTPNITELGIFSAMWNEHCSYKSSRLHLKKLPTKGTKVIQGPGENAGVIDIEDGDAIVFKIESHNHPSFIEPYQGAATGVGGIMRDVFTMGARPIANLNSIHFGSPQHKKTKNLLRGVVHGIGGYGNCMGVPTIAGQTSFDSSYNGNILVNAMTLGLVKKNKIFYSKAAGLNKPVIYVGSKTGRDGIHGASMASASFDEKIEEKKPTVQVGDPFTEKLLLEACLELMSGDSIIAIQDMGAAGLTSSSIEMASKGNLGIKINLNKVPCRETKMTPYEIM

SEQ ID NO: 198265 - protein, 149 aa, Unknown
  Bacterial polypetide isolated from the Sargasso Sea
NALDDFVKSGRRVLGICNGFQILTESGFLPGALTANKNLNFICDDVELDIVSSKGGWFNDGVEKQTIKLPIAHGEGRYHCDSNTLKKLVDNELIALRYKNNPNGSSFDIAGITNEKGNVLGLMPHPERACDETIGGTDGLFTLKSLILK

SEQ ID NO: 198266 - protein, 371 aa, Unknown
  Bacterial polypetide isolated from the Sargasso Sea
IHGASMASASFDEKIEEKKPTVQVGDPFTEKLLLEACLELMAGDSIIAIQDMGAAGLTSSSIEMASKGNLGVEINLNNVPCRESKMTPYEIMLSESQERMLIVLENGKEELAKKIFDKWNLDFAVIGKTTNTKNIELFFDNEKVANIPVNILVENSPMYDRKWKKSKLPKKNKIKKETFNKFKIKDILAKILASPNVCSKEWIWQQYDHTVMGDTIQKPGGDSGVVRVHGSNKAVAASVDSSAVYCWAHPLTGGKQIVAESWRNLISVGATPIAITNCLNFGSPENEDNMGEFVECVQGIGEASKYLDFPVVSGNVSFYNQTKEVGIKPTPSIGGVGLIKNYKKMVTMDFKEVGDLVLIIGKTEGHIDQSL

SEQ ID NO: 198267 - protein, 275 aa, Unknown
  Bacterial polypetide isolated from the Sargasso Sea
MVEVNEKIAIEHGLKKEEYKKICDLLKRTPNITELGIFSAMWNEHCSYKSSRLHLKKLHTKGEQVIQGPGENAGVVDINDNDAIVFKIESHNHPSFIEPYQGAATGVGGIMRDVFTMGARPIANLNSIHFGSPNHEKTRNLLRGVVKGIGGYGNCIGVPTIAGQTCFDESYNGNILVNAMTLGLVNKNKIFYSKAAGINKPVIYVGSKTGRDGIHGASMASAIFDDKIEEKKPTVQVGDPFTEKLLLEACLELMAGKSIIFIQDMGAAGLTSSSI

SEQ ID NO: 198268 - protein, 226 aa, Unknown
  Bacterial polypetide isolated from the Sargasso Sea
MKSSVIIFPGSNCDRDMDVALKKFGFKNQMVWHDDAEIPKCDLIVLPGGFSYGDYLRCGSIAGKSKIIKSVIDFANSGGLVLGICNGFQILTETGLLPGILQQNKYLNFICKNVFVKIKNKENKYFKNIKKEVLELHIAHNEGNYFCTKDELKSVEDNGQIAVTYCDHNGNDNEENNPNGALKNIAGIFNKDKNILGMMPHPERMIDPFLSGEDGSLFFENLIGSL

SEQ ID NO: 198269 - protein, 225 aa, Unknown
  Bacterial polypetide isolated from the Sargasso Sea
MKSSVIVFPGSNCDRDIAVALEKLQFKNKMVWHKETSLPKSDLIVIPGGFSYGDYLRSGAIAGKSLIIDEVIKAANSGCLILGICNGFQILTETGLLKGTLLRNKNLRFINRDVNIKVINNQTKFSSKYESNQILKINIAHNEGNYFTNSKHLDQLKKDNLIAFKYCDENGNVNESSNPNGALENIAGIYNTKKNILGMMPHPERMVDDIISNTDGTNLFSGLIN

SEQ ID NO: 198270 - protein, 149 aa, Unknown
  Bacterial polypetide isolated from the Sargasso Sea
MEEFKSIQKLLKRDPNLLELGIFSAMWNEHCSYKSSRLHLKKLPTKGKQVIQGPGENAGVIDIGDDDAIVFKIESHNHPSYIEPYQGAATGVGGILRDVFTMGARPIALLNSIHFGSPSHPKTKTLLNGVVSGIGGYGNCIGIPTVAGE

SEQ ID NO: 198271 - protein, 164 aa, Unknown
  Bacterial polypetide isolated from the Sargasso Sea
DYLRCGAIARFSPLINALDEFVKSGKRVLGICNGFQILTESGFLPGALVANKNLNFICDDVELDIVSSKGGWFNDVNEKQTIKLPIAHGEGRYHCDSDTLKKLVDNELIALRYKNNPNGSSFDIAGITNEKGNVLGLMPHPERACDEMIGGTDGLFTLKSLIPK

SEQ ID NO: 198272 - protein, 267 aa, Unknown
  Bacterial polypetide isolated from the Sargasso Sea
MEVNKKIAVEHGLKTEEYKKICELLKRIPNITELGIFSAMWNEHCSYKSSRLHLKKLPTKGKKVIQGPGENAGVIDIGDDDAIVFKIESHNHPSFIEPYQGAATGVGGIMRDVFTMGARPIANLNSIHFGSPQHKKTKNLLRGVVKGIGGYGNCIGVPTIGGQTYFDESYNGNILVNAMTLGLVKKDKIFYSKAAGLDKPVIYVGSKTGRDGIHGASMASAIFDDKIEEKKPTVQVGDPFTEKLLLEACLELMAGDSIISIQDMGAA

SEQ ID NO: 198273 - protein, 225 aa, Unknown
  Bacterial polypetide isolated from the Sargasso Sea
MKSSVIVFPGSNCDRDIAVALEKMQFKNSMVWHKETALPKSDLIVIPGGFSYGDYLRSGAIAAKSNILTGVIEAGKKGTLILGICNGFQILIECGLLKGALLRNSGLKFISKNISVKIQSNKNRFFNKYKNGEVLSLNIAHNEGNYFTNKKHLAELEEKELIAIKYSDENGKIDFKNNPNGSINNIAGIFNENKNILGMMPHPERMTDKVLSSEDGLGVFLSLVS

SEQ ID NO: 198274 - protein, 226 aa, Unknown
  Bacterial polypetide isolated from the Sargasso Sea
MKSSVIIFPGSNCDRDMDVALKKFGFENQMVWHSDTKIPKSDLIVLPGGFSYGDYLRCGSIAGKSRIIKSVIDFANSGGLVLGICNGFQILTETGLLPGILQQNKYLNFICKNVFVKIKNKENKYFKKIKKDVLELHIAHNEGNYFCSNDELKLIEDNGQIAVTYCDHKGNDDENNNPNGALKNIAGIFNKDKNILGMMPHPERMIDPFLSGEDGSLFFKNLIESM

SEQ ID NO: 198275 - protein, 381 aa, Unknown
  Bacterial polypetide isolated from the Sargasso Sea
WAVVFKVESHNHPSAIEPYQGAATGVGGILRDIYSMGARPVAFLNSLRFGPLSDKKDSGSPTSKRNQYLFGGVVAGIAGYGNCIGVPTVAGEVAFDACYSGNPLVNAMCVGVIRHEDLQHGRAEGIGNPVIYVGAATGRDGIHGATFASEELNDESEAKRPSVQVGDPFMGKLVLEACLELFQSGAVISVQDMGAAGLTCSSTEMAEKGGNGMELDLDLVPQRALEMSPYEIMLSESQERMLLVAKAGREEEVFEICRKWEVPACTIGRVIPETVLRLKHRGALAAELPLDRLLGSCPLYQRDAVPSEKQLSRQKKNEVTWDVPDDIGALFKEMIVQPELASKRWVYRQYDSMVRTCTSVGPGSDAAVIRIEGTNKALAMS

SEQ ID NO: 198276 - protein, 326 aa, Unknown
  Bacterial polypetide isolated from the Sargasso Sea
MNENLILQHGLTLDEFKIIKDYLNRDLTMEELGIFSAMWNEHCCYKTSKKWLKKLPTENEIVIQGPGENAGIIDIQDNDGIAFKIESHNHPSYIEPFNGSATGVGGILRDIFTMGARPIATLDSIRFGLIESEKTKYLLNGVVHGIGHYGNCIGIPNIGGECEFESTYGFNNLVNAMAVGHVQKDKIFYSKPKSIGGLIVYIGSKTGKDGIHGASMASDVFSEDDEDDKRPSVQVGDPFMEKLLMEGCLELMSLGLIESMQDMGAAGITSSSVEMASKGNVGVLINLDKVPLRQPLSAYEILLSEKQERMLAVIDEKNNLKVKEIL

SEQ ID NO: 198277 - protein, 226 aa, Unknown
  Bacterial polypetide isolated from the Sargasso Sea
MSFKSAVITFPGSNCDRDALCYLQDLTKGVVYNIWHEEASLPQVDLVILPGGFSFGDYLRSGAMASKSKIINDVIKHANDDRYLLGICNGFQILTEIGLLEGALIQNKNLKFLGKNCFVKKKFKNNFNSSIKEDQVLQIPVAHNEGNFYCDNETLKSLKNNEQIAFEYCKGEFSNSEENINGSIEAIAGITNKKKNILGMMPHPERAYSDFHPSQDGKLIIESLIS

SEQ ID NO: 198278 - protein, 722 aa, Unknown
  Bacterial polypetide isolated from the Sargasso Sea
MLVNEKIAIEHGLKSDEFKKICKLLKRTPNITELGIFSAMWNEHCSYKSSRIHLKKLPTKGKKVIQGPGENAGIIDVDDGDAIVFKIESHNHPSFIEPYQGAATGVGGIMRDVFTMGARPIANLNSIHFGSTQHKKTKNLLRGVVHGIGGYGNCMGVPTVGGQTSFDRSYNGNILVNAMTLGLVKKNKIFYSKAAGLNKPVIYVGSKTGRDGIHGASMASASFDDKIEEKKPTVQVGDPFTEKLLLEACLELMSGDSIIAIQDMGAAGLTSSSIEMASKGNLGIEIDLNKVPCRETKMTPYEIMLSESQERMLIILENGKEELAKKIFDKWNLDFAVIGKTTNTKNIELFFDEKQVAKIPVNTLVENSPMYDRKWKKSKLPKKIKHDKSKIKNLKIKETLTKLLSTPNICSKEWIWQQYDHTVMGDTIQKPGGDSGVVKIHGTEKAVAATVDSSATYCWAHPLTGGKQVVCETWRNLISVGAKPIAITNCLNFGSPEKEENMGEFVECVQGIGEACKYLEYPVVSGNVSFYNQTKEIGIKPTPTIGGVGLIKNYKKMVTMNFKEIGNQVLVIGKTEGHIDQSLFARVILNEKNGPPPEVNLFNEKNNGETLLNLIEKNYIKSAHDISLGGILTAISKMCIKGDKGIELKVPKSLINETEYFFAEDQGRYIIEVSSKDLKDVTKILDKNSVHYDQIGKIIDKELIISKKTKVSIDELKSYNTN

SEQ ID NO: 198279 - protein, 265 aa, Unknown
  Bacterial polypetide isolated from the Sargasso Sea
MKITEEIILSHGLNIDEYSKIKNLLKRDPNYLELGIFSAMWNEHCSYKSSKIHLKKLPTKNKNVIQGPGENAGVIDIGDEDAVVFKIESHNHPSFIEPYQGAATGVGGILRDVFTMGARPIALLNSIHFGDPRNEKTKNLLNGVVSGIGGYGNCIGIPTVAGETKFNKTYNENILVNAMAVGLANKKKIFYSKAKGINKSVVYVGSKTGRDGIHGASMASAEFDENTEEKKPTVQVGDPFTEKLLMEACLELMKDDSIISIQDMG

SEQ ID NO: 198280 - protein, 225 aa, Unknown
  Bacterial polypetide isolated from the Sargasso Sea
MEVNEQIAIDHGLKIEEYKKIKELLKRNPNLTELAIFSAMWNEHCSYKSSRKHLKNLFTKGEKVIQGPGENAGVIDIGDEDAIVFKIESHNHPSFIEPYQGAATGVGGIMRDVFTMGARPIANLNSIHFGSTQHKKTKNLLRGVVKGIGGYGNCIGVPTIAGQTNFDDSYNGNILVNAMTLGLVNKNKIFYSKAAGLNKPVIYVGSKTGRDGIHGASMASAILRQ

SEQ ID NO: 198281 - protein, 239 aa, Unknown
  Bacterial polypetide isolated from the Sargasso Sea
MTSSNWQFDTEKSLVESHGLKLEEFEKIVEGLGREPNLTELGIFSAMWNEHCSYKSSKYWLKKLPTSGERVIQGPGENAGVIDIDDGDVAVFKMESHNHPSFLEPYQGAATGVGGILRDVFTMGARPVANMNALRFGDPNHPKTKHLVSGVVGGIGGYGNCIGIPTVGGEVNFHPSYNGNILVNAMTVGIAKKDKIFYSAAAGIGNPVVYVGSKTGRDGIHGATMASAEFDDDSEEKKP

SEQ ID NO: 198282 - protein, 291 aa, Unknown
  Bacterial polypetide isolated from the Sargasso Sea
MEVNEKIAVDHGLKLDEYKKICDLLKRVPNLTELGIFSAMWNEHCSYKSSRLHLKKLNTKGKKVIQGPGENAGVIDIGDDDAIVFKIESHNHPSFIEPYQGAATGVGGIMRDVFTMGARPIANLNSIHFGSTQHKKTKNLLRGVVKGIGGYGNSIGVPTIAGQTCFDQSYNGNILVNAMTLGLVNKNKIFYSKAAGINKPVIYVGSKTGRDGIHGASMASAIFDDKIEEKKPTVQVGDPFTEKLLLEACLELMSDKSIIAIQDMGAAGLTSSSIEMASKGNLGIELSLDKV

SEQ ID NO: 198283 - protein, 220 aa, Unknown
  Bacterial polypetide isolated from the Sargasso Sea
MTTFTVGIVVFPGSNCDRDVAWALEACLEIKTKFLWHESSDLNDIDSIVLPGGFSYGDYLRCGAIARFSPLINALHDFVKSGRRVLGICNGFQILTESGFLPGALTANKNLNFICEDVDLNVITSKGGWFQKLDKKQTIKLPIAHGEGRYHCDQDTLKRLIDNDLIALKYTNNPNGSTSDIAGITNEKGNVLGLMPHPERACDKSIGGIDGLYTLKSLIT

SEQ ID NO: 198284 - protein, 500 aa, Unknown
  Bacterial polypetide isolated from the Sargasso Sea
MTFQEHENLHIKKNVKRELTSTESQILAAEWSEHCSYKSSKQHLKMLPTTGPKVIVEKGYDSGVLDVGDGYVVTVHIESHNHPSAVEPFGGAATGVGGVIRDILSAGTRPIALFDGLRFGNIETDSHARWLFKNAVAGIADYGNCLGIPTIGGEVEFDECYKNYALVDVAAVGFGKKSKLIKNHANIDDLVILIGGSTGRDGVGGSQFASDALEGEDRSAVQIPDPFIEKLIIEAILECRDENCINAMKDLGGGGLSCAISETAESLGIGIELDVQNVHLRESDLAPEEIMISESQERMLIISSPDNLSKIQSICEKFRIQCSVIGKVKEDKMMHVKNGNETLALLPADFVARGPLISREKTKPKYLSNLPTAPESQNNLSLADVLLKLLSSPNIASKHWVYRQYDHEVGIRTVIKPGFDSSVLRLDNGKSLSVKIDGNPKHCYLNPRQGAIGCFEEACRNVVCTGATPIGMVDHLQFGNPEDPEIFWTFMESIEGITDI

SEQ ID NO: 198285 - protein, 581 aa, Unknown
  Bacterial polypetide isolated from the Sargasso Sea
RPIANLNSIHFGSPQHPKTKNLLRGVVKGIGGYGNCMGIPTIGGQTSFDESYNGNILVNAMTLGLVNKNKIFYSKAAGIDKPVIYVGSKTGRDGIHGASMASAIFDEKIEEKKPTVQVGDPFTEKLLLEACLELMAGKSIISIQDMGAAGLTSSSIEMASKGNLGIELNLNKVPCREEKMTPYEIMLSESQERMLIVLEKGKEAEAKKIFDKWNLDFAIIGKTTDSKKIELFFDNNKVAEIPINILAENAPVYDRKWKKTKLPQKIKFNKDDFKKLKITEVLKKILALPNISSKEWIWEQYDHTVMGDTIQKPGSDAGVVRVHGTNKAVATSVDSSAIYCYAHPLTGGKQVVCESWRNLISCGSKPIAITNCLNFGNPEKEKNMGEFVECVEGINEASKFLDYPVVSGNVSFYNETKDKGIKPTPAIGGVGLIKDYKKIVTMDLKSNDNLILVVGKTEGHIDQSIFAINILNEKKGPPPVVNLFNEKNNGETILKLIKEGLIRSAHDISLGGIITAISKMAIKGKKGFKLNKLKVLMNKFDYYYGEDQGRYIIEIDPHNLLKVQKILKDNSVHYDEVGIVT

SEQ ID NO: 198286 - protein, 495 aa, Unknown
  Bacterial polypetide isolated from the Sargasso Sea
MNEVNEQIAIDHGLKKEEFSKICDLLKRMPNLTELGIFSAMWNEHCSYKSSRLHLKKLNTKGKKVIQGPGENAGVIDIDDDDAIVFKIESHNHPSFIEPYQGAATGVGGIMRDVFTMGARPIANLNSIHFGSPQHPKTKNLLRGVVKGIGGYGNCMGIPTVGGQTTFDESYNGNILVNAMTLGLVNKNKIFYSKATGINKPVIYVGSKTGRDGIHGASMASAIFDEKIEEKKPTVQVGDPFTEKLLLEACLELMSGKSIISIQDMGAAGLTSSSIEMASKGNLGIELNLNKVPCREEKMTPYEIMLSESQERMLIVLESGKEEEAKKIFDKWNLDFAIIGKTTDTKKIELFFDNSKVAEIPINILAENAPVYDRKWKKTKLPQKIKFNKDDFKKLKITEVLKKILALPNISSKEWIWQQYDHTVMGDTILKPGSDSGVVRVHGTNKAVATSVDSSAVYCYAHPLTGGKQIVCESWRNLISCGSKPIAITNCLNFG

SEQ ID NO: 198287 - protein, 308 aa, Unknown
  Bacterial polypetide isolated from the Sargasso Sea
MIVNEQVAVDHGLKKDEYAKICELLKRTPNITELGIFSAMWNEHCSYKSSRLHLKKLPTKGKKVIQGPGENAGVIDIEDDDAIVFKIESHNHPSFIEPYQGAATGVGGIMRDVFTMGARPIANLNSIHFGSPQHKKTKNLLRGVVHGIGGYGNCMGVPTIAGQTSFDSSYNGNILVNAMTLGLVKKDKIFYSKAAGLNKPVIYVGSKTGRDGIHGASMASASFDEKIEEKKPTVQVGDPFTEKLLLEACLELMAGDSIIAIQDMGAAGLTSSSIEMASKGNLGIEINLNKVPCREAKMTPYEIMLSDS

SEQ ID NO: 198288 - protein, 382 aa, Unknown
  Bacterial polypetide isolated from the Sargasso Sea
AEHGLSQAEYGKVLEIMGREPNITELGIFSVMWSEHCSYKSSKYWLKTLPTEAPWVICGPGENAGIIDIGDGQAVVFKMESHNHPSYIEPYQGAATGVGGILRDVFTMGARPIANMNSLRFGHPDHPKTKHLVDGVVAGIGGYGNCVGVPTVGGECTFHAAYDGNILVNAMTVGVADTDKIFYSAATGAGNPVIYVGSKTGRDGIHGATMASAEFTEDSEEKRPTVQVGDPFTEKLLIEACLELMQTDCIVGIQDMGAAGLTSSSFEMASRGGMGVSLNLDNVPQREENMTAYEMMLSESQERMLMVLKPGSEDQARAIFEKWELDFAVIGTLTDTGRMVLMHHGEKVADLPIDPLALASPEYDEKDRPWIPTPKPASIDAK

SEQ ID NO: 198289 - protein, 325 aa, Unknown
  Bacterial polypetide isolated from the Sargasso Sea
MSEVASKLGLGLLPDEMEKVKSYFESEKRKPTDVELQAIDQAWSEHCCYKSSKPVLEETVFGLKSSKKVIAREDAGIMEFDDKHYYAVGLESHNHPSALDPYGGSATGIGGILRDVVCMGAQPIALVDPLFFGNLDTPREALAEGVKHPRYLMGGVVAGIRDYGNRVGIPTVAGQVAFHPKYTGNPLVNVGCVGIVEKELMIHSKAGDVGDIYILAGGRTGRDGIHGVTFASRDLDAGSDDDLGAVQLGDPITKEPLMHLCLELNEMGILTGMKDLGGGGLSCVVGELALDGGFGARVDLEKVHLKVENMPPWEIWVSESQERMM

SEQ ID NO: 198290 - protein, 283 aa, Unknown
  Bacterial polypetide isolated from the Sargasso Sea
MIVNEKVAVDHGLKKDEYVKICKLLKRTPNITELGIFSAMWNEHCSYKSSRLHLKKLPTKGKKVIQGPGENAGVIDIEDNDAIVFKIESHNHPSFIEPYQGAATGVGGIMRDVFTMGARPIANLNSIHFGSPQHKKTKNLLRGVVHGIGGYGNCMGVPTIAGQTSFDSSYNGNILVNAMTLGLVKKNKIFYSKAAGINKPVIYVGSKTGRDGIHGASMASASFDEKIEEKKPTVQVGDPFTEKLLLEACLELMGGDSIIAIQDMGAAGLTSSSIEMASKGNLG

SEQ ID NO: 198291 - protein, 227 aa, Unknown
  Bacterial polypetide isolated from the Sargasso Sea
MNSSVIIFPGSNCDRDMAVALKKFGFKNKMVWHDDVELPKSDLVVLPGGFSYGDYLRCGSMASKSKIIQSIISYSKSGGLLIGICNGFQILTETELLPGALLRNKYSEFICKNVFVKINSVENNYFKNLKKNTLKLHIAHNEGNYFCSNEQINEIENNEQIALSYCNEKGEIDTKYNPNGSIKNIAGLLNKEKNILGMMPHPERMIDSYLSGEDGSIFFENLINNLK

SEQ ID NO: 198292 - protein, 363 aa, Unknown
  Bacterial polypetide isolated from the Sargasso Sea
RNLLRGVVKGIGGYGNCIGVPTIAGQTSFDESYNGNILVNAMTLGLVNKNKIFYSKAAGINKPVIYVGSKTGRDGIHGASMASATFDDKIEEKKPTVQVGDPFTEKLLLEACLELMSDKSIIAIQDMGAAGLTSSSVEMASKGNLGIELDLSKVPCREEKMTPYEIMLSESQERMLIVLENGKEDYAKKIFEKWNLDFAIIGKTTDSKKIEIKFNNEKVAQIPINLLAENAPVYDRKWKKTKLPQKLKLNKDEFKSINLSDCLKKILANPNISEKKWIWDQYDHTVMGDTIQKPGGDAGVIRIHGTKKAIAASVDSSASYCYSHPLTGGKQIVCESWRNLISVGAKPIDITNCLNFGNPEKEK

SEQ ID NO: 198293 - protein, 563 aa, Unknown
  Bacterial polypetide isolated from the Sargasso Sea
MVENHGLKIDEFERIVEGLGREPNLTELGIFSAMWNEHCSYKSSKFWLKKLPTSGERVVQGPGENAGVIDIDDGDVAVFKMESHNHPSFLEPYQGAATGVGGILRDVFTMGARPVANLNALRFGEPEHPKTKHLLSGVVSGIGGYGNCIGVPTVGGEVNFHPSYNGNILVNAMTVGIAKKDKIFYSAAAGIGNPVVYVGSKTGRDGIHGATMASAEFDEDSEDKKPTVQVGDPFTEKLLLEACLELMKEEAIIAIQDMGAAGLTSSSIEMASKGNVGIDINLSKVPMRALNMTAYELMLSESQERMLMVIDPSKEKMAREIFKKWDLEFEVIGEVTNTKNLVLHMNGNEEASIPINILVEDAPEYQREYIVSKPSPPVIFNPNEFDDKKILDELILMVSHPNLCSRKWIWEQYDHMVMADTVVRPGSDAAVVRVHGTNKGIAISTDCSPTYCKHNSFEGGKHAVVETWRNLIASGAMPIAITDCMNFGNPEKPEIMGQFVECIRGMGEACSKLKYPVISGNVSLYNETNGVGIYPTPVIGGVGLIRDLSKTMTIDFKSEGNIV

SEQ ID NO: 198294 - protein, 432 aa, Unknown
  Bacterial polypetide isolated from the Sargasso Sea
ESQERMLVVVHKGKEDVVKKIFDKWDLHAEEIGVVTEGGRVRYFENGVMVSDLPAESLVLGGGAPQYEREYSEPAYYERYKSFDINHVSQPADLKKIAFDLLKEPNIASKKWVYNQYDSMVGTCNMTTNRPSDAGIALIKGSNKALSMSVDCNSRYVHADPEIGTMIAVAEAARNITCSGGEPSAVTNCLNFGNPYNPESYWQFVGAIKGMSAACLKFNTPVTGGNVSFYNQTVIDKKEEPVYPTPTIGMIGILEDKNKIMTLDFKTKGDLIFVIGNCTNDIASSEYLSSILGIKESPAPYFNLEEEYNTHQTIKYLISNNFINAAHDVSDGGLFTTLVEMSFPRELGFDIETDSEIREDAFLFGEGQGRIVVTVNEDTEEEFIEYLANSNQKFTLLGHVTKGKIQIDGQHYGFINEAKDIYDNAIHQMIEN

SEQ ID NO: 198295 - protein, 454 aa, Unknown
  Bacterial polypetide isolated from the Sargasso Sea
ASFASSELTSSSLDDRPAVQVGDPFIEKSLIEACLDAFKTGDVIAAQDMGAAGLTCSSAEMAANGNLGISIDLDLVPSREENMSAYHYLLSESQERMLFVVKEERRENLIEKFNKWGLFANVIGEVIEANEVIISHKSKIVAQIPTSALSDDTPVNFHNEINNPPENLLRKWEWTENNLPEINELKIFSLKENKSFSYSKIILKLLSNPSIASKRWIYKQYDSQVQANTVFKPGKSDAAVIRLRDQNEKNKDKVFSGVAASVDCNSRWVALDPYRGSIAAVAESSRNVSCVGAEPLAITNNLNFSSPNNDTGYWQLSSSCKGISEACKVLETPVTGGNVSLYNESINTDNKITPINPTPVIGMVGKIDNVEQAISSEWKNINDQIWLIGSSKSEITISASSYLEYFHGEITGRPPKIDLLDEKYCQSFLRNAIFNSFVVSSHDISDGGLAIAFG

SEQ ID NO: 198296 - protein, 202 aa, Unknown
  Bacterial polypetide isolated from the Sargasso Sea
GLKSNGFGTTDAEIPKSDLIVLPGGFSYGDYLRCGSIAGKSRIIKSVIDFANSGGLVLGICNGFQILTETGLLPGILQQNKYLNFICKNVFVKIKNKENKYFKKIKKEVLELHIAHNEGNYFCSNDELKSIEDNGQIAVTYCDHKGNEDEMNNPNGALKNIAGIFNKEKNILGMMPHPERMIDPFLSGEDGSLFFENLIESL

SEQ ID NO: 198297 - protein, 335 aa, Unknown
  Bacterial polypetide isolated from the Sargasso Sea
MKVNKAVALDHGLNEEEFSKICELLKRTPNITELAIFSAMWNEHCSYKSSRKHLKKLHTKGKQVIQGPGENAGIIDIGDDEAIVFKIESHNHPSFIEPYQGAATGVGGIMRDVFTMGARPIANLNSIHFGSPQHKKTRNLLRGVVKGIGGYGNCIGVPTIAGQTSFDESYNGNILVNAMTLGLVNKNKIFYSKAAGINKPVIYVGSKTGRDGIHGASMASATFDDKVEEKKPTVQVGDPFTEKLLLEACLELMVDKSIIAIQDMGAAGLTSSSIEMASKGKLGIELDLNKVPCREEKMSPYEIMLSESQERMLIVLEKGKENHAKKIFDKWNLDL

SEQ ID NO: 198298 - protein, 407 aa, Unknown
  Bacterial polypetide isolated from the Sargasso Sea
GYGNCIGVPTIAGQTCFDESYNGNILVNAMTLGLVKKNKIFYSKAAGLNKPVIYVGSKTGRDGIHGASMASAIFDDKIEEKKPTVQVGDPFTEKLLLEACLELMAGDSIISIQDMGAAGLTSSSIEMASKGKLGIELNLNKVPCRETKMTPYEIMLSESQERMLIVLENGKEQLAKKIFDKWNLDFAVIGKTTDSKKIELYFDNEKVADIPVNTLVENSPMYDRKWKKSKLPKKTKIEKDKFKNLKITSVLSKILSNPNICNKSWIWQQYDHTVMGDTIQKPGGDAGVVRIHGTNKAVAASVDSSAVYCWAHPLTGGKQIVCESWRNLVSVGAKPIAITNCLNFGNPEKDENMGEFVECVQGLGEASRYLDFPVVSGNVSFYNETKDNGIKPTPSIGGVGLIKDYKK

SEQ ID NO: 198299 - protein, 227 aa, Unknown
  Bacterial polypetide isolated from the Sargasso Sea
MKSSVITFPGSNCDRDMDVALKKFGFKNKMVWHADAELPKSDLVVLPGGFSYGDYLRCGSMASKSKIMQSVINFANSGGMVMGICNGFQILVETGLVPGVLLRNKYLEFICKNVFVKINDKKNKYFKNVDNEVLEFHIAHNEGNYFCTNDQLKEIEDNNQIAINYCDENGKIEDQFNPNGSIKNIAGIFNKEKNVLGMMPHPERMIDTSLSGEDGSLFFKNLINNLK

SEQ ID NO: 198300 - protein, 152 aa, Unknown
  Bacterial polypetide isolated from the Sargasso Sea
MINQENNDLYDLNEALQVENLTLKDYEEICERLKRKPNRTELGMFGVMWSEHCCYRNSKPLLSKFPTKGKNVLVGPGENAGVIDVGNNQKLVFKIESHNHPSAIEPFQGAATGVGGILRDIFTMGARPIAVLNSLRFGNLDKSSNVDLLRGV

SEQ ID NO: 198301 - protein, 222 aa, Unknown
  Bacterial polypetide isolated from the Sargasso Sea
MKSSVITFPGSNCDRDMDVALRKFGFNNKMVWHDDNELPKSDLVVLPGGFSYGDYLRCGSMASKSRIMQSVINFAKSGGLVMGICNGFQILVETGLVPGVLLRNKYLEFICKNVFVKLDNKENAYFKNLNKDILEFHIAHNEGNYFCTKDQLKEIKDNNQIAIYYCNKEGKIEDQYNPNGSVKNIAGIFNKEKNVLGMMPHPERMIDQSLSGEDGSIFFKNL

SEQ ID NO: 198302 - protein, 436 aa, Unknown
  Bacterial polypetide isolated from the Sargasso Sea
MASAEFDENSEEKKPTVQVGDPFTEKLLLEACLELMRDNSIISIQDMGAAGLTSSSIEMASKGKLGIELNLNKIPCRENNMTPYEMMLSESQERMLIILDDEKEEEAKKIFDKWDLDFVVIGKTTDTKRLILNFDDKKVADIPIEALAEKAPLYERKWTKSKSSKNKVKIKDLKKIKIEDALVKILSSPNHSNKSWITDQYDQVVMCDTVQKSGGDAAVVRIHNKNKAVAISVDSSANYCNVDPKTGGKQIVCENWRNLISVGAKPLAITNCLNFGSPEKPKVMGEFVGCIEGMKEACEYLNFPVVSGNVSFYNETNSKSIFPTPVIGGIGLIENLNKIINIKIKKTGNLVMAIGKTLGHIDQSAFLQENFSIDNGPPPEINLVNEKNNGLATLRLIKENLVISAHDISSGGMLVSLAEMSISSGLGLKIFKPKKT

SEQ ID NO: 198303 - protein, 342 aa, Unknown
  Bacterial polypetide isolated from the Sargasso Sea
MFGILGHINFSSKQWIYEQFDSSVMGDTIQTIDNSDASIVKVHNSQKTNHPGKGIAISTDCTSRFVLNNPEVGGMLAVIEAARNLACSGAKPLAVTNNLNFGNPEKPEIMGQIVASIEGIKKSCNYLNTPVVSGNVSLYNETNGKSILPTPIIGMIGIIDNIDNVIENNAKEKNTLLIIGQNEKKDDGWLGCSLYQEIFHDKIDGKVPDVNIIKEKEIIDFLLDLNLQGLIEGAHDISDGGLLPCIVEMLFKNNLGININLPKILEKLNNEYIYKLHGWCFGEDQGRIVIATNKPHKIFELGKKRKIDLLNLGKTNKSGFINLGKYDRFSIKECYNIYNNAL

SEQ ID NO: 198304 - protein, 730 aa, Unknown
  Bacterial polypetide isolated from the Sargasso Sea
MEVNLQNAVDHGLNKDEFNKICDLLKRTPNLTELGIFSAMWNEHCSYKSSKIHLKKLNTKGKKVIQGPGENAGIIDIEDDDAIVFKIESHNHPSFIEPYQGAATGVGGIMRDVFTMGARPIANLNSIHFGSTQNPKTKNLLRGVVKGIGGYGNCMGIPTIAGQTNFDESYDGNILVNAMTLGLVNKNKIFYSKAVGVNKPVIYVGSKTGRDGIHGASMASAIFDDKIEEKKPTVQVGDPFTEKLLLEACLELMAGKSIISIQDMGAAGLTSSSIEMASKGNLGIELNLSKVPCREEKMTPYEIMLSESQERMLIILENGKEEEAKKIFDKWNLDFAVIGKTTDTKKIEIFFDKIRVAQIPINILAENAPIYDRKFKKTKLPQKIKFNKDDLKKFKLTDVLKKILSSPNISSKEWVWEQYDQTVMGDTVEKPGSDSGIVRIHGSSKAVATSVDSSAIYCYAHPLTGGKQVVCENWRNLISCGSKPIAITNCLNFGNPEKEKNMGEFVECVEGINEASKFLDYPVVSGNVSFYNETKDKGIKPTPTIGGVGLITDYKKIITMDLKNINDLILVVGKTEGHIEQSIFARNILNEKKGPPPEINLFNEKNNGETILKLINEKLIKSTHDVSLGGIITAVSKMAIKGKKGFKLIKPKVLTSKFHYFFGEDQGRYIIEIEPNNLPKVQKILKENSVHYDEIGIVTKNEVIIDKEPILHIDDLTKSNKTWLIDYMNK

SEQ ID NO: 198305 - protein, 458 aa, Unknown
  Bacterial polypetide isolated from the Sargasso Sea
MIVNEQVAIDHGLKKDEYAKICELLKRVPNITELGIFSAMWNEHCSYKSSKLHLKKLPTKGKKVIQGPGENAGVIDIEDNDAIVFKIESHNHPSFIEPYQGAATGVGGIMRDVFTMGARPIANLNSIHFGSPQHKKTKNLLRGVVHGIGGYGNCMGVPTIAGQTSFDSSYNGNILVNAMTLGLVKKDKIFYSKAAGLNKPVIYVGSKTGRDGIHGASMASASFDDKIEEKKPTVQVGDPFTEKLLLEACLELMAGDSIIAIQDMGAAGLTSSSIEMASKGNLGIEINLNKVPCRETKMTPYEIMLSESQERMLIVLENGKEEQAKKIFDKWNLDFAVIGKTTNTKKIQLYFDEEKVADIPVNTLVENSPMYDRKWKKSKLPKKNKIKKEDLKNLKIIDVLKKVLSNPNICSKEWIWQQYDHTVMGDTIQKPGGDAGVVRVHGTKKAVATSVDSSAVYC

SEQ ID NO: 198306 - protein, 220 aa, Unknown
  Bacterial polypetide isolated from the Sargasso Sea
MKSSVIIFPGSNCDRDMDVALKKFGFKNQMVWHNDAEIPKSDLIVLPGGFSYGDYLRCGSIAGKSRIIKSVIDFANSGGLVLGICNGFQILTETGLLPGILQQNKYLNFICKNVFVKIKNKENKYFKNIKKEVLELHIAHNEGNYFCSNDELKSIEDNSQIAVTYCDDKGNDDEDNNPNGAIKNIAGIFNKNKNILGMMPHPERMIDPFLSGEDGSLFLK

SEQ ID NO: 198307 - protein, 507 aa, Unknown
  Bacterial polypetide isolated from the Sargasso Sea
MVNEKIAIEHGLKSDEYKKICKLLKRTPNITELGIFSAMWNEHCSYKSSRIHLKKLHTKGKKVIQGPGENAGVIDIEDGDALVFKIESHNHPSFIEPYQGAATGVGGIMRDVFTMGARPIANLNSIHFGSTQHKKTKNLLRGVVHGIGGYGNCMGVPTIAGQTSFDRSYNGNILVNAMTLGLVKKDKIFYSKAAGLNKPVIYVGSKTGRDGIHGASMASASFDEKIEEKKPTVQVGDPFTEKLLLEACLELMSGDSIIAIQDMGAAGLTSSSIEMASKGNLGIEINLNKVPCRETKMTPYEIMLSESQERMLIVLESGKEEIAKKIFDKWNLDFAVIGKTTNTKNIELFFDNKQVANIPVNTLVENSPMYDRKWKKSKLPKKNKINKTIFKSLKIKDTLKKILSSPNVCSKEWIWQQYDHTVMGDTIQKPGGDSGVVRVHKTDKAIAATVDSSATYCWAHPLTGGKQVVCETWRNLISVGAKPIAATNCLNFGSPEKEEIWVSLLNV

SEQ ID NO: 198308 - protein, 227 aa, Unknown
  Bacterial polypetide isolated from the Sargasso Sea
MKSSVIIFPGSNCDRDMDVALKKFGFKNQMVWHNDANIPKSDLIVLPGGFSYGDYLRCGSIAAKSKIIKSVVDFANSGGLVLGICNGFQILIETGLLPGALLTNKYLKFICKNVFVKLNEDKSKYFNNIKKNILELHIAHNDGNYFCTDDELKSLEDNNQIAVKYCSKDGDVSENYNPNGSIKNIAGIFNKNKNILGMMPHPERVIDRSLSSEDGTFFFKNLIKNLK

SEQ ID NO: 198309 - protein, 434 aa, Unknown
  Bacterial polypetide isolated from the Sargasso Sea
GASMASAEFDENSEEKKPTVQVGDPFTEKLLLEACLELMKDDSIISIQDMGAAGLTSSSVEMASKGSLGIELDLEKVPCREENMTPYEMMLSESQERMLIILEDGKEENAKKIFKKWDLDFVVIGKTTKSKNLTLKYKNKIEGEIPIDALAANAPIYDRKWSKKKIEKNKFDFKKIKKIKIEEALIKILSSPNHSNKSWITNQYDQMVMCDTAQRSGSDAAIIRIHDKNKAIAVSVDSSANYCKSDPVIGGKQIVCENWRNLISVGARPLAITNCLNFGNPENQQIMGEFAECVEGIKEACEFLNYPVVSGNVSFYNGTNKKNIFPTPVIGGVGLIKKIFKPLGHNFKIDKSLIILVGKTFGHLEQSCFLKENYSIVNGRPPEVNLVNEKNNGEAVLKLINENLIDSVHDISNGGLITALSEMSINSNFGARIE

SEQ ID NO: 198310 - protein, 310 aa, Unknown
  Bacterial polypetide isolated from the Sargasso Sea
MGTAAGQSRVSSPAYDVNAALKQEGLKPSDWQEICRRLGREPNRAELGMFGVMWSEHCCYRNSRPLLRGFPTEGPRILVGPGENSGVVDLGEGHRLAFKIESHNHPSAVEPFQGAATGVGGILRDIFTMGARPIALLNALRFGPLEDPVNVGLIEGVVAGIAHYGNCVGVPTVGGEVAFDPSYGGNPLVNAMALGLMETEEIVKSGAQGVGNPVVYVGSTTGRDGMGGASFASAELSADSLDDRPAVQVGDPFLEKGLIEACLEAFSSGDVVAAQDMGAAGLTCSCSEMAAKGGLGVELDLDRVPAREEG

SEQ ID NO: 198311 - protein, 226 aa, Unknown
  Bacterial polypetide isolated from the Sargasso Sea
MKSSVIIFPGSNCDRDMDVALKKFGFENEMVWHNDVEIPKSDLIVLPGGFSYGDYLRCGSIAGKSKIIKSVIDFANSGGLVLGICNGFQILTETGLLPGILQQNKYLNFICKNVFVKIKNKENKYFKKIKKEVLELHIAHNEGNYFCSNDELKSIEDNGQIAVTYCDHKGNEDEKNNPNGALNNIAGIFNKDKNILGMMPHPERMIDPFLSGEDGSLFFNNLIESL

SEQ ID NO: 198312 - protein, 366 aa, Unknown
  Bacterial polypetide isolated from the Sargasso Sea
MDDPTIASKRWVWRQYDHQVQANTVLRPGGADAAVLRLRSQQDNEPHSSSQRGVAATVDCPNRWVALDPERGGMAAVAEAARNLSCVGADPIAVTDNLNFPSPETPTGYWQLAMACRGLSEACRVLQTPVTGGNVSLYNDTRLPDGSIQPIQPTPVVGMVGLVENIQTLVGLAWPQPIAGDAGDHVVLLGLPLQTPQDDERLGLAGSSFLQVCHGLCTGRPPRTDLDLELQVQQVLRSGIRAGQITAAHDVSDGGLLVTIAEMAIAAGCGAQLSVPSAGRLERLLFAEGGARVVVSVPEASWSALQAAAQEAGCPSQSLGRVQASPQLQVSVGDQQVLDASVDALAQAHQQGLPRRLEQPALGHNG

SEQ ID NO: 198313 - protein, 223 aa, Unknown
  Bacterial polypetide isolated from the Sargasso Sea
MKTHVIVFPGSNCDRDVAVAIQNIIGSSPEMVWHKDSTINQSDLIVVPGGFSYGDYLRCGAMASTSPIMKSVIENANKGVPVMGICNGFQILIESGLLQGALMRNSSLSFICRDIIIKPTNTKTIFTNKSTISKMPIAHNEGNYFANSNQIKEIEDNDQIAFQYCDENGDINAHSNPNGSINNIAGVFNKSKNVLGMMPHPERAAESIHGCDDGRNIFESLLS

SEQ ID NO: 198314 - protein, 226 aa, Unknown
  Bacterial polypetide isolated from the Sargasso Sea
MSFKSAVITFPGSNCDRDALCYLKDLTKGEVHNIWHEETSLPKVDLVILPGGFSFGDYLRSGAMASKSKIIDEVVKHANDNRYLLGICNGFQILTEIGLLEGALIQNKKLKFLGKNCFIKKKFKNNFNLSIKDNQVLQIPVAHNEGNFYCDTETLNLLKNNEQIAFEYCKGEFSNTEENINGSIEAIAGITNKKKNVLGMMPHPERAYSDFHQSQDGRLIIESLIS

SEQ ID NO: 198315 - protein, 378 aa, Unknown
  Bacterial polypetide isolated from the Sargasso Sea
SSSVEMAFKGDLGLELNLDQVPCREENMTPYEMMLSESQERMLIILEDDKEEKAKEIFKKWDLDFVIIGKTTNTKNLILKFQDQEVAKIPISALSSNAPQYQRKFFEKKLPSKNIKFKDFKKIKLEKALLQILSSPNYSNKSWVTEQFDQMVMCDTVKKSGSDSSIIRIHGKKKAISVTVDSSAIYCKSHPFSGGKQIVCENWRNLISVGSKPIAITNCLNFGNPEDPKIMGEFADCVKGIKSACEFLDYPVVSGNVSFYNGTNKKNIYPTPVIGGVGLINELNKPIENFFKKEGSLIISIGKNFGHLTQSALFLEVFNFNDGPPPEVNLLNEKNNGEIVLKLIQNNMVNSVHDISSGGLIIALAEMSINSNLGLKIN

SEQ ID NO: 198316 - protein, 538 aa, Unknown
  Bacterial polypetide isolated from the Sargasso Sea
MTVNKDQIEAHGLTPDEYKKIKEYLGRDSNLLELGIFSAMWNEHCSYKSSKVHLKKLPTKNNIVIQGPGENAGVIDIGDEDAIVFKIESHNHPSFIEPYQGAATGVGGILRDVFTMGARPIALMNSIHFGSPKNHKTKNLLSGVVSGIGGYGNSVGIPTVGGETKFNDTYNENILVNAMAIGLANKNKIFYSKAKGLNKAVVYVGSKTGRDGIHGATMASAEFDENSEEKKPTVQVGDPFTEKLLLEACLELMKDNSIISIQDMGAAGLTSSSIEMASKGKLGIELDLNKVPCRENNMTPYEMMLSESQERMLLILDDNKEEEAKKIFDKWDLDFVVIGKTTDTNRLILNFNTKKVADIPIPALADKAPLYERKYILKKSKKEKIDINNFKKIKIDDALLKILSSPNHSNKNWITDQYDQSVMCDTIQKSGGDSAVVRIHNKNKAIAISVDSSASYCKANPKTGGKQIVAENWRNLISVGAKPMAITNCLNFGSPEKPEVMGEFIDCINGIREACEFLNFPVVSGNVSFYNETKSKSI

SEQ ID NO: 198317 - protein, 227 aa, Unknown
  Bacterial polypetide isolated from the Sargasso Sea
MKSSVIIFPGSNCDRDMDVALKKFGFQNKMVWHNDPELPKSDLIVLPGGFSYGDYLRCGSIAGKSKIINSVIKFAKSGGLVLGICNGFQILTETGLLPGVLQQNKYLRFICKNVFIKINNKENKFFKNVKKDTLELHIAHNEGSYFCSIEEMKSIKDNNQIAVKYCDHKGDVSEKNNPNGALENIAGIFNKEKNILGMMPHPERMIDKSLSGEDGSIFFKNLLQNIN

SEQ ID NO: 198318 - protein, 225 aa, Unknown
  Bacterial polypetide isolated from the Sargasso Sea
MNSSVIVFPGSNCDRDIAVALEKMQFKNKLVWHKDTNLPKSDLIVIPGGFSYGDYLRSGAIAAKSKIINEVIKAANEGCLVLGVCNGFQILIETGLLKGALLRNKNLKFINKDVSLKVNSINNKFCKKYKLGQIIKLNIAHNEGNYFTNKDHLKELEDNNLIAFKYCDEKGFINQNSNPNGSVNNIAGILNKNKNILGMMPHPERMIEKSVSGDDGISLFSSLLN

SEQ ID NO: 198319 - protein, 94 aa, Unknown
  Bacterial polypetide isolated from the Sargasso Sea
MNITKEVIQKHGLTIEEFVKIKDLLQREPNILELGIFSAMWNEHCSYKSSKIHLKKLPTKNKNVIQGPGENAGIIDIGDGDAIVFKIESHNHPS

SEQ ID NO: 198320 - protein, 198 aa, Unknown
  Bacterial polypetide isolated from the Sargasso Sea
MTITKDQIESHGLKLDEYNKIKKLLGREANLLELGIFSAMWNEHCSYKSSKIHLKKLPTKNKVVIQGPGENAGVIDIGDDDAIVFKIESHNHPSFIEPYQGAATGVGGILRDVFTMGARPIALMNSIHFGSPDNKKTQNLLSGVVSGIGGYGNSVGIPTVGGETKFNSTYNENILVNAMAVGHAKKNRIFYSKAKGIN

SEQ ID NO: 198321 - protein, 225 aa, Unknown
  Bacterial polypetide isolated from the Sargasso Sea
MKSSVIVFPGSNCDRDIAVTLEKLQFKNSMVWHKEMSLPKSDLIVVPGGFSYGDYLRSGAIAAKSNILNEVIKAAKEGCLILGICNGFQILIECGLLQGALLRNFGLKFISKNIFVKVHSNKNNFFNKYKKNEVLKLNIAHNEGNFFTDKKHLKQLEDNDLIPIKYCDEKGNINTASNPNGSLNNIAGIFNKDKNILGMMPHPERMADKICSDEDGIPLFLSLMS

SEQ ID NO: 198322 - protein, 167 aa, Unknown
  Bacterial polypetide isolated from the Sargasso Sea
MEVNEQIAVDHGLKKEEFNKICGLLKRKPNLTELGIFSAMWNEHCSYKSSRIHLKKLNTKGKKVIQGPGENAGIIDIEDDDAIVFKIESHNHPSFIEPYQGAATGVGGIMRDVFTMGARPIANLNSIHFGSPQHPKTKNLLRGVVKGIGGYGNCMGIPTVGGQTNFD

SEQ ID NO: 198323 - protein, 227 aa, Unknown
  Bacterial polypetide isolated from the Sargasso Sea
MKSSVIIFPGSNCDRDMDVALKKFGFKNQMVWHNDLEIPKSDLIVLPGGFSYGDYLRCGSIAAKSKIIKSVVEFANSGGLVLGICNGFQILTETGLLPGVLLQNKYQKFICKNVYVKINDKENKYFKNIKKEILELHIAHNEGNYFCSDEEIKSLNDNNQIAVTYCNEKGNEDKQFNPNGALRNIAGIFSKKKNILGMMPHPERMIDKYLSSNDGNFFFESLFENLK

SEQ ID NO: 198324 - protein, 373 aa, Unknown
  Bacterial polypetide isolated from the Sargasso Sea
KADITLDILEKGAPSYKRPYEINIFDNESIQEDKYKNESPISILKKMIESPNLCSRRWVWEQYDHMVMTDTVLLPGGDSAIIRVHGTNKGLSVTSDSTPRYCASDPFEGGKQAVAEAWRNLISVGSTPIAITDCMNFGNPEKKEIMGQFAGVIKGMIEACNTLDFPVVSGNVSLYNETNGKGINPTPVIGGVGVVNNLDIFSDQNFKRINDLILVIGKTNGHLTQSIYANELLNYKKGLPPKVDLEEELKNGLALKELITKRLIDTSHDISDGGLLVALTEMSMKNNIGYKVNIAKENLNSYLFGEDQARYAVAIEKSKIEEVRSFLIDKNIFFEEIGQTNKDNIIFNDEKISVAELRDLYENWFNNYLSEAS

SEQ ID NO: 198325 - protein, 267 aa, Unknown
  Bacterial polypetide isolated from the Sargasso Sea
MDNLSFAIENGLTKDEYKLILKKLKREPNKNEIGVIAAMWSEHCSYKSSKFYLKKLPTKGKCVIQGPGENAGVIDIGDNQCLVFKIESHNHPSFIEPYQGAATGVGGILRDVFTMGARPIALMNSLRFGNPKKKDTKRVVNGVVSGIAGYGNCMGIPTIGGEVYFDDCYNGNPLVNAFALGIAKKNKIFKGLADGPGNPVFYLGAKTGKDGVKGAIMASDIFESQEDLDRPTVQIGDPFKEKLLLEACLEMFKLKGIVGIQDMGAAG

SEQ ID NO: 198326 - protein, 208 aa, Unknown
  Bacterial polypetide isolated from the Sargasso Sea
MKSSVIIFPGSNCDRDMDVALKKYGFKNQMVWHDDKNIPKSDLIVLPGGFSYGDYLRCGSIAAKSKIIRSVIEFANKGGLVLGICNGFQILTETGLLPGILQQNKYLNFICKNVFVKINNKDNKYFKNSKKSILELHIAHNEGNYFCSNDELKSLKDNNQIAVTYCDKDGLENEESNPNGAINNIAGIFSKNKNILGMMPHPERMVDE

SEQ ID NO: 198327 - protein, 598 aa, Unknown
  Bacterial polypetide isolated from the Sargasso Sea
MIVNEQLAIDHGLKKEEYKKICELLKRTPNITELGIFSAMWNEHCSYKSSRLHLKKLPTKGKQVIQGPGENAGVVDIGDNDAIVFKIESHNHPSFIEPYQGAATGVGGIMRDVFTMGARPIANLNSIHFGSTQHKKTKNLLRGVVHGIGGYGNCMGVPTIAGQTSFDSSYNGNILVNAMTLGLVKKDKIFYSKAAGLNKPVIYVGSKTGRDGIHGASMASASFDEKIEEKKPTVQVGDPFTEKLLLEACLELMAGDSIIAIQDMGAAGLTSSSIEMASKGNLGIEINLNKVPCRETKMTPYEIMLSESQERMLIVLENGKEEHAKTIFDKWNLDFAVIGKTTKSKKIELYFDSEKVADIPVNTLVENSPMYDRKWKKAKLPKKNKINKDDINNLKIIEVLKKILANPNICSKEWIWQQYDHTVMGDTIQRPGGDSGVVRVHGTNKAVAASVDSSAVYCWAHPLTGGKQVVCESFRNLISVGAKPIAITNCLNFGSPENKENMGEFVECVQGIGEASSYLKFPVVSGNVSFYNQTKDQGIKPTPSIGGVGLIKDYTKMITMDFKEVDNVVLVIGKTEGHIDQSLFARVILDEKNGPPPE

SEQ ID NO: 198328 - protein, 227 aa, Unknown
  Bacterial polypetide isolated from the Sargasso Sea
MKSAVITFPGSNCDRDMDVALKKFGFKNKMVWHQDVELPKSDLVVLPGGFSYGDYLRCGSMASKSKIMQSVINFANSGGMVMGICNGFQILVETGLVPGVLLRNKYLEFICKNVFVKINNKDNAYFRKISKNVLELHIAHNEGNYFCTNDQLKEIEDNTQVAINYCDPEGKIEEPFNPNGSIKNIAGIFNKEKNVLGMMPHPERMIDHSLSGEDGSHFFKNLINNLK

SEQ ID NO: 198329 - protein, 259 aa, Unknown
  Bacterial polypetide isolated from the Sargasso Sea
MLSPRALILRGPGTNCDQETAYAFERAGGHTKRIHVQALAESPSLLDDFQIFCIPGGFSYGDDIASGRILAIELTERLGDTLRRFHERGGLILGICNGFQVLLQTGLLTPDSAPNKQVATLAQNASERFIDCWVRLQATPGNCVFLRGLDHFELPVAHAEGRFTTADKTFLQHLDSRGQFVLHYAESSDGQQTNPNGSEQNVAGMCDPTGRIFGLMPHPERFIDATQHPAWVGRMDPHADGAGLTFFRNALRVIGKDLG

SEQ ID NO: 198330 - protein, 261 aa, Unknown
  Bacterial polypetide isolated from the Sargasso Sea
DSYSSRPKIAILREQGINGQTEMAAAFHQAYFDPYDVHMSDLITKEKNLKDFSGIVFPGGFSYGDVLGAGKGWANSILFNSFLYDEFSEFFSDKNKIVLGVCNGCQILSSLKKIIPGSENWPNFIKNYSDQFEARLTQVNIQKSPSVFFDGMAGSRLIVPVAHGEGRAQFESNKSFDKFSEEKLAVIKYCDDESSPTQNYPLNPNGSKDAIAGCTSKDGRITAMMPHPERAFLNRQISWTDAEDEFSPWKMIFLNARKAIN

SEQ ID NO: 198331 - protein, 381 aa, Unknown
  Bacterial polypetide isolated from the Sargasso Sea
AIFDDKIEEKKPTVQVGDPFTEKLLLEACLELMGGKSIISIQDMGAAGLTSSSIEMASKGNLGIELNLNKVPCREEKMTPYEIMLSESQERMLIVLENGKEAEAKKIFDKWNLDFAVIGKTTDSKKIKLFFDNNKVAEIPINILAENAPVYDRKWKKTKLPQKIKLKKDDFKKLKITEVLKKILALPNISSKEWIWQQYDHTVMGDTIQKPGSDSGVVRIHGTNKAVATSVDSSAVYCYAHPLTGGKQVVCESWRNLISCGSKPIAITNCLNFGNPEKEKNMGEFVECVEGINEASKFLDYPVVSGNVSFYNETKDKGIKPTPAIGGVGLIKDYKKMVTMNLKNSENLILTIGKTEGHIDQSIFARNILNEKKGPPPVVNL

SEQ ID NO: 198332 - protein, 146 aa, Unknown
  Bacterial polypetide isolated from the Sargasso Sea
MNEVNEQIAIDHGLKKEEFSKICDLLKRTPNLTELGIFSAMWNEHCSYKSSKLHLKKLNTKGKKVIQGPGENAGVIDIEDNDAIVFKIESHNHPSFIEPYQGAATGVGGIMRDVFTMGARPIANLNSIHFGSPQHPKTKNLLRRSC

SEQ ID NO: 198333 - protein, 227 aa, Unknown
  Bacterial polypetide isolated from the Sargasso Sea
MKSAVIIFPGSNCDRDMDVALKKFGFKNQMVWHDDQEIPKSDLIVLPGGFSYGDYLRCGSIAGKSKIIKSVVEFANSGGLVLGICNGFQILTETGLLPGVLLQNKYQKFICKNVHVKINDKENKYFKNIKKEVLELHIAHNEGNYFCSEDELKSLINNNQIAVTYCNENGKESDEFNPNGALSNIAGIFNKNKNILGMMPHPERVIDKSLSSDDGNFFFENLVENLK

SEQ ID NO: 198334 - protein, 409 aa, Unknown
  Bacterial polypetide isolated from the Sargasso Sea
KVIQGPGENAGVIDIEDNDAIVFKIESHNHPSFIEPYQGAATGVGGIMRDVFTMGARPIANLNSIHFGSPQHKKTKNLLRGVVHGIGGYGNCMGVPTIAGQTSFDSSYNGNILVNAMTLGLVKKDKIFYSKAAGLNKPVIYVGSKTGRDGIHGASMASASFDEKIEEKKPTVQVGDPFTEKLLLEACLELMAGDSIIAIQDMGAAGLTSSSIEMASKGNLGIEINLNKVPCRESKMTPYEIMLSESQERMLIVLENGKEEQAKKIFDKWNLDFAVIGKTTKSKKIELYFDEEKVADIPVNTLVENSPMYDRKWKKAKLPKKNKIKKEDIKHLKIIDVLKKILANPNVCSKEWIWQQYDHTVMGDTIQKPGGDAGVVRVHGTDKAVAASVDSSAVYCWAHPLTGGKQVGL

SEQ ID NO: 198335 - protein, 136 aa, Unknown
  Bacterial polypetide isolated from the Sargasso Sea
MNEELILQHGLTLDEFQVIRKYLNRDLSIEELGIFSAMWNEHCCYKTSKKWLKKLPTDNEIVIQGPGENAGVIDLQDNDGIAFKIESHNHPSYIEPFNGSATGVGGILRDIFTMGARPIATLDSIRFGLIETEKTK

SEQ ID NO: 198336 - protein, 227 aa, Unknown
  Bacterial polypetide isolated from the Sargasso Sea
MKSSVIIFPGSNCDRDIDVALKKFGFKNQMVWHNNENIPKSDLIVLPGGFSYGDYLRCGSIAGKSKIIKSVVDFAESGGLVMGICNGFQILTETGLLPGILQQNKNLNFICKNVFVKIKDKNNKYFKNIKKDTLELHIAHNEGNYFCSDEELKSLEDNNQIALTYCDNKGLENIENNPNGAVKNIAGIFNKNKNVLGMMPHPERMIDKYLSGEDGSLFFENLLGNLK

SEQ ID NO: 198337 - protein, 219 aa, Unknown
  Bacterial polypetide isolated from the Sargasso Sea
MRAAVIIFPGSNCDRDLLAALRFAGHETISIWHKETELPKYIDLIAIPGGFSFGDYLRCGAIAAKSPIFREIIKHIDRGGYALGICNGFQIFTEAGILPGILQQNKGTKFISKVIDLRVTNTSSTFTHNYSYNSVISIPIAHHEGNYFASKDDLKKLKDKNCIAFEYIDNPNGASDNIAGILSENHRVLGMMPHPERHTESAHGCQDGYPFFKGLLETS

SEQ ID NO: 198338 - protein, 153 aa, Unknown
  Bacterial polypetide isolated from the Sargasso Sea
MEEITRQVVLEHGLKDDEYEKILEILGREPNYTELGIFSVMWSEHCSYKSSKKWLKTLPTEAPWVICGPGENAGVVDIGDGLSVIFKMESHNHPSFIEPYQGAATGVGGILRDVFTMGARPFAILNALRFGSPENPKTRHLLSGVVRGIGGYG

SEQ ID NO: 198339 - protein, 225 aa, Unknown
  Bacterial polypetide isolated from the Sargasso Sea
MKSAIIIFPGTNREREMITALGEALGNQPYVIWHEENSFPQVDLIVLPGGFSYGDYLRPGSMAANSPIIAEIINRANRGVYVLGICNGFQVLTEARLLPGALMRNIDLNFICREVYLRTENPNSQFLQKYNSGEVLKIPVAHHDGNYYASEDILDDLEQRDLVAFRYCSPDGQTSESFNPNGSKRNIAGIYNHNRNVLGMMPHPENAFALPSDHGRRLFMGFADN

SEQ ID NO: 198340 - protein, 228 aa, Unknown
  Bacterial polypetide isolated from the Sargasso Sea
MRCAVIVFPGSNCDSDLYKAVNAFEGVDAEYVWYTTENLDAFDLILLPGGFAYGDYLRAGALAARTPVLKALIRASERGARVIGICNGFQVLTECGLLPGALQRNSGLHFICDTPLIEVVQDQSSFTSRYRQGELIRLPIAHGEGNYICDELTLRHLQAENRIVFRYASGSNPNGSVDNIAGILNSKGNVLGMMPHPERAMADWMGSSDGRHLFESALNLFPETADAA

SEQ ID NO: 198341 - protein, 767 aa, Unknown
  Bacterial polypetide isolated from the Sargasso Sea
MNDDQIKEKLSELNIPLTPEEGRKIQHEMLGRSPSLAELVLFSIQGSEHCSYKSSRSHLKNFVTDGPDVVLGAKEDAGVVAITKDKNGNRWCIVMSHESHNHPSQIVPYEGAATGIGGNVRDVMCMGAEVIACTDSFRFGNIKHSKTKWIHDGVVAGVAGYGNPLGIPNIGGDIYYHDGYSENCLVTLVSLGIVREDHIIHSYAPENAEGYDLILIGKPTDNSGFGGASFASLELEEEKKEQNKGAVQEPNAFLERHLLKSTYALFQYLQENNLCERVGFKDLGAGGVACASVELAETSGYGSEVWLDKVHIGMEGLHPSVYLCSETQERFMWVSPPELTEKIISHYNEVFDLPGVSSGARASVIGKIRNDKQYIVHNNGEKIIDALAEEVTKGFLYDREYKKPDQEFHEPSLPASLDHNAILKKILAHENIASRSVVYESYDKQVQGRTVTEAGQSDSGVMAPFNSDNYPEEIRKVGIALSTDHNPRYSIISPYLGGVNAVVEAMRNVAAVGATPHALSDCLCFGNPEKPHQMWEFVEAVRGISDASNGIKLKENQNHPTPIIAGNVSFYNESKSGAIPPSPIVSCLGKINNVENTISMSFKNENSAILIVGSRKDELGGSLFYDLHGELGANVPTPNLEEVKNQIYAITDCIEEKLFFSCHDISDGGLAVAISEMTFKNNIGCDVMVPGNLALEKLLFSETGGFIIETEPKHLQQIKNIFKVHDIVYYNIGKTNNNGRIRFNDAIDLDLKEAKTLWSNGLRDKIK

SEQ ID NO: 198342 - protein, 756 aa, Unknown
  Bacterial polypetide isolated from the Sargasso Sea
MITKEICKRLKRKPNRTELGMFGVMWSEHCCYRNSKPLLSKFPTKGKNVLVGPGENAGVIDVGNNQKLVFKIESHNHPSAIEPFQGAATGVGGILRDIFTMGARPIAVLNSLRFGNLDKSSNVDLLRGVVSGISHYGNCVGVPTVGGEIDFDDSYSGNPLVNVMALGLLETEEIVCSGAKNVGSPVLYVGNTTGRDGVGGASFASSELTTTSLDDRPAVQVGDPFVEKSLIEACLDAFKTGDVIAAQDMGAAGLTCSSAEMAANGNLGISIDLDLVPSREDDMSSYQYLLSESQERMLFVVKEEKINDLIEKFNKWGLYASVIGEVIGTNEVIISHKGKIVAQIPTSALSDDTPVNFHNVINNPPDDLLKKWEWKENDLPEIHEQKIFSLKENKNFSFSEIILKLLSNPSIASKRWIYKQYDSQVQANTVFKPGKSDAAVVRLREQNKKNKSKVFSGVAASVDCNSRWVALDPFRGSIAAVAESARNVSCVGAEPVAITNNLNFSSPENAIGYWQLSSSCNGIAEACKALETPVTGGNVSLYNESKNKDNLITPINPTPVIGMVGKIDNVEKAISSEWKNIEDEIWLIGSSKSEIKIAASSYLEYFHGEITGRPPKIDLLDEKFCQSFLRNAILNSFVVSSHDISDGGLAIALAESCILSSMGATIELEKNVNRVDNLLFAEGGSRIIFSISKMKQNEWFNYLKQNQINFPSSVFVKKIGYVSSDTLKIKINEKNICNIRVEELTEKFNNSISGYF

SEQ ID NO: 198343 - protein, 229 aa, Unknown
  Bacterial polypetide isolated from the Sargasso Sea
MNSTIVIFPGTNREHDMVMAVQQASGKKPNFVWYNDTSFPKTDLIIVPGGFSYGDYLRSGAMAARSPAMNSVLEYASKGVPILGVCNGFQILTEVGLLPGALIRNKNLKFICRNVSIKVEVDDSIFTSRYSKGQILSIPVAHNDGNYFASEGLLQELHDKSQIAFKYTDQSGRVDASTNPNGSCENIAGILNAQKNVLGLMPHPENATDRNLGGIDGRPLFQSLVDAIT

SEQ ID NO: 198344 - protein, 516 aa, Unknown
  Bacterial polypetide isolated from the Sargasso Sea
MLKRTPNITELGIFSAMWNEHCSYKSSRLHLKKLPTKGKKVIQGPGENAGVIDIEDNDAIVFKIESHNHPSFIEPYQGAATGVGGIMRDVFTMGARPIANLNSIHFGSPQHKKTKNLLRGVVHGIGGYGNCMGVPTIAGQTSFDSSYNGNILVNAMTLGLVKKDKIFYSKAAGLNKPVIYVGSKTGRDGIHGASMASASFDEKIEEKKPTVQVGDPFTEKLLLEACLELMAGDSIIAIQDMGAAGLTSSSIEMASKGNLGIEINLNKVPCRETKMTPYEIMLSESQERMLIILENGKEEEAKKIFDKWNLDFAVIGKTTKSKKIELYFDEEKVADIPVNTLVENSPMYDRKWKKAKLPKKNKIKKEDIKHLKIIDVLKKILANPNLCSKEWIWQQYDHTVMGDTIQKPGGDAGVVKVHGTDKAVAASVDSSAVYCWAHPLTGGKQVVCESFRNLVSVGAKPIAITNCLNFGSPENEENMGEFVECVQGIGEASDYLKFPVVSGNVSFYNQTKDKGI

SEQ ID NO: 198345 - protein, 372 aa, Unknown
  Bacterial polypetide isolated from the Sargasso Sea
MTQSKEKIHTSTLVDAEIIAEHGLSREEYNKILDIMGREPNLLELGIFSVMWSEHCSYKSSKYWLKTLPTEAPWVICGPGENAGIIDIGDGQAAVFKMESHNHPSYIEPYQGAATGVGGILRDVFTMGARPIANMNVLRFGRPEHQKTKYLLEGVVAGIGGYGNCVGVPTVGGECLFHKSYDGNILVNAMTVGIADTDRIFYSAATGIGNPLIYVGSKTGRDGIHGATMASAEFSSETNDKRPTVQVGDPFTEKLLIEACIELMQTDCIIAIQDMGAAGLTSSSFEMASKGGVGVEIDLDKVPQREKNMSAYEMMLSESQERMLMVLKPGSEERARDIFKKWTLDFSIIGMLTETGRMVLTHHGKRVADLPI

SEQ ID NO: 198346 - protein, 385 aa, Unknown
  Bacterial polypetide isolated from the Sargasso Sea
MINLEYNDLYDLNEALKFENLTINDYEEICKRLKRKPNRTELGMFGVMWSEHCCYRNSKPLLSKFPTKGKNVLVGPGENAGVIDVGNNQKLVFKIESHNHPSAIEPFQGAATGVGGILRDIFTMGARPIAVLNSLRFGNLDKNSNVDLLRGVVSGIAHYGNCVGVPTVGGEIDFDDSYSGNPIVNVMALGLLETNEIVCSGAKNIGSPVLYVGNTTGRDGVGGASFASSELTTTSLDDRPAVQVGDPFIEKSLIEACLDSFKTGDVIAAQDMGAAGLTCSSAEMAANGNLGISIDLDLVPSREDNMSSYQYLLSESQERMLFVVKKEKINNLIEKFNKWGLYANVIGEVIETNEVIISHKNKIVAQIPTSALSDDTPVNVHNVIN

SEQ ID NO: 198347 - protein, 300 aa, Unknown
  Bacterial polypetide isolated from the Sargasso Sea
MIVNEKIAIDHGLKKDEYKKICELLKRNPNITELGIFSAMWNEHCSYKSSRLHLKKLPTKGKQVIQGPGENAGVIDIGDNDAIVFKIESHNHPSFIEPYQGAATGVGGIMRDVFTMGARPIANLNSIHFGSSQHKKTKNLLRGVVHGIGGYGNCMGVPTIAGQTSFDSSYNGNILVNAMTLGLVKKDKIFYSKAAGLNKPVIYVGSKTGRDGIHGASMASASFDDKIEEKKPTVQVGDPFTEKLLLEACLELMAGDSIIAIQDMGAAGLTSSSIEMASKGNLGIEINLNKVPCRETNMTP

SEQ ID NO: 198348 - protein, 227 aa, Unknown
  Bacterial polypetide isolated from the Sargasso Sea
MKSSVIIFPGSNCDRDMDVALKKFGFKNQMVWHNDTNIPKSDLIVLPGGFSYGDYLRCGSIAAKSKIIKSVIDFANSGGLVLGICNGFQILIETGLLPGALLTNKYLKFICKNVFVKLNENESKYFNKIKKNILELHIAHNDGNYFCTDDELKSLDDNNQIAVKYCSKDGDISENYNPNGSIKNIAGIFNKNKNILGMMPHPERVIDRSLSSEDGAFFFKNLIENLR

SEQ ID NO: 198349 - protein, 232 aa, Unknown
  Bacterial polypetide isolated from the Sargasso Sea
MRKNKFAVLNFPGSNCEKDCHFVIEHVLKQNCKYIWHEETDINNVDCIIIPGGFSYGDYLRTGSIAAQSKIAKSLKKYSKQGGTIIGICNGFQILTELKLLPGTLLRNRSLNFICKEVNLVVNNKSRFTSKYDHNEVIKVPIAHAEGNYFANSTIHKELIKNNQIIFSYCDKEGNINDSSNPNGSLNGIAGITNKEGNVLGMMPHPERVSEKVFGNTQGLGVFESILDFHTN

SEQ ID NO: 198350 - protein, 227 aa, Unknown
  Bacterial polypetide isolated from the Sargasso Sea
MKSSVIIFPGSNCDRDMDVALKKYGFKNKMVWHNDTELPKSDLIVLPGGFSYGDYLRCGSIAAKSNIIRSVMDFAKNGGLVVGVCNGFQILIETGLLPGALLRNKYLKFICKNVFIKINNFENKYFKNINKNILELHIAHNDGNYFCTTDELKSIKDNNQIALNYCDHNGKATKDSNPNGSLENIAGIFNKDKNILGLMPHPERMIDKYLSGEDGKIFFENLLNNLK

SEQ ID NO: 198351 - protein, 523 aa, Unknown
  Bacterial polypetide isolated from the Sargasso Sea
MEVTEAVAIDHGLKKEEFSKICELLKRTPNLTELAIFSAMWNEHCSYKSSRKHLKKMHTKGKQVIQGPGENAGVIDIGDDDAIVFKIESHNHPSFIEPYQGAATGVGGIMRDVFTMGARPIANLNSIHFGSPQHKKTKNLLRGVVKGIGGYGNCIGVPTIAGQTTFDESYNGNILVNAMTLGLVNKNKIFYSKAAGLDKPVIYVGSKTGRDGIHGASMASATFDDKIEEKKPTVQVGDPFTEKLLLEACLELMADNSIIAIQDMGAAGLTSSSVEMASKGNLGIELNLSKVPCREEKMTPYEIMLSESQERMLIVLEKGKEEHAKKIFDKWNLDFAIIGKTTDSKKIELIFDSKKVAEIPIDLLAENAPIYDRPWKKTKLPQKLKFDKDEFKSLKLSDCLKKILSNSNISDKKWIWDQYDHTVMGDTIQKPGGDAGVVRVHGTNKAVAASVDSSALYCFSHPLTGGKQIVCESYRNLISVGAKPIAITNCLNFGNPEKEKNMGEFVKCVEGITEASKYLDFQS

SEQ ID NO: 198352 - protein, 574 aa, Unknown
  Bacterial polypetide isolated from the Sargasso Sea
MIVNEKIAIDHGLKKDEYKKICELLKRTPNITELGIFSAMWNEHCSYKSSRLHLKKLPTKGKQVIQGPGENAGVVDIGDNDAIVFKIESHNHPSFIEPYQGAATGVGGIMRDVFTMGARPIANLNSIHFGSTQHKKTKNLLRGVVHGIGGYGNCMGVPTIAGQTSFDSSYNGNILVNAMTLGLVKKDKIFYSKAAGLNKPVIYVGSKTGRDGIHGASMASASFDDKIEEKKPTVQVGDPFTEKLLLEACLELMAGDSIIAIQDMGAAGLTSSSIEMASKGNLGIEINLNKVPCRETKMTPYEIMLSESQERMLIVLENGKEEQAKKIFDKWNLDFAVIGKTTKSKKIELYFDSEKVADIPVNTLVENSPMYDRKWKKAKLPKKNKINKDDINILKVIEVLKKILANPNVCSKEWIWQQYDHTVMGDTIQKPGGDSGVVRVHGTNKAVAASVDSSAVYCWAHPLTGGKQVVCESFRNLISVGAKPIAITNCLNFGSPENEENMGEFVECVQGIGEASSYLKFPVVSGNVSFYNQTKDQGIKPTPSIGGVGLIKDYNKMITMDFKEVDNVVLVIGK

SEQ ID NO: 198353 - protein, 227 aa, Unknown
  Bacterial polypetide isolated from the Sargasso Sea
MKSAVITFPGSNCDRDMDVALKKFGFKNKMVWHQDVELPKSDLVVLPGGFSYGDYLRCGSMASKSKIMQSVINFANSGGMVMGICNGFQILVETGLVPGVLLRNKYLEFICKNVFVKINNKNNGYFKNISNDVLELHIAHNEGNYFCTNDQLKEIEDNTQVAINYCDPEGKIGEPFNPNGSINNIAGIFNKEKNVLGMMPHPERMIDHSLSGEDGSHFFKNLINNLK

SEQ ID NO: 198354 - protein, 730 aa, Unknown
  Bacterial polypetide isolated from the Sargasso Sea
MEVNEKIAIDHGLKKEEFKKICTLLKRVPNITELGIFSAMWNEHCSYKSSRKHLKNLHTKGKKVIQGPGENAGVIDIGDDDAIVFKIESHNHPSFIEPYQGAATGVGGIMRDVFTMGARPIANLNSIHFGSPQHKKTKNLLRGVVRGIGGYGNCIGVPTIAGQTSFDESYNGNILVNAMTLGLVNKKKLFYSKAAGIDKPVIYVGSKTGRDGIHGASMASAIFDDKIEEKKPTVQVGDPFTEKLLLEACLELMADNSIIAIQDMGAAGLTSSSVEMASKGKLGIELDLSKVPCREEKMTPYEIMLSESQERMLIVLENGKEKSAKKIFDKWNLDFAVIGKTTNTKKIEINFNNKKVADIPLNLLSENAPIYDRKWKKNKLPQKIKFKKELFKSLKLSDCLKKLLMHPNICDKEWIWEQYDHTVMGDTIQKPGGDAGVVRVHGTEKAVAASVDSSALYCHAHPLTGGKQVVCESWRNLISVGAEPIAITNCLNFGNPEKEENMGEFVECVQGISEASKYLDYPVVSGNVSFYNETKDKGIKPTPSIGGVGLIKNYKKMMNMELKKEGNLILVIGKTEGHLEQTIFAREILSEKKGPPPEINLFNEKNNGLTISKLIKDNLIESCHDISLGGILIAASKMCIKSNKGIKINNLKNLINKFEYFFSEDQGRYLIEINKDNFKKVEKIFIDNSVHFDELGVVNNDKFLFSDEINLSIEDIIKAYKNWLKEYMVN

SEQ ID NO: 198355 - protein, 198 aa, Unknown
  Bacterial polypetide isolated from the Sargasso Sea
MVWHNDTELPKSDLIVLPGGFSYGDYLRCGSIAGKSKIINSVIEYSNTGGLVLGICNGFQILTETGLLPGVLQQNKYLEFICKNVHVKINDTKNKYFKNIKKEILELHIAHNEGNYFCSNDELKLIEDNNQIAVTYCDKDGTCDNNSNPNGAIKNIAGIFNKNKNILGMMPHPERMIDKYLSGEDGSIFFENLIGNLN

SEQ ID NO: 198356 - protein, 274 aa, Unknown
  Bacterial polypetide isolated from the Sargasso Sea
MEVTETVALDHGLKKDEFAKICELLKRIPNLTELAIFSAMWNEHCSYKSSRKHLKKLHTSGKQVIQGPGENAGVIDIGDDDAIVFKIESHNHPSFIEPYQGAATGVGGIMRDVFTMGARPIANLNSIHFGSPQNKKTKNLLRGVVKGIGGYGNCIGVPTIAGQTSFDDSYNGNILVNAMTIGLVNKNKIFYSKAAGIGKPVIYVGSKTGRDGIHGASMASATFDDKIEEKKPTVQVGDPFTEKLLLEACLELMADKSIIAIQDMGGCRINFIKC

SEQ ID NO: 198357 - protein, 229 aa, Unknown
  Bacterial polypetide isolated from the Sargasso Sea
MKASIIVFPGSNCDRDIAVSIKKLTDLEPIMVWHKETSIPDSDLIVIPGGFTFGDYLRCGSIAANSPIMNDVIKKATGGLPTLGICNGFQILTESGLLPGTLIKNDCLSFLCKTVSIRVENNETNFSKKYKQNEVINIPIAHNEGNFFANEDTLKKIKDSNQIIFKYCNQNGEVNNETNPNGSIENIAGITNEQGNVLGMMPHPERATCEITKLSDGENLFKSISEFLL

SEQ ID NO: 198358 - protein, 225 aa, Unknown
  Bacterial polypetide isolated from the Sargasso Sea
MRSSVIVFPGSNCDRDIAVALEKLQFKNSMIWHKENELPKSDLIVIPGGFSYGDYLRSGAIAAKSNILSEVISAGKRGSLILGICNGFQILIECGLLQGALLRNSGLKFISKDIHVKVQSNKNKFFNKYKLNEILKLNIAHNEGNYFTDKKHLDELENDDLIPIKYCDKKGNINSGINPNGSINNIAGIFNKNKNILGMMPHPERMSDKILSNEDGLGLFLSLMN

SEQ ID NO: 198359 - protein, 134 aa, Unknown
  Bacterial polypetide isolated from the Sargasso Sea
MTITKQQIEVHGLKLDEYKKIKDLLGREPNLLELGIFSAMWNEHCSYKSSKLHLKKLPTKNNIVIQGPGENAGVIDVGDNDAIIFKIESHNHPSFIEPYQGAATGVGGILRDVFTMGARPIALMNSIHFVRLKI

SEQ ID NO: 198360 - protein, 551 aa, Unknown
  Bacterial polypetide isolated from the Sargasso Sea
MSFQEHEKLHIEKNVKRELTTTESQILAAEWSEHCSYKSSKQHLKMLPTTGPNVIVEKGYDSGVLDVGDGYVVTVHIESHNHPSAVEPFGGAATGVGGVIRDILSAGTRPIALFDGLRFGNIETDSHARWLFKNAVAGIADYGNCLGIPTIGGEVEFDECYKNYALVDVAAVGFGKKSKLIKNHANIGDLVILIGGSTGRDGVGGSQFASDALEGEDRSAVQIPDPFIEKLIIEAILECRDQNCINAMKDLGGGGLSCAISETAESLGIGIELDVKNVHLRESDLAPEEIMISESQERMLVIASPDNLSKINSICDKFRIQCSVLGKVKEDKMMHVKNGNETIALLPADFVARGPLISREKSKPKYLSNLPVAPEQQNNLSFTDVLLKLLSSPNIASKHWVYRQYDHEVGIRTVIKPGYDSSVLRLDNGKSLSVKIDGNPKHCYLNPRQGAIGCFEEACRNVVCTGATPIGMVDHLQFGNPEDPEIFWTFMESIEGITDFAKSLNIPCVGGKVSFYNETIDGPIKPTPLIGVLGLGDSSPLHPNPPSENDV

SEQ ID NO: 198361 - protein, 215 aa, Unknown
  Bacterial polypetide isolated from the Sargasso Sea
NCDRDMHHVLTDVFDLNAEFFWHEKNLPENIDAVVLPGGFSYGDRLRAGVIAAHSPIISDVKKLAEKGIPVLGVCNGFQILVESGLLPGVLLKNESLNFMCEWTNLIVKNNKTPFTNKLELNQKIPIPIANGEGRYFVDEQTLEQLEKNNQIVFSYENKVNGSVSQIAGVCNSDGNVVGMMPHPERAAEKEINQIDHKPSSLIFESLVETVGMKK

SEQ ID NO: 198362 - protein, 622 aa, Unknown
  Bacterial polypetide isolated from the Sargasso Sea
MIVNEKIAIEHGLKSDEYKKICDLLKRNPNITELGIFSAMWNEHCSYKSSRLHLKKLPTKGKKVIQGPGENAGVIDIEDGDAIVFKIESHNHPSFIEPYQGAATGVGGIMRDVFTMGARPIANLNSIHFGSPQHKKTKNLLRGVVHGIGGYGNCMGVPTIAGQTSFDSSYNGNILVNAMTLGLVKKNKIFYSKAAGLNKPVIYVGSKTGRDGIHGASMASASFDEKIEEKKPTVQVGDPFTEKLLLEACLELMAGDSIIAIQDMGAAGLTSSSIEMASKGNLGVEINLNKVPCREAKMTPYEIMLSESQERMLIVLENGKEELAKKIFDKWNLDFAIIGKTTDSKNIELFFDDKQVANIPVNTLVENSPMYDRKWKKSKLPKKNKIKKVSLNSLKIKDVLKKILSNPNICSKEWIWQQYDHTVMGDTIQKPGGDSGVVRIHGTNKAIAASVDSSAVYCWAHPLTGGKQVVAESWRNLISVGATPIAITNCLNFGSPENEDNMGEFVECVQGIGEACEYLNFPVVSGNVSFYNQTKEIGIKPTPSIGGVGLIKDYNKMITMNFKEINNIVMVIGKTEGHIDQSLFARSILDEKNGPPPEVNLFNEKNNGETLLNLIQKRSYKR

SEQ ID NO: 198363 - protein, 229 aa, Unknown
  Bacterial polypetide isolated from the Sargasso Sea
MKASIIVFPGSNCDRDIAVSIKKLTDLEPIMVWHKETSIPDSDLIVIPGGFTFGDYLRCGSIAANSPIMNDVIKKATDGLPTLGICNGFQILTESGLLPGTLIKNDCLSFLCKTVSIRVENNATSFSKKYKQNEVINIPIAHNEGNFFANEDTLKKIKDSNQIIFKYCNQNGEVNNETNPNGSIENIAGITNEQGNVLGMMPHPERATCEITKLSDGENLFKSISEFLV

SEQ ID NO: 198364 - protein, 514 aa, Unknown
  Bacterial polypetide isolated from the Sargasso Sea
MIVNEQVAVDHGLKKNEYAKICELLKRNPNITELGIFSAMWNEHCSYKSSRLHLKKLPTKGKKVIQGPGENAGVIDIEDNDAIVFKIESHNHPSFIEPYQGAATGVGGIMRDVFTMGARPIANLNSIHFGSPQHKKTKNLLRGVVHGIGGYGNCMGVPTIAGQTNFDSSYNGNILVNAMTLGLVKKDKIFYSKAAGLNKPVIYVGSKTGRDGIHGASMASASFDEKIEEKKPTVQVGDPFTEKLLMEACLELMKDNSIISIQDMGAAGLTSSSVEMASKGGLGIELNLEKVPCREENMTPYEMMLSESQERMLIILEDGKEKYAEEIFKKWDLDFNIIGKTTDTNKLTLKYKNKIQGEIPIDALASKAPVYDRKWTKKKLLNKKINFKNLKKVKVEDALIKILSSPNHSNKTWITSQYDQMVMCDTAQKSGGDAAIIRIHNTNKAIAVSVDSSANYCKAHPFTGGKQIVCENWRNLVSVGAKPIAITNCLNFGNPENPEIMGEFAECLLGIKEA

SEQ ID NO: 198365 - protein, 543 aa, Unknown
  Bacterial polypetide isolated from the Sargasso Sea
MEVNENIAIEHGLKKEEFDKICDLLKRKPNLTELGIFSAMWNEHCSYKSSRIHLKKLNTKGKKVIQGPGENAGVIDIDDNDAIVFKIESHNHPSFIEPYQGAATGVGGIMRDVFTMGARPIANLNSIHFGSPDHPKTKNLLRGVVKGIGGYGNCMGIPTIGGQTSFDESYNGNILVNAMTLGLVDKKKIFYSKAAGINKPVIYVGSKTGRDGIHGASMASAIFDDKIEEKKPTVQVGDPFTEKLLLEACLELMSGKSIISIQDMGAAGLTSSSIEMASKGNLGIELHLDKVPCREENMTPYEIMLSESQERMLIVLENGKEDEAKKIFDKWNLDFAIIGKTTNSKKIELFFNKDLVGTIPINILAENAPLYDRKWKKTKLPNKSKINKNNFKNLKLIDTLKKILSNPNVTSKEWIWEQYDHTVMGDTIEKPGSDSGIVRVHGTNKAVATSVDSSAVYCFAHPLTGGKQIVCESWRNLISCGSTPIAITNCLNFGNPEKEKNMGEFVECVEGINEASKYLDFPVVSGNVSFYNETKDKGIKPTP

SEQ ID NO: 198366 - protein, 365 aa, Unknown
  Bacterial polypetide isolated from the Sargasso Sea
MEVNEKIAVEHGLKPDEYQKICDLLKRVPNLTELGIFSAMWNEHCSYKSSRLHLKKLNTKGKKVIQGPGENAGVIDIGDDDAIVFKIESHNHPSFIEPYQGAATGVGGIMRDVFTMGARPIANLNSIHFGSTQHKKTKNLLRGVVKGIGGYGNCIGVPTIAGQTCFDQSYNGNILVNAMTLGLVNKNKIFYSKAAGINKPVIYVGSKTGRDGIHGASMVSAIFDDKIEEKKPTVQVGDPFTEKLLLEACLELMSDKSIIAIQDMGAAGLTSSSIEMASKGNLGIELHLDKVPCREEKMTPYEIMLSESQERMLIVLENGKEDSAKKIFDKWNLDFAVIGKTTDSKNIELYFEKEKVANVPIKFLA

SEQ ID NO: 198367 - protein, 227 aa, Unknown
  Bacterial polypetide isolated from the Sargasso Sea
MNSSVIIFPGSNCDRDMDVALKKFGFKNKMVWHDNDKLPKSDLIVLPGGFSYGDYLICGSIAGKSKIIQSVIDFANSGGMVLGICNGFQILTETGLLKGVLQQNKNIEFICKNIFVKINNSENKFFENIHKDVLELHIPHNEGNYFCTEDELKSLEDNNQIAAFYCSSDGKIDDKSNPNGARKNIAGIFNEKKNILGMMPHPERMIDKYLSGEDGSKFFENLIRNLK

SEQ ID NO: 198368 - protein, 223 aa, Unknown
  Bacterial polypetide isolated from the Sargasso Sea
MKTHVIVFPGSNCDRDVAVAIQNIIGSSPEMVWHKDSTIKQSDLIVVPGGFSYGDYLRCGAMASTSPIMKSVIENANKGVPVMGICNGFQILIESGLLQGALIRNSSLSFICRDIIIKPTNTKTIFTNKSKISKMPIAHNEGNYFANSNQIKEIEDNDQIAFQYCDENGDINAHSNPNGSINNIAGVFNKSKNVLGMMPHPERAAESIHGCDDGRNIFESLLS

SEQ ID NO: 198369 - protein, 227 aa, Unknown
  Bacterial polypetide isolated from the Sargasso Sea
MKSAVIIFPGSNCDRDMDVALKKFGFKNQMVWHNDQEIPKSDLIVLPGGFSYGDYLRCGSIAAKSKIIKSVIDFSNSGGLILGICNGFQILTETGLLPGVLLQNKYQKFICKNVHVKINDKENKYFKNIKKEILELHIAHNEGNYFCSDDEMKSLNDNNQIAVTYCNEKGKEDEQFNPNGASKNIAGIFNKKKNILGMMPHPERMIDKYLSSNDGNFFFENLFENLK

SEQ ID NO: 198370 - protein, 160 aa, Unknown
  Bacterial polypetide isolated from the Sargasso Sea
CGAIARFSPLINALDEFVKSGKRVLGICNGFQILTESGFLPGALVANKNLNFICDDVELDIVSSKGGWFNNGDEKQSIKLPIAHGEGRYHCDSDTLKKLVDNELIALRYKNNPNGSSFDIAGITNEKGNVLGLMPHPERACDETIGGTDGLFTLKSLILK

SEQ ID NO: 198371 - protein, 227 aa, Unknown
  Bacterial polypetide isolated from the Sargasso Sea
MKSSVITFPGSNCDRDMDVALKKFGFKNQMVWHNDNELPKSDLVVLPGGFSYGDYLRCGSMAAKSKIMQSVINFAKSGGLVMGICNGFQILVETGLVPGVLLRNKYLEFICKNVFVKIDNKENPYFKNLDKEVFEFHIAHNEGNYFCTNDQLKEIEDNNQVAIYYCSSSGQTEETFNPNGSIKNIAGIFNKEKNVLGMMPHPERMIDKNLSGEDGSIFLKNLIGNIK

SEQ ID NO: 198372 - protein, 221 aa, Unknown
  Bacterial polypetide isolated from the Sargasso Sea
MDNFTVGVVVFPGSNCDRDVSWALEGCLDIRTKYLWHESSDLSDVDAIVLPGGFSYGDYLRCGAIARFSPLINALDEFVKSGKRVLGICNGFQILTESGFLPGALTANKNLNFICDDVELDIISSKGGWFNNGGEKQTIKLPIAHGEGRYHCDPDTLKKLVDNELIALRYKNNPNGSSFDIAGITNEKGNVLGLMPHPERACDETIGGTDGLFTLKSLILK

SEQ ID NO: 198373 - protein, 494 aa, Unknown
  Bacterial polypetide isolated from the Sargasso Sea
MINSKNRQRKVSRSIALDLGLTNSEYNKVLEILGKKPNFTELCIFSAMWSEHCSYKSSKKWLKTMDFQNDSVICGPGENAGVIDIGNGLAAVFKMESHNHPSYIEPFQGAATGVGGILRDVFTMGARPIANLNCIRFGSPKHPKTKYLLEGVVAGIGGYGNCVGIPTVGGETYFNEHYNNNILVNAMTVGITKSNKIFYSKASGVGNPVVYVGSKTGRDGIHGASMSSAEFDETIETKRPTVQVGDPFTEKLLLEACLELMESDAIISIQDMGAAGLTSSSFEMASKGNLGIEINLDMVPQRELNMEAFEIMLSESQERMLIVIKKGKEKDAEQIFQKWELPFSIIGMLTNTGNMTLYKNSSLVAKLPIAPLVSEAPEYDRKWKKTTQENNLSIKKLDQINIQESLLKILSSPNLSSKKWVWGQYDHMVMTNTIVGPGSDAAVIRIGKSNTALAITTDCNPLYVNGNPKLGSIQAVAESWRNLICVGANHLQLL

SEQ ID NO: 198374 - protein, 330 aa, Unknown
  Bacterial polypetide isolated from the Sargasso Sea
MNKITEKMVEEHGISSEEYDFILESLNRDPTITELGIFSAMWSEHCSYKSSKYWLSQLPTKNDFVIQGPGENAGVIDIGDGYAAVFKMESHNHPSFIEPYQGAATGVGGILRDVFTMGARPVALLNSIRFGETSHEKTKHLLTGVVSGIGGYGNCMGIPTVGGEVEFNSSYNDNILVNAMCVGIAKKDKIFYSKASGVGNSVVYVGSKTGRDGIHGATMASAEFDDNSEEKRPTVQVGDPFSEKLLLEACMELMKMDVIVAIQDMGAAGLTSSAVEMAGKGNLGIELDLDKVPCREERMSAYEIMLSESQERMLMILEPDKEDIAKKILK

SEQ ID NO: 198375 - protein, 179 aa, Unknown
  Bacterial polypetide isolated from the Sargasso Sea
FTFGDYLRCGSIAANSPIMNDIIKKASDGLPTLGICNGFQILTESGLLPGTLIRNDCLSFLCKTVSIRVENNETKFSNKYKQKEIINIPIAHNEGNFFANEDTLKKIKDSNQIIFKYCDQNGEVNEKSNPNGSIENIAGITNEKGNVLGMMPHPERATCKITKLTDGENLFKSIYEFLS

SEQ ID NO: 198376 - protein, 227 aa, Unknown
  Bacterial polypetide isolated from the Sargasso Sea
MKSSVITFPGSNCDRDMDVALKKFGFKNKMVWHDDAELPKSDLVVLPGGFSYGDYLRCGSMASKSKIMQSVINFANSGGMVMGICNGFQILVETGLVPGVLLRNKYLEFICKNVFVKINDKKNNYFKNVNNEILEFHIAHNEGNYFCTNDQLKEIEDNNQIAINYCDKNGTIEDQFNPNGSIKNIAGIFNKAKNVLGMMPHPERMIDKSLSGEDGSLFFKNLINNLK

SEQ ID NO: 198377 - protein, 528 aa, Unknown
  Bacterial polypetide isolated from the Sargasso Sea
MLDLKLGRDGIHGASMASASFDEKIEEKKPTVQVGDPFTEKLLLEACLELMAGDSIIAIQDMGAAGLTSSSIEMASKGNLGIEINLNKVPCREAKMTPYEIMLSESQERMLIVLENGKEEQAKKIFDKWNLDFAVIGKTTKSKKIELYFDEEKVADIPVNTLVENSPMYDRKWKKAKLPKKNKIKKENIKHLKIIDTLKKILSNPNVCSKEWIWQQYDHTVMGDTIQKPGGDAGVVRVHGTDKAVAASVDSSAVYCWAHPLTGGKQVVCESFRNLISVGARPIAITNCLNFGSPENEENMGEFVECVQGIGEASEYLKFPVVSGNVSFYNQTKEKGVKPTPAIGGVGLIKDYKNMITMEFKELDNLVLVIGKTDGHIDQSLFARSILDEKNGPPPEVNLFNEKNNGETLLKLIDSKLIKSAHDVSLGGIITAVAKMCINGKKGLYIKKPKYLINQIEYLFAEDQGRYVVEIDKKDFKKVADILNKNAVHFDELGTINENELYINDKSKVTIDELSTSNNSWLTNYMNK

SEQ ID NO: 198378 - protein, 528 aa, Unknown
  Bacterial polypetide isolated from the Sargasso Sea
VGSKTGRDGIHGASMASAEFDEKSEEKKPTVQVGDPFTEKLLMEACLELMKDNSIISIQDMGAAGLTSSSVEMSFKGNLGMEINLDLVPCRESNMSPYEMMLSESQERMLLIINDNKTTHAKKIFEKWDLDFVVIGKTIKEKKLILNYKDNEVANLPIDALSSQAPVYDRKWKKITLPNKEPRLEKLKKIKFEDSFLKILSSPNFSNKQWVTNQYDQMVMGDTIQRSGSDSAIIRIHKKNKAIAITVDSSSNYSKAHPLTGGKQIVCENWRNLISAGSKPLAITNCLNFGNPENEEIMGEFAETIQGMKEACEYLDFPVVSGNVSFYNGTNKKNIFPTPVIGGIGLIENVKFSTNNNFKKIGNRIILIGKTFGHLYQSAFFSECCKIYDGPPPEVNLKNEKNNGETILKLIEKDLLSSVHDVSSGGLIMSLAEMSINSSIGVHIIKPKKLKNIFEYFFGEDQGRYIVEIDDNKFDLVEKILKESNVFYEIIGKTQKDFFEIYGETKFKVNELYNINTKWYKEYNATTN

SEQ ID NO: 198379 - protein, 398 aa, Unknown
  Bacterial polypetide isolated from the Sargasso Sea
MEVNEQTAIDHGLSKDEFRKINDLLKRKPNLTELAIFSAMWNEHCSYKSSRKHLKNLHTEGSQVIQGPGENAGVVDIGDDEAIVFKIESHNHPSFIEPYQGAATGVGGIMRDVFTMGARPIANLNSIHFGSTQNKKTRNLLRGVVKGIGGYGNCIGVPTIAGQTHFDESYNGNILVNAMTLGLVNKNKIFYSKAAGLNKPVIYVGSKTGRDGIHGASMASAVFDDKIEEKKPTVQVGDPFTEKLLLEACLELMKEDSIISIQDMGAAGLTSSSVEMASKGKLGIELDLSKVPCRETEMTPYEIMLSESQERMLIILENGKEDKAKEIFDKWNLDFAVIGKTTNTKNLELIFKNNKVAQIPIDFLAENAPMYDRKWKKSKLPQKIDYPKEIFKSLKIES

SEQ ID NO: 198380 - protein, 796 aa, Unknown
  Bacterial polypetide isolated from the Sargasso Sea
MPSKDRIGWPSAARNYYSIIVFTKEIVDFTGLTNEEILGRLRKLNIPLTAQEALKIQNEMLGRAPSLAELILFSIQGSEHCSYKSSRIHLKQFTTEGPDVVLGAKEDAGVVSIATDNKGNRWCIVMSHESHNHPSQIVPYEGAATGVGGNVRDVMCMGAEVIACTDSFRFGDIKKNKTKWIHNGVVAGIAGYGNPLGIPNIGGDIYYHEGYNENCLVTLVTLGIVQENNILHSYAPENADGYDLILIGKPTDNSGFGGASFASLELEEDKKEQNKGAVQEPNAFLERHLLKSSYALFKTLKEKDLINRVGFKDLGAGGVACASVELAETSGYGAEVWMDKIHVGMDNLHPSVYLCSETQERFMWVSPPEITPLIVEHYNTVFDLPGVSEGAQASVIGKIRNNGQYIVHNGDEEIINAPAAEVTEGFLYDRPYEAPEKAFTEPDIPEPDNYNEVLLEILSHENISSREPVFEAYDKQVQGRVHTETGQADAGIMAPFNSEDYPEEIRNVGIALSTDHNPRYALIDPYWGGVNAVVEAMRNVSATGATPHAVSDCLCFGNPEKPYQMWEFVESVKGIADACHAITLKDNPNDPTPIIAGNVSFYNESKNGAIPPSPIVSCLGRIKDIRHSITMHFQKTDSIVLMIGERKNELGGSVYYSLYNELGAHIPKPNLDEVKNQIFAITDCVDKGLILSCHDISDGGMATAVSEMTINGGIGCKVNMDTALSPAKALFSETGGFIVETSQENVTEVQSVFSDHGLDALEIGVTGGELVNINESVNVLVSEVKEAWTNGLRDKL

SEQ ID NO: 198381 - protein, 375 aa, Unknown
  Bacterial polypetide isolated from the Sargasso Sea
MVEVNEKIAIEHGLKSDEYKKICDLLKRTPNITELGVFSAMWNEHCSYKSSRRHLKKLHTKGDQVIQGPGENAGVVDIEDDDAIVFKIESHNHPSFIEPYQGAATGVGGIMRDVFTMGARPIANLNSIHFGSPDHEKTRNLLRGVVKGIGGYGNCIGVPTIAGQTCFDESYNGNILVNAMTLGLVNKNKIFYSKAAGVDKPVIYVGSKTGRDGIHGASMASAIFDDKIEEKKPTVQVGDPFTEKLLLEACLELMAGKSIISIQDMGAAGLTSSSIEMASKGDLGIEIDLTKVPCREKNMTPYEIMLSESQERMLIVLEAGKENEAKKIFDKWNLDFAVIGKTTNTKNIELFFKNKKVAEIPIEFLAENAPMYDRK

SEQ ID NO: 198382 - protein, 489 aa, Unknown
  Bacterial polypetide isolated from the Sargasso Sea
MKINKEQIEKHGLKLEEYNKIKELLGREANLLELGIFSAMWNEHCSYKSSKIHLKKLPTKNNIVIQGPGENAGVIDIGDDDAIIFKIESHNHPSFIEPYQGAATGVGGILRDVFTMGARPIALMNSIHFGSPTNKNTQNLLNGVVSGIGGYGNSVGIPTVGGETKFNSTYNENILVNAMAVGHANKNKIFYSKAKGINKPVVYVGSKTGRDGIHGATMASAEFDENSEEKKPTVQVGDPFTEKLLLEACLELMKENSIISIQDMGAAGLTSSSIEMASKGKLGIELDLNKVPCRENNMSPYEMMLSESQERMLIILDEKKEKKAKKIFDKWDLDFVVIGKTTDTNRLVLNFDNKIVADIPIRALADEAPQYDRKWNKPKIKKNNSKKYDLKEIKIEDALIKILSSPDHSNKSWITDQYDQVVMCDTIQKSGGDAAVVRIHNKNKAISISVDSSANYCSSDPKSGGKQIVCENWRNLISVGSKPLAITNC

SEQ ID NO: 198383 - protein, 225 aa, Unknown
  Bacterial polypetide isolated from the Sargasso Sea
MKSSVIVFPGSNCDRDIAVALEKLQFKNSMIWHKENVLPKSDLIVVPGGFSYGDYLRSGAIAAKSNILNEVIKAGERGSLILGICNGFQILIECGLLKGALLRNSGLKFISKNIFIKIQSNKNKFFNKYKKNEILELNIAHNEGNFFTDKKHLNELEDNDLIPIKYCDKEGNINPKTNPNGSLNNIAGIFNKNKNILGMMPHPERMADKTCSNEDGLPLFLSLMN

SEQ ID NO: 198384 - protein, 225 aa, Unknown
  Bacterial polypetide isolated from the Sargasso Sea
MNSSVIVFPGSNCDRDVATALTNLQFKNKMVWHKDSELPKSDLIVIPGGFSYGDYLRSGAIAAKSNILKEVIKAANLGCLVLGICNGFQILIETGLLQGALLRNKNLKFVSKDVNLKIIDNKNKFCNNYKKNSVISLNIAHNEGNYFTHKDHVKELEDNNLIPFKYCDIEGSINESSNPNGSLKNIAGILNKNKNILGMMPHPERMVDNLISNSNGIELFTSILS

SEQ ID NO: 198385 - protein, 150 aa, Unknown
  Bacterial polypetide isolated from the Sargasso Sea
MKITKEIIDLHGLKSEEYSKIKLLMNREPNYLELGIFSAMWNEHCSYKSSKIHLKKLPVKNKNVIQGPGENAGVIDIGDSDAIVFKIESHNHPSFIEPYQGAATGVGGILRDVFTMGARPIALLNSIHFGDPSNRKTKNLLNGVVSGIGG

SEQ ID NO: 198386 - protein, 171 aa, Unknown
  Bacterial polypetide isolated from the Sargasso Sea
MASFTVGIVVFPGSNCDRDVSWALEGCLDIKTKFLWHESSDLNDVDSIVLPGGFSYGDYLRCGAIARFSPLINSLHDFIKSGRRVLGICNGFQILTESGFLPGALVANKNLNFICDDVDLNVITSKGGWFQKLNENQNIKLPIAHGEGCYHCDQDTLKRLVDNDLIALKYK

SEQ ID NO: 198387 - protein, 227 aa, Unknown
  Bacterial polypetide isolated from the Sargasso Sea
MNSSVITFPGSNCDRDMHVALKKFGFKNKMVWHNDAELPKSDLVVLPGGFSYGDYLRCGSMASKSKIMESVINFANSGGLLMGICNGFQILTETELLPGVLLRNKHAEFICKNVFVKINDNDNNYFKNIKKKTLKLHIAHNEGNYFCSKEQMKEIEDYSQIALLYCDKNGEVNQSSNPNGAIKNIAGIVNKKKNILGMMPHPERMIDIALSGEDGSIFFENLVNNLK

SEQ ID NO: 198388 - protein, 403 aa, Unknown
  Bacterial polypetide isolated from the Sargasso Sea
SSYNGNILVNAMTLGLVKKNKIFYSKAAGLNKPVIYVGSKTGRDGIHGASMASASFDEKIEEKKPTVQVGDPFTEKLLLEACLELMAGDSIIAIQDMGAAGLTSSSIEMASKGNLGIEINLNKVPCREAKMTPYEIMLSESQERMLIVLENGKEELAKKIFDKWNLDFAIIGKTTDTKNIELFFDDKQVANIPVNTLVENSPMYNRKWKKSKLPKKVKIKKDSLNGLKIKEILKKVLSNPNICSKEWIWQQYDHTVMGDTIQKPGGDSGVVRVHGTNKAIAASVDSSAVYCWAHPLTGGKQVVAESWRNLISVGATPIAITNCLNFGSPENEENMGEFVECVQGIGEACKYLNYPVVSGNVSFYNQTKEIGIKPTPSIGGVGLIKDFTKMGYYEFKEINNIVM

SEQ ID NO: 198389 - protein, 227 aa, Unknown
  Bacterial polypetide isolated from the Sargasso Sea
MNSSVIIFPGSNCDRDMDVALKKFGFKNKMVWHDDDKLPKSDLIVLPGGFSYGDYLRCGSIAGKSKIIQSVIDYAKSGGLVLGICNGFQILTETGLLKGVLQQNKNIEFICKNVFVKINNSENKFFENIDRDILELHIAHNEGNYFCSEDELKSLEDNNQIAAYYCSSDGKVDDRSNPNGAIKNIAGIFNEKKNILGMMPHPERMIDQSLSGEDGSIFFENLLKNLK

SEQ ID NO: 198390 - protein, 227 aa, Unknown
  Bacterial polypetide isolated from the Sargasso Sea
MKSSVIIFPGSNCDRDMDVALKKFGFKNQMVWHNDGKIPKSDLVVLPGGFSYGDYLRCGSIASKSKIIQSVIEFANSGGLVLGICNGFQILTEAGLLTGILQQNKYLNFICKNVFVKIKDKKNKYFYNIKKDILELHIAHNEGNYFCSDDELKSLEDNNQIAVTYCDNKGLENNNNNPNGAIKNIAGIFNKNKNVLGMMPHPERMIDKYLTGEDGSLFFENLLGNLK

SEQ ID NO: 198391 - protein, 227 aa, Unknown
  Bacterial polypetide isolated from the Sargasso Sea
MKSSVIIFPGSNCDRDMDVALKKHGYKNKMVWHDDIDLPKCDLVVLPGGFSYGDYLRCGSIAGKSKIIKSVIEFANSGGLVLGICNGFQILTETGLLPGVLQQNKYLNFICKNVHVKVNNKENSYFKNIKKEILELHIAHNEGNYFCTKDELEVIKNNNQIALTYCNTEGSDEEEFNPNGALNNIAGLFNKNKNVLGMMPHPERMIDKYLSGNDGSIFFENLIKNYI

SEQ ID NO: 198392 - protein, 384 aa, Unknown
  Bacterial polypetide isolated from the Sargasso Sea
FVAIKALDISLNESDKDLLVPRLFAEEVGVVIEVKSEDLKDVKEYLAKKDLYFDEIAKKNEKKEINITNFNDEIFSDKIENLFEQWSEVSNSIKAIRDNPVTTSEQIATYKKEDIFLNPKINFEVPKVSSRIFSSRPKVALLREQGINGHYDMAAALMASGFEVRDVHMSELGTKVKNFDDCSGLVVPGGFSYGDVLGAGSGMSNTIMHNAKLKKIFKNFFENEDKFVLGVCNGCQFLSGLKDIIPGASNWPKFEKNLSNQYECRLVQIKIAESRSIFFKDMQNSVIPIMVSHGEGRVGVNVNENVIGNYVDSSHNIAELYPLNPNGSKNGIAGVCNEDGRITIMMPHPERTFMTKQFSWAPNDWDEHSPWFKMFDNAYKFSKN

SEQ ID NO: 198393 - protein, 449 aa, Unknown
  Bacterial polypetide isolated from the Sargasso Sea
DLIEKFNKWGLYASVIGEVIGTNEVIISHKGKIVAQIPTSALSDDTPVNFHNVINNPPDDLLNKWEWKENDLPEIHEQKIFSLKENKNFSFSEIILKLLSNPSIASKRWIYKQYDSQVQANTVFKPGKSDAAVVRLREQNKKNKSKLFSGVAASVDCNSRWVALDPFRGSIAAVAESARNVSCVGAEPVAITNNLNFSSPENEIGYWQLSSSCNGIAEACKALETPVTGGNVSLYNESKNKDNLITPINPTPVIGMVGKIDNVEKAISSEWKNIEDEIWLIGSSKSEIKIAASSYLEYFHGEITGRPPKIDLLDEKFCQSFLRNAILNSLVVSSHDISDGGLAIALAESCILSSIGATIELEKDVNRVDNLLFAEGGSRIIFSISKMKQNEWFNYLKQNQTNFPSSVFVKKIGYVSSDTLKIKINEKNICNIRVEELTEKFNNSISGYF

SEQ ID NO: 198394 - protein, 362 aa, Unknown
  Bacterial polypetide isolated from the Sargasso Sea
SSKIHLKKLPTKNKIVIQGPGENAGVIDIGDDDAIVFKIESHNHPSFIEPYQGAATGVGGILRDVFTMGARPIALMNSIHFGSPENKKTQNLLSGVVSGIGGYGNSVGIPTVGGETKFNSTYNENILVNAMAIGHAKKNKIFYSKAKGINKPVVYVGSKTGRDGIHGATMASAEFDENSEEKKPTVQVGDPFTEKLLLEACLELMKKNSIISIQDMGAAGLTSSSIEMASKGKLGIELNLDKVPCREKNMTPYEMMLSESQERMLIILDDKKENEAKKIFDKWDLDFVVIGKTTDTNRLVLNFQNKKVADIPISALADEAPQYNRKWNKSKIKKNNFNIKDLKKIKTDEALIKILSTPDHSN

SEQ ID NO: 198395 - protein, 443 aa, Unknown
  Bacterial polypetide isolated from the Sargasso Sea
MVKEETLKELALSRSEYNLILDKLDREPNDLELGLFGALWSEHCGYKHTKKLLRSIKSTSEFTLTEAGAENAGAVNIGSNKAIVMKIESHNHPSAVEPYEGAATGVGGIVRDIFAMGARPIALLNSLRFSNLESDRNVQIAKGVIEGISGYGNCLGIPNIGGECFFDESYESNPLVNAMCVGLVDADKILSAKADRPGDLLIIIGAETGRDGIHGASGLASQNFEETIELRSAVQVGNPFLEKLLIEACLEISNFNELVGMQDCGAAGITSAAIEMAERSELGLKIDVSKVPVKEDSMTPYEIMLSESQERMLIAVKKNQHQRIFDILEKWDLKCSIIGEFIEGNEVQIFDGEKIISQTSIEALTSPPEYDLSLLSKGYKNKKNKIKIKEEYKNFDKKIINKYLFEILGSNNLISKESIYRKYDHHVQTNTVVEPGSDAAVIR

SEQ ID NO: 198396 - protein, 231 aa, Unknown
  Bacterial polypetide isolated from the Sargasso Sea
MKIGIAVFPGTWSETDTHYATQDVLGITSEYIWHKDQNLNNVDFIILPGGFSYGDYLRTGAIASFSPIMEKIKEFANSGGPVLGICNGFQILCESNLLPGILIRNKTLSFVCKNSNLKVNNNSKFTNLYKKDQIIKIPISHGEGNYQADKNTINKLEEENRVIFRYSSRSGDTSEQYNPNGSINNIAGIINDAGNILGMMPHPEKACEKIIGSDDGLGIFSSIISSMVKNG

SEQ ID NO: 198397 - protein, 687 aa, Unknown
  Bacterial polypetide isolated from the Sargasso Sea
HCSYKSSRIHLKKLNTKGKKVIQGPGENAGVIDIDDDDAIVFKIESHNHPSFIEPYQGAATGVGGIMRDVFTMGARPIANLNSIHFGSPDHPKTKNLLRGVVKGIGGYGNCMGIPTIGGQTSFDESYNGNILVNAMTLGLVNKNKIFYSKAAGVNKPVIYVGSKTGRDGIHGASMASAIFDDKIEEKKPTVQVGDPFTEKLLLEACLELMSGKSIISIQDMGAAGLTSSSIEMASKGNLGIELNLDKVPCREEGMTPYEIMLSESQERMLIVLEKGKEAEAKKIFDKWNLDFAIIGKTTNSKKIELFFDKKNVGTIPIDILAENAPEYDRKWKKTKLPNKSQINKDNYKNLKVTENLKKILSNPNVSSKQWIWEQYDHTVMGDTIEKPGSDSGIVRVHGTNKAVATSVDSSAVYCFAHPLTGGKQIVCESFRNLISCGSTPIAITNCLNFGNPEKEKNMGEFVECVQGINEASKYLNYPVVSGNVSFYNETKDKGIKPTPAIGGVGLIKDYKKIVTMDLKNEENLIFVVGKTNGHIDQSIFAREILNEKKGPPPEVNLFNEKNNGENVLKLISEGLIESAHDVSLGGIITSLSKMAIKGKKGFKLNKIKSLINKFEYYFGEDQARYIVEVKSTNINKFQKILGNNSVHYDEIGIVTKKDIIIDKEPILHIDELIESNKSWLIDYMEN

SEQ ID NO: 198398 - protein, 281 aa, Unknown
  Bacterial polypetide isolated from the Sargasso Sea
MIVNEKVAVDHGLKKEEYKKIFELLKRTPNITELGIFSAMWNEHCSYKSSRLHLKKLPTKGKQVIQGPGENAGVVDIGDNDAIVFKIESHNHPSFIEPYQGAATGVGGIMRDVFTMGARPIANLNSIHFGSPQNKKTKNLLRGVVHGIGGYGNCMGVPTIAGQTSFDSSYNGNILVNAMTLGLVKKNKIFYSKAAGLNKPVIYVGSKTGRDGIHGASMASASFDEKIEEKKPTVQVGDPFTEKLLLEACLELMAGDSIIAIQDMGAAGLTSSSIEMASKGN

SEQ ID NO: 198399 - protein, 227 aa, Unknown
  Bacterial polypetide isolated from the Sargasso Sea
MKSSVITFPGSNCDRDMDVALKKFGFKNKMIWHDDVELPKSDLVVLPGGFSYGDYLRCGSMASKSKIMKSVINFANSGGMIMGICNGFQILVEAGLVPGVLLRNKYLEFICKNVFVKINNKQNNYFKNINNNILEFHIAHNEGNYFCTNDQLKEIEDNEQIAINYCDKNGVIEDKFNPNGSIKNIAGIFNKEKNVLGMMPHPERMIDSSLSGEDGSLFFNSLINNIK

SEQ ID NO: 198400 - protein, 227 aa, Unknown
  Bacterial polypetide isolated from the Sargasso Sea
MKSAVIIFPGSNCDRDMDVALKRFGFKNQMVWHNDQEIPKSDLIVLPGGFSYGDYLRCGSIAGKSKIIKSVVEFANSGGLVLGICNGFQILTETGLLPGVLLQNKYQKFICKNIHVKINDKENKYFKNIKKQILELHIAHNEGNYFCSEDELKSLINNNQIAVTYCNENGKESDEYNPNGALNNIAGIFSKNKNILGMMPHPERMIDKYLSSNDGSFFFENLIENLK

SEQ ID NO: 198401 - protein, 227 aa, Unknown
  Bacterial polypetide isolated from the Sargasso Sea
MKSSVITFPGSNCDRDMDVALKKFGFKNKMVWHADAELPKSDLVVLPGGFSYGDYLRCGSMASKSKIMLSVINFANSGGMVMGICNGFQILVETGLVPGVLLRNKYLEFICKNVFVKINDKKNKYFKNVDNNVLEFHIAHNEGNYFCTNDQLKEIEDNDQIAINYCDENGKIEDQFNPNGSIKNIAGIFNKEKNVLGMMPHPERMIDTSLSGEDGSLFFKNLINNLK

SEQ ID NO: 198402 - protein, 120 aa, Unknown
  Bacterial polypetide isolated from the Sargasso Sea
MIVNEQVAVDHGLKKDEYSKICELLKRTPNITELGIFSAMWNEHCSYKSSKLHLKKLPTKGKKVIQGPGENAGVIDIEDNDAIVFKIESHNHPSYIEPYQGADTGVGGIMRDVFTRAQDQ

SEQ ID NO: 198403 - protein, 215 aa, Unknown
  Bacterial polypetide isolated from the Sargasso Sea
MIVNEQVAIDHGLKKDEYAKICELLKRTPNITELGIFSAMWNEHCSYKSSRLHLKKLPTKGKKVIQGPGENAGVIDIEDNDAIVFKIESHNHPSFIEPYQGAATGVGGIMRDVFTMGARPIANLNSIHFGSTQHKKTKNLLRGVVHGIGGYGNCMGVPTIAGQTSFDSSYNGNILVNAMTLGLVKKDKIFYSKAAGLNKPVIYVGSKTGRDGIHG

SEQ ID NO: 198404 - protein, 227 aa, Unknown
  Bacterial polypetide isolated from the Sargasso Sea
MKSSVITFPGSNCDRDMDVALKKFGFKNKMVWHDDSELPKSDLIVLPGGFSYGDYLRCGSMASKSKIMKSVINFANSGGMVMGICNGFQILVETGLVPGVLLRNKYLEFICKNVFVKINNKTNNYFSNIKNDVLEFHIAHNEGNYFCTKDQLKEIEDNEQVAINYCDENGRIEEQFNPNGSIKNIAGIFNKEKNVLGMMPHPERMIDNCLSGEDGSIFFNNLINNLK

SEQ ID NO: 198405 - protein, 227 aa, Unknown
  Bacterial polypetide isolated from the Sargasso Sea
MKSSVITFPGSNCDRDMDVALKKFGFKNKMVWHAEAELPKSDLVVLPGGFSYGDYLRCGSMASKSKIMQSVINFANSGGMVMGICNGFQILVETGLVPGVLLRNKYLEFICKNVFVKINDKKNKYFKNVNNEVLELHIAHNEGNYFCTNDQLKEIEDNNQIAINYCDENGKIEDQFNPNGSIKNIAGILNKEKNVLGMMPHPERMIDTSLSGEDGSLFFKNLINNLK

SEQ ID NO: 198406 - protein, 108 aa, Unknown
  Bacterial polypetide isolated from the Sargasso Sea
MIVNEQLAVDHGLKKDEYAKICELLKRTPNITELGIFSAMWNEHCSYKSSKLHLKKLPTKGKKVIQGPGENAGVVDIEDNDAIVFKIESHNHPSFIEPYQGAATGVGG

SEQ ID NO: 198407 - protein, 629 aa, Unknown
  Bacterial polypetide isolated from the Sargasso Sea
IKKHGLKIEEYENIKKLLKRSPNMLELGIFSAMWNEHCSYKSSRIHLKKLPTKGKQVIQGPGENAGVIDIGDDDAIVFKIESHNHPSFIEPYQGAATGVGGILRDVFTMGARPIALLNSIHFGSPSHPKTKNLLNGVVSGIGGYGNCIGIPTVAGETKFNETYNENILVNAMAVGHAKKDKIFYSKAQGINKAVVYVGSKTGRDGIHGASMASAEFDEKSEDKKPTVQVGDPFTEKLLLEGCLELMKDDSIIAIQDMGAAGLTSSSVEMASKGSLGIELDLSKVPCREENMTPYEMMLSESQERMLIILEDGKEEHAKKIFAKWDLDFVIIGRTNKTKNLTLKFEKQIVGEIPLDALATKAPMYDRKWTKKKISKKKLNLKKLKKIKIEDALIKILSSPNHTNKSWITDQYDQMVMCDTAQRSGSDAAIVRIHNKDKAIAVSVDSSANYCKSHPITGGKQIVCENWRNIVSVGAKPLAITNCLNFGNPENQEIMGEFAECLQGIKEACEFLNYPVVSGNVSFYNGTNNKNIFPTPVIGGVGLIQNYPHLLSHRFKSIGSEIILIGKTFGHLEQSCFLKENYSIVDGSPPEVNLLNEKNNGEIVLSLISENLISSAHDISNGGLIVALSE

SEQ ID NO: 198408 - protein, 678 aa, Unknown
  Bacterial polypetide isolated from the Sargasso Sea
VDDNGNRYGLVVSHESHNHPSQIVPYEGAATGVGGNVRDVCCMGAEVMSLGDSLRFGDIHRNKTKWISDGVVSGIAGYGNPLGIPNICGDLYFDKEYNENCLVTVLTAGIVKEKNVIRSKAPKNSVDYDLILVGKPTDNSGFGGASFASLELEEEKEQQNKGAVQEPNAFLERHILKSTYALFDFLQENNLINRVGFKDLGAGGVACASIELADAAGLGAEVWVDKIHTSMPELDGHVILCSETQERFMWACPKDLTQTILDHYNNVFDFPNVSVGAMASVVGKIINEKHYTVFYKDKKLVDGPIEKINEGFVYNRPMSEKKTQIENDPLPEKIDYNDLMLKILSHENVASRAPVYESYDKNVQGRVVNERGKTNAGVIAPFDSKKFPKEIRGDCFSAALAHNPSIGKIDPYIVAQHAVIEACAKTVSVGASPLALTDCLCFGNPEKPEQMWQFSQSCVAIREACSLLHFNGTDNLPIVAGNVSFYNQSGDQSIPASPMIGCFGKVSKEQVLMNGFRSSDANIYLVGETPEFIGGSIVVDVLNIKNTKVKKIDVQKYSNMLSCVLKANSEGLVSSGSYVGLGGLATCLFKMGFVNNVGCSIDKDIDKNLLFSENFAFVVEVSEESSAPFEEILNKSKCTYKQIGKTNKSSKIVVKNFIDLDVAQTKRTWENALREKLQ

SEQ ID NO: 198409 - protein, 561 aa, Unknown
  Bacterial polypetide isolated from the Sargasso Sea
NIVLINHQNFWLKKLPTSGERVVQGPGENAGVIDIDDGDVAVFKMESHNHPSFLEPYQGAATGVGGILRDVFTMGARPVANLNALRFGEPNHPKTKHLLSGVVSGIGGYGNCIGVPTVGGEVNFHPSYNGNILVNAMTVGIAKKDKIFYSAAAGIGNPVVYVGSKTGRDGIHGATMASAEFDEDSEDKKPTVQVGDPFTEKLLLEACLELMKEEAIIAIQDMGAAGLTSSSIEMASKGDVGLEIDLSKVPMRAQNMSAYELMLSESQERMLMVLDPSKEEMARDIFKKWDLEFEVIGKVTDTKRLILMMNGKEEASIPINILVEDAPEYQRDYIVEEPSPIKEYKSEDFDQNNILKDLNTMIMHPDLSSRKWIWEQYDHMVMADTVVRPGSDAAVVRVHGTNKGLAMSTDCSPVYCKHNPYEGGKHAVVETWRNIIASGALPIAITDCMNFGNPEKPEIMGQFVECIRGMGDACSKLNYPVVSGNVSLYNETNGEGIYPTPAIGGVGLIKDLSNVKTLSFKEDGNFLCVVGKTANHLGISKYISIIQSKEEGGNTEINLET

SEQ ID NO: 198410 - protein, 619 aa, Unknown
  Bacterial polypetide isolated from the Sargasso Sea
ILRDVFTMGARPVANLNALRFGEPNHPKTKHLLSGVVSGIGGYGNCIGVPTVGGEVNFHPSYNGNILVNAMTVGIAKKDKIFYSAAAGIGNPVVYVGSKTGRDGIHGATMASAEFDEASEDKKPTVQVGDPFTEKLLLEACLELMKEEAIIAIQDMGAAGLTSSSIEMASKGDVGLEIDLSKVPMRAQNMSAYELMLSESQERMLMVLDPSKEEMARDIFKKWDLEFEVIGKVTDTKRLILMMNGKEEASIPINILVEDAPEYQRDYIVEEPSPIKEYKSEDFDQDNILKDLNTMIMHPDLSSRKWIWEQYDHMVMADTLVRPGSDAAVVRVHGTNKGLAMSTDCSPVYCKHNPYEGGKHAVVETWRNIIASGALPIAITDCMNFGNPEKPEIMGQFVECIRGMGDACSKLNYPVVSGNVSLYNETNGEGIYPTPAIGGVGLIKDLSNVKTLSLKEDGNFLCVVGKTANHLGSSKYISIIQSKEEGGTPEINLDTELRNGNFVMDAINKKLIASAHDVGEGGILVAISEMCMSGNLGILIENESDFPHGYFFAEDQSRYLIEVSPNNYDECQKLANNNDVHFEKIGIVGGDKISIKNIGDQHISALKRSFETGIKQISQ

SEQ ID NO: 198411 - protein, 574 aa, Unknown
  Bacterial polypetide isolated from the Sargasso Sea
GNCIEFPTVGGEVNFHPSYTGNILVNAMTVGIAKKDKIFYSAAAGIGNPVVYVGSKTGRDGIHGATMASAEFDDDSEEKKPTVQVGDPFTEKLLLEACLELMKEDAIIAIQDMGAAGLTSSSIEMASKGNVGIDINLSKVPMRAANMTAYELMLSESQERMLMVIQPKKEELARSIFKKWDLEFEVIGEVTDTKKLILHMDGEEQASIPINILVEDAPEYQRDYIVNDPSPLISFESKDFEDKDILSDLLKMISHPNLCSRKWIWEQYDHMVMADTVVRPGSDAAVVRVHGTNKGIAISTDCSPTYCRHNSYEGGKHAVVETWRNIVASGAEPIAITDCMNFGNPEKPEIMGQFVECIRGMGDACSKLNYPVISGNVSLYNETNGEGIYPTPAIGGVGLIRDLSNTMTIDLKNEGNVLCLIGESNNHLGNSHYLSIIQSREDGGTPSINLDDELKNGKFILDCIAKKLLKSVHDVGEGGVLVAIAEMCISGKQGIKIDITKDFLHGFFFGEDQARYLVEVSQNKLEQLEVDASKSAVKIERIGEIGGTSISINSIGEIELSSLIDHHTKWFNEF

SEQ ID NO: 198412 - protein, 777 aa, Unknown
  Bacterial polypetide isolated from the Sargasso Sea
MAFTKEIVDFSDLDTQGIKEKLAELNIPLSPDEVLKIQNEMLGRAPSLPELVLFSIQGSEHCSYKSSRTHLKQFTTDGPDVVLGAKEDAGVIAIATDEDGRRWCIVMSHESHNHPSQIVPYEGAATGVGGNVRDVMCMGARVVACTDSFRFGEIRNNKTKWINDGVVSGIAGYGNPLGIPNIGGDIYYHSGYNENCLVTLVTLGIVREDHIIHSYAPENADGYDLILVGKPTDNSGFGGASFASLELEEEKKDQNKGAVQEPNAFLERHLLKSSYALFDKIKKMNLIDQVGFKDLGAGGVACASVELAETSGYGSEVWLDKVHTSMEGLHPSVYLCSETQERFMWVCPPDITQLIIDHYNTTYDLPGVSDGAMASVIGKIRSDGQYIVHYNDEIIVDAKANQVTKGFLYNRRFSPINTNLDAPKLNSNRDYNTELINLLAHENIASRKSVYDKYDKQVQGRIITEAGRADSGILAPFNSENYPKEIRNIGIALSTDHNPLYGTIDPYWAGVNAVVESMRNVAAVGATPHALTDCLCFGNPEKENQMWEFVESVKGIKDACSAITLKHNPEHATPIIAGNVSFYNESKNGSIPPSPIVSCLGKINDVNDCIGMDFSLIGSNIIMVGKRKSELGGSAFYHLHNELGSTLPKPDLQEAKNQIHALTDCIDKNLVLSCHDIADGGVAVALAEMTFKNKIGCNVSIESNLKTDEILFSETGGFILEVGDENINEIVRCFSDYGIEVFMIGKTVKSNIIINDEINISIEQSYDAWKNGLINKL

SEQ ID NO: 198413 - protein, 661 aa, Unknown
  Bacterial polypetide isolated from the Sargasso Sea
EIVSVWASTPRDHYSLIVLTKETVDFTGLSNSEIQTKLKELNIPLTSEEALKIQNEMLGRAPSLAELVLFSIQGSEHCSYKSSRTHLKQFTTEGPDVVLGAKEDAGVVSIASDKNGDRWCIVMSHESHNHPSQIVPYEGAATGVGGNVRDVMCMGAEVIACTDSFRFGAIENNKTKYIHDGVVAGIAGYGNPLGIPNIGGDLYYHEGYNENCLVTLVTLGVVKEDDIIHSYAPKNANNYDLILIGKPTDNSGFGGASFASLELEEEKKEQNKGAVQEPNAFLERHLLKSTYALFEMLRLKGLTSQVGFKDLGAGGVACASVELAETSGYGSEVWMDKIHKGMDNLHSSVYLCSETQERFMWVCPPSLTPLIVDHYNNVFDLPGVSAGAQASVIGKIRSDGQYIVHDGSEEIVNASATEVTKGFLYDRVFEDPMNNFSEPSLVPPTNYNEILLKIMSHENMANREPVYEKYDKQVQGRVYIEAGLADSGIMAPFNSEKYPKEIRGVGIALSTDHNPRYGMIDPYWGGVNSVVEAMRNVAAVGATPHAITDCLCFGNPEKPHQMWEFVESTRGIAEACNSINLKDHPQEATPIIAGNVSFYNESKKGAIPPSPIVSCLGRLKNVEKAVPMHFQRSGSTVCMVGQRKDELGGSIYYSLNNELGA

SEQ ID NO: 198414 - protein, 275 aa, Unknown
  Bacterial polypetide isolated from the Sargasso Sea
NVKNNNTSIDILKKSLEDAVHRQLMSDVPYGVLLSGGLDSSITSALAKKFSKNRIETGDEEEAWYPQLHSFSVGLTGSPDLKAARLVADKIGSIHHEINFTIQEGLDAIRDVIYHIETYDVTTVRASTPMYLMARVIKSMGIKMVLSGEGADEIFGGYLYFHKAPNSEEFHKETVRKIDKLYQYDCLRANKSLAAWGIEGRVPFLDKDFIDVAMQLNPNDKMITKDRMEKWVLRQAFESYLPKEVAWRQKEQFSDGVGYSWIDSLKDLVEKEVSD

SEQ ID NO: 198415 - protein, 288 aa, Unknown
  Bacterial polypetide isolated from the Sargasso Sea
SIGLEGSPDLAAAQQVSDFIGTEHYGFTFTVDEGINAISDVIYHLETYDVTTIRAGTPMFLLARKIKAMGVKMVMSGEGADEALAGYLYFHKAPNGTELHEECVRKIGDLSKYDCLRANKATMAHGLEARVPFLDKDMLDVMMEIDGTEKMVNKGAAKGFIEKWIMRAAFDVEDGETPYLPKEVLWRQKEQFSDGVGYSWIDGLKAHAEARIGDIEMQTMATRFPFNTPATKEAAYFRTIFHSHFPNNNYGNGIEKTIPGGPSVACSTAKAIEWDASFSNPLNQDQSG

SEQ ID NO: 198416 - protein, 330 aa, Unknown
  Bacterial polypetide isolated from the Sargasso Sea
KNIFYVSSELKSLEGVCDKIELFPPGHFLESHDMKLKEWYKPEWTSFDSVKNAKTSISSIHDSLSDAVKRQLMSDVPYGVLLSGGLDSSITSALAKKFASKRIESGDKQDAWWPQLHSFSVGLKGAPDLKAAKIVADHIGTVHHEINFTVQEGIDAIRDVIYHLETYDVTTVRASTPMYLMARAIKSLGIKMVLSGEGADELFGGYLYFHKAPNSKEFHEETVRKLEKLHQYDCLRANKSLAAWGIEGRVPFLDKEFIDTAMKINPDDKMIKNGRIEKWVLREAFKDYLPESVLWRQKEQFSDGVGYSWIDSLKELVSKEVSDGDIEKAS

SEQ ID NO: 198417 - protein, 554 aa, Unknown
  Bacterial polypetide isolated from the Sargasso Sea
MCSIFSILDIQSDAKELRQVALEMSKLMRHRGPDWSGIYASDKAILAHERLAIVDIEHGAQPLLTEDGSLILAVNGEIYNHKELKAQLGDKYSYQTNSDCEVILALYQEYGTEFLDKLNGIFAFVLYDKAKDAYLIGRDHMGIIPLYTGRDAAGNFYVASEMKALMPVCKTVAEFQPGQYLYSSIGEPVQYYTRDWQSFDAVKDNAASQEELRDALEAAVKRQLMSDVPYGVLLSGGLDSSVISAITQTFAKRRIEDDDQSGAWWPQLHSFAVGLKGAPDLAAAKKVADAIGTIHHEINFTFQEGLDAIKEVIYHLETYDVTTIRAATPMYLMARKIKAMGIKMVLSGEGADELFGGYLYFHKAPNAQAFHEELVRKLDKLHLFDCLRANKAMAAWGLEARVPFLDKEFMDVAMRINPEAKMSKDGRIEKHILRQAFEHKLPKEVAWRQKEQFSDGVGYSWIDGLKAHAAEQVDDLQLANAKFRFPYNTPETKEAYFYRCFFEEHYPLPSAAETVPGGKSVACSTPEALAWDESLRGIIDPSGRAVRSVHAASY

SEQ ID NO: 198418 - protein, 409 aa, Unknown
  Bacterial polypetide isolated from the Sargasso Sea
PLYMGWDDNGTFYVASELKALEGFCKKIELFPPGCYLYSKDAEVKKWYHRSWKYYNTVKEKKTEIRAIRDSLSNAVRRQLMSDVPYGVLLSGGLDSSITSAVAKIYADKRIESDGENQAWWPTLHSFAVGLEGSPDLIAAKKVAKHIGTVHHEVKFTIQEGLDAIKDVIYHLETYDVTTIRASTPMFLMARVIKSMGIKMVLSGEGSDEIFGGYLYFHKAPNAESFHEETVRKLDKLHQYDCLRANKALASWGIEGRVPFLDKEFMDVAMSINPSDKMINSERMEKWVLRKAFEDLLPKEVAWRQKEQFSDGVGYSWIDTLKERVEEIISDDVFDNASSVFDINTPLNKEEYFYRTIFEEHFPSKTAASSVPSVPSVACSSPEALKWDSSFSNMNDPSGRAIKTHERSY

SEQ ID NO: 198419 - protein, 555 aa, Unknown
  Bacterial polypetide isolated from the Sargasso Sea
MCGIVCAFDLKDNPDSIRPNILKMVKKVRHRGPDWSGVYSSKNAVMAHERLAIVDPTSGKQPILSDDNTKAIAVNGEIYNHLELRDNFAKDYKFKTDSDCEIILALYKKNKYDFLNQLNGIFAFALYDSDNDTYFIARDHMGIIPLYIGWDEKGTLYVASELKSLEGVCSKIELFPPGHYLESNKEDYVKWYNPEWVKFNNVSNATTSISELHDSLSSAVKRQLMSDVPYGVLLSGGLDSSITSALAKRFSSKRIESGDTQDAWWPQLHSFSVGLEGSPDLKAAKVVSDHIGTIHHEIIFTIQEGIDALRDVIYHLETYDITTVRASTPMYLMARAIKSLGIKMVLSGEGADELFGGYLYFHKAPSAEELHNETVRKLNKLHQYDCLRANKALAAWGIEGRVPFLDKEFIEVAMNINPKDKMINKDRIEKWVIRKAFEEYLPDELLWRQKEQFSDGVGYSWIDSLKDLVSKEITDEQMESASKKYPINPPQNKEEYYYRRIFEEHFPSDAAAKSVPSVPSVACSSPEALKWDESFQNQNDPSGRAISNVHKKSYE

SEQ ID NO: 198420 - protein, 554 aa, Unknown
  Bacterial polypetide isolated from the Sargasso Sea
MCSIFSILDIQSDAKELRQVALEMSKLMRHRGPDWSGIYASDKAILAHERLAIVDIEHGAQPLLTEDGSLILAVNGEIYNHKELKAQLGDKYSYQTNSDCEVILALYQEYGTEFLDKLNGIFAFVLYDKAKDAYLIGRDHMGIIPLYTGRDAAGNFYVASEMKALMPVCKTVEEFQPGQYLYSSDAAAVKYYTRDWQQYDAVKDNGASQEELREALEAAVKRQLMSDVPYGVLLSGGLDSSVISAITQTFAKRRIEDDGETGAWWPQLHSFAVGLKGAPDLIAAKKVADAIGTIHHEINFTFQEGLDAIKEVIYHLETYDVTTIRAATPMYLMARKIKAMGIKMVLSGEGADELFGGYLYFHKAPNAQAFHEELVRKLDKLHLFDCLRANKAMAAWGLEARVPFLDKEFMDVAMRINPEAKMSKDGRIEKHILRQAFEHKLPKEVAWRQKEQFSDGVGYSWIDGLKAHAAEQVDDLQLANAKFRFPYNTPETKEAYFYRCFFEEHYPLPSAAETVPGGKSVACSTPEALAWDESLRGIIDPSGRAVRSVHAASY

SEQ ID NO: 198421 - protein, 554 aa, Unknown
  Bacterial polypetide isolated from the Sargasso Sea
MCGIVCALNVKKTSPKLRSEVLEMSKKLRHRGPDWNGIYSDENVILAHERLAIVDPKSGKQPLFSHDGRYILAANGEIYNHNELREGLEKNYNFLTKSDCEVIIALYNEKREKFIDDLNGIFGFVIYDKVEKEFLVARDHIGIIPLYMGWDSAGTLFISSELKALEGRCEKIEIFPPGHFMTSKDCKLKKWYVRDWMNYDSVQDNETNIETLKKSLEDSVYRQLMSDVPYGVLLSGGLDSSITSALAKKFSKKRIESKNTEDAWYPQLHSFSVGLKGSPDLIAAKLVADKIGSIHHEINFTIQEGLDAIKDVIYHIETYDVTTVRASTPMYLMARVIKSMGIKMVLSGEGADEIFGGYLYFHKAPNPEEFHKETVRKIDKLYQYDCLRANKSLAAWGIEGRVPFLDKEFIDVAMRINPKDKMITNDRMEKWVLRKAFESYLPNEVAWRQKEQFSDGVGYSWIDSLKELVNSEVSDDEFKNADKRFPFQTPMNKEEYYYRSIFEEHFPSKTASETVPSVPSVACSSPIAIEWDNSFKNLNDPSGRSIQNVHNDSY

SEQ ID NO: 198422 - protein, 555 aa, Unknown
  Bacterial polypetide isolated from the Sargasso Sea
MCGIVCAFDLKDTSDSIRPNILKMVKKVRHRGPDWSGIYSSKNAVMAHERLAIVDPTSGKQPILSDDNTKAIAVNGEIYNHLELRDNFAKDYKFRTDSDCEIILALYKKNKYDFLNQLNGIFAFALYDSDNDTYFIARDHMGIIPLYIGWDEKGTLYVASELKSLEGVCSKIELFPPGHYLESNKEDYVKWYNPEWDKFNNVSDAKTSISELHDSLSSAVKRQLMSDVPYGVLLSGGLDSSITSALAKRFSSKRIESGDTQDAWWPQLHSFSVGLEGSPDLKAAKVVSDHIGTIHHEIIFTIQEGIDALRDVIYHLETYDITTVRASTPMYLMARAIKSLGIKMVLSGEGADELFGGYLYFHKAPSAEEFHNETVRKLNKLHQYDCLRANKALAAWGIEGRVPFLDKEFIEVAMNMNPKDKMINKDRIEKWVIRKAFEEYLPDEVLWRQKEQFSDGVGYSWIDSLKDLVAKEITDEQMESASKKYPINPPQNKEEYYYRRIFEEHFPSDAAAKSVPSVPSVACSSPEALKWDKSFQNQNDPSGRAISNVHKKSYE

SEQ ID NO: 198423 - protein, 412 aa, Unknown
  Bacterial polypetide isolated from the Sargasso Sea
IPLYMGWDDRNIFYVSSELKSLEGVCDKIELFPPGYYLESHDMKLKEWYKPEWTSFDSVKNAKTSIASIHDSLSAAVKRQLMSDVPYGVLLSGGLDSSITSALAKKYASKRIESGDKQDAWWPQLHSFSVGLKGAPDLKAAKIVADHIGTVHHEINFTVQEGIDAIRDVIYHLETYDVTTVRASTPMYLMARAIKSLGIKMVLSGEGADELFGGYLYFHKAPNSKEFHEETVRKLEKLHQYDCLRANKSLAAWGIEGRVPFLDKEFIETAMNINPKDKMIKNGRIEKWVLREAFKDYLPESVLWRQKEQFSDGVGYSWIDSLKELVSKEVSDEDIEKASEIFPVNTPLNKEEYYYRTIFQEHFSSEAAARSVPSVPSVACSTPQALEWDESFKNVNDPSGRSVSNIHNESYE

SEQ ID NO: 198424 - protein, 360 aa, Unknown
  Bacterial polypetide isolated from the Sargasso Sea
MCSIFGILDIKSDAAALRKSALEMSKRLRHRGPDWSGVYSSDKAILVHERLAIVDPGNGAQPLYNPERTHVLAVNGEIYNHKELEKNLKVDFQFQTHSDCEVLLALYKEKGPAFLDDLNGIFAFILYDAEQDAYLIGRDHMGIIPLYTGRDEHGNFYVASEMKALVPVCKSVETFPPGHYLWSKDGELKQWYKRDWMEYGAVEHNVSDKAELKAALEAAVKRQLMCDVPYGVLLSGGLDSSVISAITKLYAARRVEDDGKSEAWWPQLHSFAVGLEGSPDLAAARKVADHLGTIHHQIHFTVQEGLDALRDVIYHLETYDVTTIRASTPMYLMARYIKAMGIKMVLSGEGSDELFGGYLY

SEQ ID NO: 198425 - protein, 178 aa, Unknown
  Bacterial polypetide isolated from the Sargasso Sea
MRHLVNLNAEVNVFSENASIKDINNFKPDGIFLSNGPGDPSATEIKCRKLLSALFQLKIPVFGICIGHQLIGLSFGAKTNKMPQGHRGANHPVKNIFKNKVEITSQNHGYQIDLDSLPNCLEVTHTSLFDNSIEGIRHKSLPIFSVQYHPEASPGPTESSYLFNEFLNLIRESKNAKT

SEQ ID NO: 198426 - protein, 105 aa, Unknown
  Bacterial polypetide isolated from the Sargasso Sea
MGAKTEKMKLGHRGANHPVKNLIEGKVEITSQNHGFEVVKKGLPKNVRITHQSLFDNSIEGIELKNKPVFSVQYHPESNPGPQDSIYLFDKFVKSMKKNAKKKRY

SEQ ID NO: 198427 - protein, 155 aa, Unknown
  Bacterial polypetide isolated from the Sargasso Sea
SISAEEIQKKNPDGIFLSNGPGDPQILAEPIKEVKKMMQLDIPIFGICLGHQIMSLAYGLEIEKMPFGHHGANHPVHDLKNNIVFITSQNHNFAVAEPNNRDDINITHRSLFDNSIQGIEHKEKPFYSIQCHPEASPGPKEFETLFKRFFKEMNA

SEQ ID NO: 198428 - protein, 119 aa, Unknown
  Bacterial polypetide isolated from the Sargasso Sea
LKEVPLFGICLGHQLLALSFGGKTSKMKFGHHGANHPVQDLKSMKVSITSQNHGFTVVEDSLPKELKVTHKSLFDGTVQGIEHSTLPAFSFQGHPEASPGPHDLKELFQKFEDNMRDNA

SEQ ID NO: 198429 - protein, 296 aa, Unknown
  Bacterial polypetide isolated from the Sargasso Sea
KIHASGLISNELFEQSSNWRAQTSFAKWIIDQNSCAFFDLDTRSLTKIIRNFGPKNIMLCSEDYFKTKNIEEICTQIDQSLSLEENDVIKDFTSELTIKEQEKNKKKYLIAFLNFGAKDNIKKNLYSRDCNIEEFDMNFKANEIINKKFDGIFLSNGPGDPKKVYENIKPELTKLLNKKVPTFGICLGHQILSLAFNASTARMEKGHRGGNHPVKNLDTNKVEITSQNHGFVVLENNFPTSLQITHKSLFDKTIDGMKSKDQPLFSVQYHPESSPGPHDSRYLFDEFINLMDKNAS

SEQ ID NO: 198430 - protein, 314 aa, Unknown
  Bacterial polypetide isolated from the Sargasso Sea
ISDPSYAGQIINFTFPHIANVGTNNEDIESDKIWTRGVIFNSEVTNPSNYRSLKHLDEWLKKNKIVGITGLDTRSLTNFIRDKGAPKGTISNNKSGKFNIKKLIKKTISWPGLNGMDLAEEVSTKKNYTWVGLKTWNKEKGYKKNNKKKYRVIAIDYGIKKNILRYFSNFDCEVKVVPCNENPDNLLKLKPHGIFLSNGPGDPAATGKYAIPIVQKLIKSNLPVFGICLGHQILALALNAKTKKMKLGHRGANHPVKNLISKKVEITSQNHGFEVIKESLPKNIEITHKSLFDNSIEGIKLKNKPVFSVQYHPE

SEQ ID NO: 198431 - protein, 186 aa, Unknown
  Bacterial polypetide isolated from the Sargasso Sea
MGIKKNILRYFSNYDCEVKVVSCNLSSEKILELKPHGVFLSNGPGDPAATGKYAIPVIRDLIKKNIPIFGICLGHQLLGLALNAKTRKMKLGHRGANHPVKNYLTGKVEITSQNHGFEVVESSLPKNVKITHKSLFDNSIEGLRLVNKSVFSVQYHPEANPGPQDSKYLFNQFIKEVKKYAKKKRH

SEQ ID NO: 198432 - protein, 277 aa, Unknown
  Bacterial polypetide isolated from the Sargasso Sea
NESKDSFSSGLVIRESSPISSNWRNKLSLEDFLVRNKIVGISNIDTRKLTNHLRNNGSMNACLAANGLSHKEALSEAKSFPGLAGLDLAKEVSTKTAYEFSSNMGNSDSIFHVVAIDFGVKTNILNLLSKNGCKVTVIPAQSSFDEVMSYDPDGVFLSNGPGDPEPCDYAINCIRKLLELNIPLFGICLGHQLLALASGAKTEKMKFGHHGANHPVIDTETGVVYITSQNHGFTVNEKSIPENVNITHKSLFDQSIQGIELSDKNAFSFQGHPEASP

SEQ ID NO: 198433 - protein, 239 aa, Unknown
  Bacterial polypetide isolated from the Sargasso Sea
MQKLKKAILFLEDGLFFIGKSLGSSGETFGEVCFNTGMTGYQEILTDPSYSNQMIVMSSPHIGNYGTNNSDTESEKVYATGFIIKSESIQPSNWRSEESLSSFLIKHNIVGIQDIDTRALTIHIRKKGAMRGIISTKDFDPDNLARKIKNVPKMAGQDLAIKVARNKKMVLSNTDNPIYKIAAIDFGMKSNIYDIMLEHEAEVEIFPANVSHDEILASNPDGIFLSNGPGDPAAVTYAI

SEQ ID NO: 198434 - protein, 189 aa, Unknown
  Bacterial polypetide isolated from the Sargasso Sea
HHVVALDFGVKRNILRCLASSDCKVTVVPASTSAEDVLALNPDGVFLSNGPGDPAATGTYAVPEIKKLVDSGKPLFGICLGHQMLAIALGAKTEKMLQGHHGANHPVKDHTTDKVEITSMNHGFTVDRDSLPDNVEETHVSLFDGTNCGIRLKDKPVFSVQYHPEASPGPQDSHYLFDRFVKLIAEAKR

SEQ ID NO: 198435 - protein, 236 aa, Unknown
  Bacterial polypetide isolated from the Sargasso Sea
TIKWSGLKNLDLAEKVTTTKNYIWKGLKTWKKQIGYEKNNKNSFHVVAIDYGIKKNILRYFSDFKCKVTVVSCKTSAEKIIALKPNGIFLSNGPGDPAATGKYAIKIIKDLIKKNLPLFGICLGHQILALTLGGKTKKMKLGHRGANHPVKNLVNDNVEITSQNHGFEVVIDNLPKNIEVTHKSLFDNSIEGIKLKNKPVFSVQYHPESNPGPQDSVYLFQEFINNMKKNAKKKRS

SEQ ID NO: 198436 - protein, 154 aa, Unknown
  Bacterial polypetide isolated from the Sargasso Sea
LNPDGIFLSNGPGDPAATGKYAIPVIKTFIKNNVPVFGICLGHQLLGLALGAKTKKMSLGHRGANHPVKNLIKGNVEITSQNHGFEIVKNNLPKNIQITHQSLFDNSIEGIKLKSKPVFSVQYHPESNPGPQDSVYLFEEFIKNMKKNAKKKRY

SEQ ID NO: 198437 - protein, 271 aa, Unknown
  Bacterial polypetide isolated from the Sargasso Sea
MSILLNKEKTIVSFPCILALEDGSTFIGQGIGAKKVAIGEIVFNTSMSGYQEIITDPSYCKQIITFTHPHIGNTGINSEDNESDNIYAEGVVIRNYISKPSNYRSEEDLDDFLTRNNSIGIFGIDTRQITIILREKGSLKACISPIDKNNEESAISLAKSFDGLEGMDLAKEVTTKNLYSWNEGVWPDYKESKSMLHIVAYDYGIKKNILRLLSEHVGKVTVVNARCSFDEVLKMNPDGIFLSNGPGDPEPCDYAIENIKRALNENILYLG

SEQ ID NO: 198438 - protein, 162 aa, Unknown
  Bacterial polypetide isolated from the Sargasso Sea
MNANKILSLKPDGIFLSNGPGDPAATGKYSIDVIKELIKKDLPIFGICLGHQILGLALGAKTKKMKLGHRGANHPVKNLDNGSVEITSQNHGFEILKNSIPRNTEVTHVSLFDNSIEGIRLKNKPVFSVQYHPESNPGPQDSVYLFKEFVNKMKKYAKKNRY

SEQ ID NO: 198439 - protein, 301 aa, Unknown
  Bacterial polypetide isolated from the Sargasso Sea
NVKGIIVRNFSSNSSNWRSKKNFNQWLVEKNIIGLYGIDTRALVKILRSTGAMNGVITSLDKTNESCLKIIQDTPKMEGLNLSKFVSTKQQYLWKSHTQTTFDLRKRYDETLKNLKIVAIDFGIKNSILNRLVSHGCEVLVLPSRSTINDVLSNKPDGIFFSNGPGDPSSVSEGINLAKSLIEYGEIPMFGICLGHQIFGLALGGSTYKLPFGHRGLNHPCGENHKIEITSQNHGFAIDPNSLSKDIVRITHYNLNDNTVAGLEVYNKPIFSVQYHPEAGPGPHDSDYLFKKFVSLMLERC

SEQ ID NO: 198440 - protein, 240 aa, Unknown
  Bacterial polypetide isolated from the Sargasso Sea
KFEDYLEDAKMFKGINEQDLAKVVTCKEKILWDEKEINIYNKKIKRKKINAHVVVVDYGVKKNILRCLSSRFEKISLVPCTSTYSDIVNLKPDGVFLSNGPGDPSATGEYAIPVIKKLIDSNIPIFGICLGHQLLALSLGLKTYKMHQGHHGANHPVKNNYDSSVSITSMNHGFAVRSDNLPEDIIETHTSLFDGSNCGIEIVNKPIFSVQHHPEASPGPNDSYYLFDKFLENIEKHTNA

SEQ ID NO: 198441 - protein, 96 aa, Unknown
  Bacterial polypetide isolated from the Sargasso Sea
MFQGHRGSNHPVKNLINNKVEITSQNHGFEVDRETFSKDIIETHISLFDGTNEGLRHKSLPVFSVQYHPEASPGPHDSHYLFSQFYDHINKYAKKN

SEQ ID NO: 198442 - protein, 286 aa, Unknown
  Bacterial polypetide isolated from the Sargasso Sea
DLWLKKNKIVGLTGLDTRSLTNFIRDKGAPKGTISNNKTGNFNLKKLINISIKWPGLNGLDLAKNVTTQKKYIWSGFKTWNKKKGFEKNKNKNFKIVAIDYGIKKNILRYFSNFRCDVLVVPCQTSAKQILKLKPDGIFLSNGPGDPAATGKYAIKIIQNLIKSNIPIFGICLGHQLLALALNAKTKKMKIGHRGANHPVKNLINDRVEITSQNHGFEVVKESLPKNVEMTHKSLFDNSVEGIKLKNKPVFSVQYHPESNPGPQDSHYLFNQFINLVKKNAKKKRY

SEQ ID NO: 198443 - protein, 265 aa, Unknown
  Bacterial polypetide isolated from the Sargasso Sea
MTGYQEIITDPSYHKQIVTLTYPHIGNTGTNEEDNESKDSFSSGLVIRESSPISSNWRNKLSLEDFLVKNKIVGISNIDTRKLTNHLRNNGSMNACLAANGLSHKEALSEAKSFPGLAGLDLAKEVSTKTAYEFPPNMGNSDSIFHVVAIDFGVKTNILNLLSKNGCKVTVIPAQSSFDEVMSYDPDGVFLSNGPGDPEPCDYAIKCIRKLLELNIPLFGICLGHQLLALASGAKTEKMKFGHHGANHPVIDTETGVVYITSQNH

SEQ ID NO: 198444 - protein, 321 aa, Unknown
  Bacterial polypetide isolated from the Sargasso Sea
SYAGQIINFTFPHIGNVGTNKEDHESDKIWTRGVILNSEITSPSNYRSLINLDIWLKKHNIVGLTGLDTRSLTNFIRDKGAPKGTISFSKYGKFNINKLINLSNKWTGLNNLDLAEQVTTKKNYVWHGFKTWKKEEGYRKSKKTFFNVVAIDYGIKKNILRYFSDFNCKVNIVSCKTSVKKILKLKPNGIFLSNGPGDPAATGKYAVPIIKDLIKKNLPIFGICLGHQILGLALGAKTKKMKLGHRGANHPVKNLIENKVEITSQNHGFEIVKENLPKNIQITHTSLFDNSIEGIKLKNKPVFSVQYHPESNPGAQDSVYL

SEQ ID NO: 198445 - protein, 306 aa, Unknown
  Bacterial polypetide isolated from the Sargasso Sea
HIGNYGTNNSDTESKKVYATGFIIKSESIQPSNWRSEESLSSFLIKHNIVGIQDIDTRALTIHIRKKGAMRGIISTEDFDAHNLASKIKNIPKMEGQDLAIKVARKKKVVLSNTDNPIYKIAAIDFGMKSNIYDIMLEHDAEVEIFPANVSHDEILASNPDGVFLSNGPGDPAAVTYGIETVKNLLSKKPIFGICLGHQILALALGANTFKMKFGHRGINQPVKNLITNKVEITSQNHGFAVDEDSLPSNVTVTHKHLNDDTVAGISCNDISAYSVQYHPEASPGPHDSRYVFKEFFNMMKNDAKT

SEQ ID NO: 198446 - protein, 234 aa, Unknown
  Bacterial polypetide isolated from the Sargasso Sea
MNSNQNTAIIVLADGTVFHGKPCGVVGTTTGEIAFNTGMTGYQEIFSDPSYYGQIITMANAHIGNYGTNAEEIESDQCKIRGLVVKKFAHHFSRYSETESLQDYLVKGNVVGIKDVDTRALISYIRENGAQNAIISSEETDVEKLKVILNKVPSMKGMELASKVSTDKPYEIGDGEHKVALIDYGVKKNIVRCLVNRNCKIKVFPYDVSCDEIMNWNPDGIMLSNGPGDPEPLK

SEQ ID NO: 198447 - protein, 92 aa, Unknown
  Bacterial polypetide isolated from the Sargasso Sea
MATGHHGANHPVKTLADDTVMITSQNHGFAVDIDTLPANLKVTHVSLFDGTLQGIERTDVPAFSFQGHPEASPGPRDCAPLFDHFIELMEAK

SEQ ID NO: 198448 - protein, 286 aa, Unknown
  Bacterial polypetide isolated from the Sargasso Sea
DGWLKKNKIVGITGIDTRNLTSYIRDKGAPKGTICNDKRGNFNIKKLINKSVKWPGLNGLDLAQDVSTKKIYKWKGYKTWIKGKGFQKSFKKLYRIVAIDYGIKKNILRYFSNYNCEIKVVPCKYSAEQIINLKPDGIFLSNGPGDPAATGKYAIQTIQKLIKKNLPIFGICLGHQILALALNGKTKKMKLGHRGANHPVKNLINNKVEITSQNHGFEVIKQSLPKNVKVTHISLFDKTVEGLRLKNKPVFSVQYHPESNPGPQDSHYLFGEFIEDVKKYAKKKRY

SEQ ID NO: 198449 - protein, 189 aa, Unknown
  Bacterial polypetide isolated from the Sargasso Sea
MINSYKKNAKLVLSNGIVFPGFFFGASGTAIGEIVFNTGMTGYQEVITDPSYYGQILTFTYPEIGNTGINFEDSESDINVKGIIVRNFSSNNSNWRSKKNFNQWLIEKKIIGLYGIDTRALVKILRSSGAMNGVITSLDKTDESCLKIIHDMPKMEGLNLSKVVSTRQQFSWKSHTSTIFDLRKRYTEA

SEQ ID NO: 198450 - protein, 203 aa, Unknown
  Bacterial polypetide isolated from the Sargasso Sea
RVSTNKPYYFGDENSKYKIAVLDLGVKMNILKNLSKRNAYMKVFPHNSKYEDMKKWNPDAYFISNGPGDPEPLSNAINVTKKILNSKKPLFGICLGHQVIALANGIKTYKMHNGHRGINHPVINLKTGKGEITSQNHGFAIDKEDTEKNKNIEITHMHLNDDTIAGIRINDKQCFSVQFHPEASAGPHDSSYLFDEFIDMIKK

SEQ ID NO: 198451 - protein, 276 aa, Unknown
  Bacterial polypetide isolated from the Sargasso Sea
QEIISDPSYAGQIINFTFPHIGNVGTNKEDVESDKIWARGVIFNSEITSPSNYRAFLHLDAWLKKNKIVGITGLDTRSLTNFIRDKGAPKGTISYSKNKKFNINKLINSTIKWGGLKNLDLAETVTTSKNYIWKGLKTWKKETGYERNKKNSFHIVAIDYGIKKNILRYFSDFKCKVTIVSCKTSAEKILDLKPHGVFLSNGPGDPAATGKYAIKILNKLIKENLPIFGICLGHQILALALGAKTKKMKLGHRGANHPVKNLVHDKVEITSQNHGL

SEQ ID NO: 198452 - protein, 232 aa, Unknown
  Bacterial polypetide isolated from the Sargasso Sea
RDKGAMNGIISSNDLDIQNLEKKLKEFPDMNGLDLAKDVTTQKKYKWPGKGQYKVAVIDFGIKKNILRLLSDAGCELTVFPASIKAEDILSFEPDGVFLSNGPGDPLAVTYGIETVKKLLGKVPLFGICLGHQILALALGASTFKLKFGHRGINHPVRNNEKNTVEITSQNHGFAVDLDSLPPNVISTHINLNDNTSGGIRCTDIPAFSVQYHPESSPGPHDSRYLFNQFIE

SEQ ID NO: 198453 - protein, 127 aa, Unknown
  Bacterial polypetide isolated from the Sargasso Sea
MILEDGTKFTGKSIGIESHSVGEVVFNTAMTGYQEIITDPSYHKQIVTLTYPHIGNTGTNDEDNESKDSFCSGLVIRESSPISSNWRNQLSLEEFLSKNEIVGISNIDTRKLTNHLRNHGSMNACLV

SEQ ID NO: 198454 - protein, 183 aa, Unknown
  Bacterial polypetide isolated from the Sargasso Sea
MTNSYKKNAKLVLSNGIVFPGFFFGASGTAIGEIVFNTGMTGYQEVITDPSYYGQILTFTYPEIGNTGINFEDSESNINVKAIIVRNFSSNSSNWRSKKNFSQWLVEKNIIGLYGIDTRALVKILRSSGAMNGVITSLEKTHESCLKIICDTPKMEGLNLSKVVSTKQQYLWKSHTQTIFDLR

SEQ ID NO: 198455 - protein, 213 aa, Unknown
  Bacterial polypetide isolated from the Sargasso Sea
KLGEGYGTQAAPRFHVVAYDFGVKKNILRMLAERGCKLTVVPAKTPAADVLAMKPDGVFLSNGPGDPEPCDYAIEATRQIVEAGVPTFGICLGHQIMALASGAKTFKMDNSHHGANHPVKDLDNGRVSITSQNHGFAVDMASLPATLRPTHISLFDGTLQGLERTDKPAFCFQGHPEASPGPHDIAYLFDRFTALMEKNNAKAHRPSIDPHHR

SEQ ID NO: 198456 - protein, 222 aa, Unknown
  Bacterial polypetide isolated from the Sargasso Sea
SYYAKKLHFGKDLKLWRKEHGYRKNNQNSFHVVAIDYGIKKNILRYFSDFKCKVTVVSCKTSAEKILSIKPNGVFLSNGPGDPAATGKYAIQIIQNLIKKKMPLFGICLGHQILALALGGKTKKMKLGHRGANHPVKNLINDSVEITSQNHGFEVVRENLPKNIQITHKSLFDNSIEGIRLKNNPVFSVQYHPESNPGPQDSIYLFQEFINNMKKNAKKKRS

SEQ ID NO: 198457 - protein, 263 aa, Unknown
  Bacterial polypetide isolated from the Sargasso Sea
DTRSLTNFIRDKGAPKGTISYSKNSKFNFSKLTNSTTKWSGLKNLDLAETVTTSKNYIWKGLKTWKKETGYKKNTKNSFHVVAIDYGIKKNILRYFSDFKCKVTVVSCKTSAEKILDLKPHGIFLSNGPGDPAATGKYAIEILNKLIKKNLPIFGICLGHQILALALGGKTKKMKLGHRGANHPVKNLIHDKVEITSQNHGFVVVEETLPKKIEVTHKSLFDNTIEGIRLKNRPIFSVQYHPESNPGPQDSVYLFQEFINNMK

SEQ ID NO: 198458 - protein, 274 aa, Unknown
  Bacterial polypetide isolated from the Sargasso Sea
EISNPSNYRALKHLDDWLKKNKIVGLTGLDTRRLTNFIRDKGAPKGTISYSKYGKFNINKLKNQSNKWNGLNNLDLAKEVTTKKNYKWPGFKTWKKESRFLRNKTKSFKIVAIDYGIKKNILRYFSDFKCEVNIVSCKTSAEKILGMDPDGVFLSNGPGDPAATGKYAIGIIKTLIKKEMPIFGICLGHQILALALGAKTKKMKLGHRGANHPVKNLINSNVEITSQNHGFEIVKESLPKNVEITHKSLFDNCIEGIKLKNKPVFSVQYHPESN

SEQ ID NO: 198459 - protein, 158 aa, Unknown
  Bacterial polypetide isolated from the Sargasso Sea
KILKIKPDGVFLSNGPGDPAATGKYAIGIIKTLIKKGVPIFGICLGHQILALALGAKTKKMKLGHRGANHPVKNLINSNVEITSQNHGFEVVKEGLPKDIEITHKSLFDNCIEGIRLKNKPVFSVQYHPESNPGPQDSVYLFKEFINNIKKNAKKKRY

SEQ ID NO: 198460 - protein, 206 aa, Unknown
  Bacterial polypetide isolated from the Sargasso Sea
TKEDGFKKTKKKEFRVVAIDYGIKTNILRYFSNFNCDVVVVPCDASAEYIMTHKPSGIFLSNGPGDPAATGVYAIKIIKNLIKKGLPIFGICLGHQLLALALGGKTKKMKLGHRGANHPVKNLKNNKVEITSQNHGFEVTKNNLPSQIEITHQSLFDNSIEGIKLKSKPVFSVQYHPESNPGPQDSHYLFNNFIMEVKKYAKKKRH

SEQ ID NO: 198461 - protein, 275 aa, Unknown
  Bacterial polypetide isolated from the Sargasso Sea
RQIFRGIGIGYEGTATGEVCFNTSITGYQEIISDPSYSGQIINFTFPHIGNVGTNKEDHESDKVWTKGVIFNSEITNPSNYRSLKNLDQWLKKNKIVGLTGLDTRSLTNFIRDKGAPKGTISNDKKANFNLKKLINISMKWPGLNGLDLAKTVTTHKKYIWTGFKTWNKEKGFEKNKNKKFKIVAIDYGIKKNILRYFSNFKCDVLVVPCQTSSEEIMKLKPDGVFLSNGPGDPAATGKYAIKIIQNLIKSNIPIFGICLGHQLLALALKAKTKK

SEQ ID NO: 198462 - protein, 193 aa, Unknown
  Bacterial polypetide isolated from the Sargasso Sea
MNKISLILQDGTTYEGFSFGSQKDVIGEVVFNTSMTGYQEMLTDPSYRGQILIPTYPMIGNYGISEIDIESDEIQVSGFVVRQYCEMPSHNNSLMNIHEYLLRNNIPGIYGLDTRSIVKKIRNYGVMMGSISSENNTNKVIDKLNSIKAYEEHNFVSEVSSNKIHSTNKKNKYKVALLDLGVKKNIIRLLESR

SEQ ID NO: 198463 - protein, 288 aa, Unknown
  Bacterial polypetide isolated from the Sargasso Sea
HIGNVGINDDDEESNRVYVSGLIIRDLSITASNWRSENNLAEYLKKHKIVAISGIDTRQLTRHIRKNGAMKGYIIVGSDIKIENAVNKAKSFGGLVGMDLAKEVTTQTSYIWSQGVWHLKRKSTTKNKNKHRIVAYDYGIKRNILKILVDLGCEVTVVPAKYTAEEVLKEKPDGIFLSNGPGDPDACDYAISAIKKIITTGIPVFGICLGHQLLSLALGAKTVKMKFGHHGANHPVLSLADKRVLITSQNHGFAVDEESLPKDLQATHRSLFDGSLQGVHHKRFPIFD

SEQ ID NO: 198464 - protein, 281 aa, Unknown
  Bacterial polypetide isolated from the Sargasso Sea
MLLADGTRFEGSLFGSEEIAEGELVFTTGMCGYQESLTDPSFAGQVLTFTYPLLGNYGIHPGVSESSSVHPRGVVCRQHMTSPDHRNSIGSVHDLLVAHNIPGIEGIDTRALTRRVREHGTVLCVFGPAERVEEMEVILKEMTPPDSDDLVAKVTCDKPRILNQGALDGDGRPLPRLAAIDCGVKYNILRELCSRFEVVWCPATMTLEEIIRDWNPDALFASNGPGDPAHQGAATDARKTLAEAVRLGMPVMGICLGHQLMGLAAGLRTYKLRYGHRGSNQ

SEQ ID NO: 198465 - protein, 163 aa, Unknown
  Bacterial polypetide isolated from the Sargasso Sea
MLKERYLILNDGSVYQGYGFGYESEAIGEVVFNTSMTGYQEMLTDPSYRGQILVSTYPMIGNYGIDSNFSESNKVQVKSYVVRDLCDYPFHFSNNKDLNEFLTENKIPGIHSIDTRSLTRKIRKFGSKMAIMTDNPDLNVALEKINKFGSYEESNYVDQSFCK

SEQ ID NO: 198466 - protein, 118 aa, Unknown
  Bacterial polypetide isolated from the Sargasso Sea
FGICLGHQLLALALKAKTKKMKLGHRGANHPVKNLINSKVEITSQNHGFEVVKESLPNNVQMTHKSLFDNSVEGIKLKNKPVFSVQYHPESNPGPQDSHYLFNQFINDVKKNAKKKRY

SEQ ID NO: 198467 - protein, 243 aa, Unknown
  Bacterial polypetide isolated from the Sargasso Sea
INKLTNSTIKWSGLKNLDLAEVVSTQKNYIWKGFKTWKKELGYKKNNKNSFHVVAIDYGIKKNILRYFSDFNCKVTVVSCKTSAHKILALKPNGIFLSNGPGDPAATGKYAIEIIKDLIKKNLPIFGICLGHQILALALGGKTKKMKLGHRGANHPVKNLIHDNVEITSQNHGFEVVKETLPKNIEVTHKSLFDNSIEGIKLKNKPVFSVQYHPESNPGPQDSVYLFQQFINNMKKNAKKKRY

SEQ ID NO: 198468 - protein, 163 aa, Unknown
  Bacterial polypetide isolated from the Sargasso Sea
VPWDTLAEVVRQMNPDGVFLSNGPGDPAAVESAIEEVRSLLGVFPIFGICLGHQILALALNCKTYKLKCGHHGGNHPVMDYQTNKIEITSHNHGFSVDEDSLPEDVRVTHRNLNDQTVEGLESLQFPAYSVQYHPEAAPGPRDARYLFKRFVEMMGNTKCWSS

SEQ ID NO: 198469 - protein, 181 aa, Unknown
  Bacterial polypetide isolated from the Sargasso Sea
QNILRHLVNLSADIIVLPEDTNFEKIANFEPDGIFLSNGPGDPAATEKKCRKVLKSIFKLNIPVFGICIGHQLIGLSFGARTSKMPQGHRGANHPVKNLLNNKVEITSQNHGYQIDLDSLPECFEITHTSLFDNSIEGLKHKDLPIFSVQYHPEASPGPTESSYLFEEFLNYIKVSKNAKT

SEQ ID NO: 198470 - protein, 253 aa, Unknown
  Bacterial polypetide isolated from the Sargasso Sea
HIGNVGTNNEDLESDKIWTRGVIFNSEITSPSNYRSIKNLDEWLKKNKIVGITGLDTRSLTNFIRDKGAPKGTISNNKKGNFNIKKLINISTKWPGLNGLDLAKEVSTKKTYTWKGLKTWEKGKGFKKNKKKSLRIIAIDYGIKKNILRYFSNYNCEVKVVSCKQTADEILKLKPNGIFLSNGPGDPAATGVYAIETVQKLIRSNLPVFGICLGHQILALALNGKTKKMKLGHRGANHPVKNLNNKKVEITSQ

SEQ ID NO: 198471 - protein, 156 aa, Unknown
  Bacterial polypetide isolated from the Sargasso Sea
PAKTKAHEILSYDPDGVFLSNGPGDPAAVGYGIETIKKLLGVKPIFGICLGHQLLALSLGAKTFKLKFGHRGINHPVKNINLGTIEITSQNHGFAVELDSLPKNILSTHINLNDNTSAGIECVDHPAFSVQYHPESSPGPHDSRYLFKKFIGMMDA

SEQ ID NO: 198472 - protein, 233 aa, Unknown
  Bacterial polypetide isolated from the Sargasso Sea
STDAKKELEKFSGLGGLDLAKVVSTKDSYTWDEGVWPDFKKTSSDFHIVAIDFGIKENILRLLAEHVGKITVVNAQTPIEEILNLKPDGIFLSNGPGDPEPCDYAIENIKIVLDKKIPIFGICLGHQLLAIAGGCKTYKMKFGHHGANHPVQDLRSNEVAITSQNHGFAIEEKSIPEDITITHRSLFDKSIQGIQFDNKPAFSFQGHPEASPGPHELISLFNKFKDMIEENNA

SEQ ID NO: 198473 - protein, 259 aa, Unknown
  Bacterial polypetide isolated from the Sargasso Sea
RIRDLGAPHGTLCHAPEGAIDFDSLREMAAGWPGLANMDLAREVTCDKAYDWRQGSWQMDQSAHRKTTAEYKVVAVDFGCKHNILRCLEDAGCAVHVVPAKTTADEILALKPDGVFLSNGPGDPAATSAYAGPQIAKLIDQNIPIFGICIGHQLMALALGAKTHKMDRGHRGANHPVKDLETGNIEITSQNHGFTVDLDSLPDNLLVSHISLFDHSIEGLRHASKPAFCVQYHPESSPGPHDSRYLFERFTDLRKKRES

SEQ ID NO: 198474 - protein, 132 aa, Unknown
  Bacterial polypetide isolated from the Sargasso Sea
MIRVQKLIKLNFPIFGICLGHQILALALNAKTKKMKLGHRGANHPVKNLINNSVEITSQNHGFVVIEKSLSKNIQITHKSLFDDTIEGIKLKNKPVFSVQYHPEANPGPQDSQYLFNNFIQDVKKYAKKKRY

SEQ ID NO: 198475 - protein, 201 aa, Unknown
  Bacterial polypetide isolated from the Sargasso Sea
FIRDKGAPKGTITNNKKGKFNIKKLTNMSVKWPGLNGLDLAKEVSTKKTYIWKGFRTWKKDIGYKKNTKKKFKIIAVDYGIKKNILRYFADYNCEVKVVSCKLTADEIVKFKPDGVFLSNGPGDPAATGKYAIDTVQKLIKLNYPIFGICLGHQILALALNAKTKKMKLGHRGANHPVKSLINNSVEITSQNHGFVVIEKS

SEQ ID NO: 198476 - protein, 270 aa, Unknown
  Bacterial polypetide isolated from the Sargasso Sea
MSYKKRKKGIVLLADGTIFYGKSVGVEGTVIGEICFNTGVTGYQEIFTDPSYYGQIMVTTTSHIGNYGIKENESQSEKIYISGLICKNFSYVNSRVSSRSVDSWFNKQKLIAISDVDTRALVRYIRENGAMNAAITTDIDNLDELRKKLINSPEMEGLELASKVSTKKAYFLGNEKAKYRLAVLDLGVKKNILSNFINRDFYIKVFPYNTEFNELLKFKPNGFFLSNGPGDPKPLEKVIETTKEIIKSNFPLFGICLGHQVIALANGINT

SEQ ID NO: 198477 - protein, 294 aa, Unknown
  Bacterial polypetide isolated from the Sargasso Sea
FNTSLTGYQEIISDPSYAGQIINFTFPHIGNVGTNKEDHESDKIWTKGVIFNTEITNPSNYRSLKKLDSWLKKNKIVGITGLDTRSLTNFIRDKGAPKGTISNNNKGNFNLKKLTRNSIKWPGLNGLDLAKIVTTKKKYIWKGFKTWKKEKGFEKNKNKKYKIIAIDYGIKKNILRYFSNFNCEVIVVPCGLKAEDIIKLKPDGIFLSNGPGDPAATGKYAIDIIQKLIKTNIPIFGICLGHQLLALALKAKTKKMKLGHRGANHPVKNLINSRVEITSQNHGFEVVKESYQKM

SEQ ID NO: 198478 - protein, 214 aa, Unknown
  Bacterial polypetide isolated from the Sargasso Sea
VVYDGIFMSNGPGDPTMCAATVKSVQWAITRPAEEIKPLFGICLGNQMLALAAGAKTYKMKYGNRGANQPCIDLRTGNCYITPQNHGFAVDNKSLPAEWKTFFLNGNDFSNEGVIHTTKPFFSVQFHPEAAGGPMDTSFLFNMFVDLLNGKPRTQPLISPDVYLPAQSPVRRVLLLGSGGLSIGQAGEFDYSGSQAIKALKEEGLEVILINPDI

SEQ ID NO: 198479 - protein, 100 aa, Unknown
  Bacterial polypetide isolated from the Sargasso Sea
MRIQALSTPAILALADGSLFYGTAIGADGETSGEVVFNTAMTGYQEILTDPSYSRQIVTLTYPHIGNTGVNEEDVESDRIQAAGLIIRDLPLLASSWRNK

SEQ ID NO: 198480 - protein, 294 aa, Unknown
  Bacterial polypetide isolated from the Sargasso Sea
IVRNYSSNNSNWRSLMSFNQWLDEKNIIGLYGIDTRALVKILRSNGSMNGVLTSEDISVESCLEMLYESPKMEGLNLSKEVSTKQKYLWNNPSETDFDIRKKYSEKNNKFKIVAIDFGIKKSILNRLVSHGCEILVLPSRSSLEDVLSTKPDGIFFSNGPGDPSSVTEGIDLARSLIELGEIPMFGICLGHQIFGLALGGTTYKLPFGHRGLNHPCGKNHQIEITSQNHGFAIDPDSLSKDLVKITHFNLNDNTVAGLEVNNKPIFSVQYHPEAGPGPHDSDYLFKKFVSLMSE

SEQ ID NO: 198481 - protein, 274 aa, Unknown
  Bacterial polypetide isolated from the Sargasso Sea
TGIDTRSLTNFIREKGAPKGTISVNKNGNFNIKKLTNLSIKWSGLNGLDLAKEVTTKKTYKWEGLQTWQKGLGYKKSIKNNLIIVAIDFGIKKNILRYFSNYNCEVKVVSCDLSSENIIKYKPHGIFLSNGPGDPAATGKYAIPLIKELINKNIPIFGICLGHQLLGLALNAKTKKMKLGHRGANHPVKNLLNGKVEITSQNHGFEVVEKSLPKNVEVTHKSLFDNSVEGLKLKNKPIFSVQYHPEANPGPQDSKYLFDLFIKEVKNYAKKKRY

SEQ ID NO: 198482 - protein, 182 aa, Unknown
  Bacterial polypetide isolated from the Sargasso Sea
KNILRYFSDYNCEIKVVSCKKTADEIIKLNPDGIFLSNGPGDPAATGEYAIDNIKKLIKFKYPIFGICLGHQILALALNAKTKKMKLGHRGANHPVKNLITNSVEITSQNHGFVVIEKSLSKNIQITHKSLFDDSIEGIRLKNKPVFSVQYHPEANPGPQDSQYLFNNFIQDVKKYAKKKRH

SEQ ID NO: 198483 - protein, 140 aa, Unknown
  Bacterial polypetide isolated from the Sargasso Sea
PAATGKYAIKTIQNLIKWNYPIFGICLGHQILALALNAKTKKMKLGHRGANHPVKNLINNKVEITSQNHGFVVIEKSLSKKIQITHKSLFDNTIEGIRLKNRPVFSVQYHPEANPGPQDSQYLFKNFIQDIKKYAKKKRH

SEQ ID NO: 198484 - protein, 300 aa, Unknown
  Bacterial polypetide isolated from the Sargasso Sea
IVNFTFPHIGNVGANNEDIETANPDQEIHISGIITHSYIEKPSNYRSESTLSEWMRDRKIIGISGVDTRYITKLIRDEGMMSCLIEHRHDGIFDIPKLLKILENVKKMEGLDLATEASTSCIYNLNSKAWEWDRGYRKNNHTKIKIALIDYGIKTNIIRMLNTYDCETKIFPAKTEIDSIMKYDPDGVLLSNGPGDPEATSAYSLELIRDIIDKNIPIFGICLGHQILALALGGETKKMSFGHHGANHPVQDLSNKKVQITSMNHGFTVDMETLPSNVKETHRSLFDQSNCGFEVKDKPI

SEQ ID NO: 198485 - protein, 295 aa, Unknown
  Bacterial polypetide isolated from the Sargasso Sea
SYSVGEIVFNTAMTGYQEIITDPSYHKQIVTLTYPHIGNTGTNEEDNESKDSFCSGLVIRESSPISSNWRNKLSLEDFLVRNKIVGISNIDTRKLTNHLRNNGSMNACLAANGLSHKEALSEAKSFPGLAGLDLAKEVSTKTAYEYSPNMDNSDSLFHVVAIDYGVKTNILNLLSKNGCKVTVIPAQSSYDEVMSYDPDGVFLSNGPGDPEPCDYAIKCIRKLLELNIPLFGICLGHQLLALASGAKTEKMKFGHHGANHPVIDTETGVVYITSQNHGFTVNENSIPENVNITHK

SEQ ID NO: 198486 - protein, 226 aa, Unknown
  Bacterial polypetide isolated from the Sargasso Sea
DLAKEVSTKKTYSWKGFKTWRKETGYKKNNKKIFKIVAIDYGIKKNILRYFSDYNCDVKVVSCKITAEEIIKLNPDGIFLSNGPGDPAATGIYAIKTIQKLIKWNYPIFGICLGHQILALALNAKTKKMKLGHRGANHPVKNLINNKVEITSQNHGFVVIEKSLSKKIQITHKSLFDNTIEGIRLKNRPVFSVQYHPEANPGPQDSQYLFNNFIQDIKKYAKKKRY

SEQ ID NO: 198487 - protein, 254 aa, Unknown
  Bacterial polypetide isolated from the Sargasso Sea
ARGLILRANITHPSNWRATQHLDEWLKSHNLTGLAGVDTRRLTRLIRESGAPTGVVCNALDGKFDLDALTSAATDWPGLEGMDLAKEVTCHQTYDWDESTWALHDGYGKQTAPACHVVAMDFGAKRNILRCLAAAGCKVTVVPATTSAENVLRHKPDGIFLSNGPGDPAATGLYAVPVIKQLVKFDMPIFGICLGHQLLSLALGAKTKKMHLGHRGGNHPVKDLATGKVEITSQNHGFVVDETTLPEGVEVSHV

SEQ ID NO: 198488 - protein, 284 aa, Unknown
  Bacterial polypetide isolated from the Sargasso Sea
PELGNTGVNDEDLEADAPAVKAVLCRCLAPEPSNWRSSGRLEHWLEKHGVVGLMGIDTRAVVRQLREGGAINGAVSTDGTSPADLLKQVLAAPSMAGQNLAKQVSTSAAYRWSSPTAASFDQRIQAQPSRRYRVVAIDFGIKRAILERLSAHGCDVDVLPADTDAEAVLALQPDGVFLSNGPGDPSAVGSGIALAKQLLGDPALPMFGICLGHQILGLALGGTTFKLGYGHRGLNHPCGGSGLVEITSQNHGFALDANSLDPQQVAITHHNLNDRTVAGLELRD

SEQ ID NO: 198489 - protein, 265 aa, Unknown
  Bacterial polypetide isolated from the Sargasso Sea
MVGTNKEDHESDKIWTKGVIINTEITYPSNYRSLKHLDQWLKKNKIVGITGIDTRNLTNFIRDKGAPKGTISFYNKNKLNIKKLIKITNKWSGLKNLDLAKMVTTKKNYLWQDYKTWKKENGYLKNKKKILHVVAVDYGIKKNILRYFSDFNCKVTIVPCTTGAKDILKLKPDGIFLSNGPGDPAATGKYAIPTIQELIKKKLPLFGICLGHQILALALGAKTEKMKLGHRGANHPVKNLIEGNVEITSQNHGFEVVKKGMPKSI

SEQ ID NO: 198490 - protein, 257 aa, Unknown
  Bacterial polypetide isolated from the Sargasso Sea
PKGTISNNNKGNFNLKKLTSNSIKWPGLNGLDLAKIVTTKKKYIWKGFKTWEKEKGFEKNKKKKYKIIAIDYGIKKNILRYFSNFNCQVVVVPCNLEANEIIKLKPDGIFLSNGPGDPAATGKYAIGIIQKLIKTKIPVFGICLGHQLLALALKGKTKKMKLGHRGANHPVKNLINSKVEITSQNHGFEVVKESLPKNVEMTHKSLFDNSVEGIRLKNKPIFSVQYHPESNPGPQDSHYLFNQFINLVKKNAKKKRY

SEQ ID NO: 198491 - protein, 267 aa, Unknown
  Bacterial polypetide isolated from the Sargasso Sea
ITFTHPHIGNTGINSEDNESDNIYAEGVVIRNYISQPSNYRSEENLDDFLSRNNSIGIFGIDTRQLTIILREKGSLKACISPIDENNEQSAISLAKSFEGLEGMDLAKEVTTKDLYSWNEGVWPEYIESKSKLHIVAYDYGIKKNILRLLSEHVGKATVVNARCSFDEVIKMKPDGIFLSNGPGDPEPCDYAIENIKRALNENIPIFGICLGHQLLALAGGAKTEKMKFGHHGANHPVQSLNSKEVFITSQNHGFAVNKDSLPNNIE

SEQ ID NO: 198492 - protein, 149 aa, Unknown
  Bacterial polypetide isolated from the Sargasso Sea
IFLSNGPGDPAATGKYAIEIIKDLIKKNLPIFGICLGHQILALALGGKTKKMKLGHRGANHPVKNLIHDNVEITSQNHGFEVVKETLPKNIEVTHKSLFDNSIEGIKLKNKPVFSVQYHPESNPGPQDSVYLFQEFINNMKKNAKKKRY

SEQ ID NO: 198493 - protein, 208 aa, Unknown
  Bacterial polypetide isolated from the Sargasso Sea
MKGLDLAKAVSTKKRYVWSKKGTYRVAAIDYGIKNNILRLLEKHDCKVTVFPCTASAKTILAFKPDGIFLSNGPGDPAAVTYGIDLVQELLGKKPIFGICLGHQILALALGAKTFKLKFGHRGINHPVNNLTHNNVEITSQNHGFAVDLNTLPNNVKSTHINLNDQTSAGIECADHKAFSVQYHPESSPGPHDSRYLFEKFTKMMKGS

SEQ ID NO: 198494 - protein, 306 aa, Unknown
  Bacterial polypetide isolated from the Sargasso Sea
MLYTSQTGYQETLTDPSYAKQIITFTFPHIGITGTNSEDLESDRIFAEGCIINQPIGNYSNWRAEKKLDVFLSNQKTPGISGIDTRYLTRRLSENGAEKVALINFGDNKHDFQNLQKNLAEWKGLENLDLASLVSTKKQFTWDEGLWKKPNKQNSYKNFPIVCLDFGIKHNILRNLNELNFATTILPSSSSIKEILDNKPKGIFLSNGPGDPDATIKVILPTIKELINLKIPIFGICLGHQIISLALGAKTKKMFQGHRGANQPVKNLINQTVEITSQNHGFEVERSSLPNHLMETHISLFDGSNE

SEQ ID NO: 198495 - protein, 86 aa, Unknown
  Bacterial polypetide isolated from the Sargasso Sea
MSAQRFDSVIPAILALEDGTVFRGRSIGAAGETVGEVVFNTAMTGYQEIVSDPSYARQIVTLTCPHIGNVGANDEDKEAEAAYACG

SEQ ID NO: 198496 - protein, 306 aa, Unknown
  Bacterial polypetide isolated from the Sargasso Sea
SKKKSKFSPGILVLENGQVFKGIGLGYEGLATGEVCFNTSITGYQEIISDPSYSGQIINFTFPHIGNVGINKEDHESDKIWTKGVIFNAEITNPSNYRALKNLDIWLKKNKIVGLTGVDTRNLTNFIRDKGAPKGTIETNRNGKFNIKKLLNKSIRWHGLNGLDLAKNVSTRSKYNWNNLKTWKKGIGFEKSKKNIFNIVAIDYGIKKNILRYLANHNCKITVVPCDTSADNISKLNPDGVFLSNGPGDPAATGKYAVKIIQKIINLNIPVFGICLGHQLLALALNAKTKKMKLGHRGANHPVKNL

SEQ ID NO: 198497 - protein, 268 aa, Unknown
  Bacterial polypetide isolated from the Sargasso Sea
VTFTNPHIGNTGVNVDDYESSYNGCSGIIIRNHPTKESSWRNENNFLEFLKDKTISAVCSVDTRYLTSLLREKGSINGCIVPDIKKLDQAKDLLSKFPGLNGLDLAKNVTTKEQYIWNEGTHDLVNVESSKGQKELRVFAYDYGIKKNILRILTDLGCDVTVIPAETTYNEVLKNKPDGVFLSNGPGDPAACDYAINNIRNLLSKQIPIFGICLGFQLMCLASGAKTYKMKFGHHGANHPVIDVNTSRVYITSQNHGFAVDKDSLKSI

SEQ ID NO: 198498 - protein, 145 aa, Unknown
  Bacterial polypetide isolated from the Sargasso Sea
VKKINPDGILLSNGPGDPAAATYAINNIKELLSFKPIFGICLGHQILSLALGMETFKLKFGHRGGNHPVMDTKSGKVEITSQNHGFAVKNQKVKGVSITHINLNDKTVEGIESTANKCFSVQHHPEASPGPHDSMKYFEKFVEMI

SEQ ID NO: 198499 - protein, 221 aa, Unknown
  Bacterial polypetide isolated from the Sargasso Sea
DLATIVSTDNKYETNESIWDQHDNKYNQNNIGKFNIACLDFGIKKNILRNLNNNFFLPKILPANSSIEEILNTNPKGVFLSNGPGDPFATGKIVIPTIKKIIDMQIPIFGICLGHQILSLTLGAKTKKMFQGHRGANHPVKNLKTSQVEITSQNHGFEVDKNTLPSNVIETHVSLFDGTNEGIEHKELPIFSVQYHPEASPGPHDSHYLFKKFYKEVEKYA

SEQ ID NO: 198500 - protein, 177 aa, Unknown
  Bacterial polypetide isolated from the Sargasso Sea
NNILRMLADRGCKITLVPAQTPAEEVLALNPDGVFLSNGPGDPEPCDYAITAIKTIVETGIPVFGICLGHQLLAIASGAKTVKMKFGHHGANHPVKDLKRNVVMITSQNHGFAVDESSLPDNLEVTHISLFDKSLQGIHRTDKPAFSFQGHPEASPGPHEAAPLFDHFIELIEQHKQ

SEQ ID NO: 198501 - protein, 119 aa, Unknown
  Bacterial polypetide isolated from the Sargasso Sea
VFGICLGHQILALALNAKTKKMKLGHRGANHPVKNLISKKVEITSQNHGFEVVKESLPKNIEITHRSLFDDSIEGIKLKNKPVFSVQYHPESNPGPQDSHYLFNDFINEIKKYAKKKRH

SEQ ID NO: 198502 - protein, 279 aa, Unknown
  Bacterial polypetide isolated from the Sargasso Sea
RTFSGTSFGSKGNALGEVCFNTGMTGYQEILTDPSYCKQIVTMTAPHIGNYGISSFDIESKKIHVAGFIVKEDCAYPSNWRSESSISNYLKDNGVVGVKDIDTRALTRHIRDHGSMNGIISTDIKDLKLLKTKLESFPSMNGLDLAKQVTTKKKYKWQKIENAIYRVAAIDFGVKYNILRLLTNHNCDITVFPADVSSKEIRRFNPDGIFLSNGPGDPASLGYAINTVKSFLGVIPIFGICLGHQILALALGAKTFKLKFGHRGLNHPVKNLETGRIEI

SEQ ID NO: 198503 - protein, 280 aa, Unknown
  Bacterial polypetide isolated from the Sargasso Sea
FLGQGLGFEGSCSGELCFNTSMTGYQEIITDPSYAGQIITFTFPHIGNVGTNLDDIESKKPRLSGVILRSKPTSPSNFRSKIDLDEWLKINKIVGICGIDTRLVTKIIKKGGPQNAIILNGVKNHEDIDKLRKKAQDHIKLNNLDLAKTVSCLKPYNWSQTLWTDKNKYEESSNFNYKIVAIDYGLKQNILRSLVSSNFEVQVVPASVNFNEIMNLKPDGIFLSNGPGDPAATGKYAVPLIKKIIKIKLPIFGICLGYQLLSLALGAKTKKMFQGHRGAN

SEQ ID NO: 198504 - protein, 283 aa, Unknown
  Bacterial polypetide isolated from the Sargasso Sea
VTLTYPHIGNTGINYEDDESNKVWTSGLVIKNLPFMSSNWRKEVDLTKYLNENKTVAISDIDTRKLTSIIRSKGAQSAAIMAGKNISEKKAISLANKFKGLTGLDLAKEVSTKNFYIWKESTWRKKEAKMRFKVIVLDFGIKKNILRILYQRGCEVCVLPAKSTFQEIAELHPDGIFLSNGPGDPEPCKYAIETIKELIAINIPIFGICLGHQLLSLALGGKTEKMKFGHHGANHPVKDLKSNAVYITSQNHGFTVKENSLPKEVIITHRSLFDGSIQGIKHV

SEQ ID NO: 198505 - protein, 129 aa, Unknown
  Bacterial polypetide isolated from the Sargasso Sea
IKKLINLKMPIFGICLGHQLLALALNAKTKKMKLGHRGANHPVKNLLTDKVEITSQNHGFEVIKSSLPKNVIITHKSLFDNSIEGIRLKNKPAFSVQYHPEANPGPQDSQYLFDQFIKEIKQNAKKKRY

SEQ ID NO: 198506 - protein, 273 aa, Unknown
  Bacterial polypetide isolated from the Sargasso Sea
WTRGVIFNSEITNPSNYRSLLHLDQWLKQNKVVGLTGVDTRSLTNFIREKGAPKGTLSVSKNGIFNIKKLINKSIKWHGLNGLDLAKEVTTKKNYTWKGLKTWKKGLGFKKSSVNKLRVVAIDFGIKKNILRYFSDYDCEVKVVSCNLSTKKILELKPHGVFLSNGPGDPAATGVYAIPVIRDLIKKNIPIFGICLGHQLLGLALNAKTRKMKLGHRGANHPVKNFLTGKVEITSQNHGFEVIESSLPRNVKVTHKSLFDNSIEGVRLVNKSV

SEQ ID NO: 198507 - protein, 202 aa, Unknown
  Bacterial polypetide isolated from the Sargasso Sea
SGINNNDLAKVVSCKKPYVYQNVTKSKNRINIVAIDFGCKKNILDLFLENNYRVTVVPYTYSYEQILKFKPKGVFLSNGPGDPFATSKLVLLTIKKLIRNNIPLFGICLGHQILGLALGANTIKMHHGHHGVNQPVKNLNNNKIEITSQNHGFMIDPKSLPKEIKVSHISLFDKTIQGIEHVSKPFFSVQYHPESSPGPHDS

SEQ ID NO: 198508 - protein, 208 aa, Unknown
  Bacterial polypetide isolated from the Sargasso Sea
VSTKKPYIITSTAHSPNQQYHVVAIDFGVKTNILNLLSKNGCKVTVLPAQSSFDEVMKHDPDGVFLSNGPGDPEPCDYAIKCIRELLKADIPIFGICLGHQLLALASGAKTEKMKFGHHGANHPVIDTQTGIVYITSQNHGFTVNEMTIPENVKVTHKSLFDQSIQGIELKDKNAFSFQGHPEASPGPHDIQPLFQKFISNINHAKKN

SEQ ID NO: 198509 - protein, 262 aa, Unknown
  Bacterial polypetide isolated from the Sargasso Sea
MIARLIFEDGTTFEGTAFTNSGEKTGEVVFNTALTGYQEVITDPSYSGQIVLMTYPLIGSYGINKEDVESRGLFLQGLIVREYIDFPSNWRSEKTLKSYLDDHGILGVENMDTRAITRFIREKGSQKAILTTSQDPVSVLMQKAAKSKDMTGQNLAKDVSCIKPYVWPPNEKKQFRVAVIDCGVKFNILRELSDKNCDCHVFPYNVSPETILEGNFDGVFLSNGPGDPDVVHTVIDTIKGLLGKVPIFGICLGHQLLGLALG

SEQ ID NO: 198510 - protein, 251 aa, Unknown
  Bacterial polypetide isolated from the Sargasso Sea
DDLNSYFLKNKIPCIFGIDTRYLTKKLSVEGAKKAAIIHFGEGENKIEKLKTQINEWKGLQNLDLAGIVSTEQNYNWQKGIWKSDKLIKRKFKYNVTCLDFGIKNNILRNLNEFNLNPTVLNLFSSYEEIIETDPSGIFLSNGPGDPYATGSKIVDVIKKLIDDNIPIFGICLGHQILGLALNAKTKKMFQGHRGSNHPVKNLTTGIVEITSQNHGFEVDRDSFGKDIIETHVSLFDGTNEGLKHKHLPVF

SEQ ID NO: 198511 - protein, 105 aa, Unknown
  Bacterial polypetide isolated from the Sargasso Sea
ILGLALGGRTFKLGFGHRGLNHPCGTSGQVEITSQNHGFALSSEALPETMVEVTHLNLNDRTVAAFQHRHQPVFGIQYHPEASPGPHDADHHFGRFVALMADRRD

SEQ ID NO: 198512 - protein, 263 aa, Unknown
  Bacterial polypetide isolated from the Sargasso Sea
RSFQHLDAWLKKNKIVGITGLDTRSLTNFIRDKGAPKGTIAYSNKSKFHINKLINSTIKWSGLKNLDLAEKVTTQKNYIWKGLKTWRKEHGYRKNNRNSFHVVAIDYGIKKNILRYFSDFKCKVTVVSCKTSAEKILSLKPDGVFLSNGPGDPAATGKYAIQIIQNLIKKKIPLFGICLGHQILALALGGKTKKMKLGHRGANHPVKNLISENVEITSQNHGFEVVRENLPKNIQITHKSLFDNSIEGIRLKNNPVFSVQYHP

SEQ ID NO: 198513 - protein, 316 aa, Unknown
  Bacterial polypetide isolated from the Sargasso Sea
ADGLSVGEVVFNTSMTGYQEILTDPSYSRQIVTLTYPHIGNTGTNNEDIESNGVHACGLIIRDLPLIASSFRNQQSLSDYLKANNVVGIADIDTRKLTRILREKGAQAGCIMAGADLDEAKALDAAKAFPGLKGMDLAKEVTTKTAYPWRKGSWRLVGGLPEDTPASELKYKVVAYDYGVKQNILRMLVDRGCDVTVVPAKTSAAEVLAMNPDGVFLSNGPGDPEPCDYAIEAIQQILKTDTPIFGICLGHQLLALASGAKTLKMKFGHHGANHPVSNIEQGNVMITSQNHGFAADETTLPANIKVTHKSLFDGSL

SEQ ID NO: 198514 - protein, 221 aa, Unknown
  Bacterial polypetide isolated from the Sargasso Sea
VTTKKNYIWQDYKTWKKGNGYLKNKKKLLHVVAIDYGIKKNILRYFSDFNCKVTIVPCKTSAKDILKLKPNGIFLSNGPGDPAATGRYAIPTIQELIKKNLPLFGICLGHQMLALALGAKTEKMKLGHRGANHPVKNLIEGNVEITSQNHGFEVLKKNLPKNIRVTHQSLFDNSIEGIELKNKPVFSVQYHPESNPGPQDSVYLFDKFVKSMKKNAKKKRY

SEQ ID NO: 198515 - protein, 259 aa, Unknown
  Bacterial polypetide isolated from the Sargasso Sea
WRNETDLNDFLMSTKTVAISNIDTRKLVNIIRKKGAQPGAIVTGKNPNKDKGYELANSFPGLSGLDLAKEVTTDKSYSWKEGIWREDSRPNKYKVVSIDFGVKKNILRILHNRGCEIEVVPAKTTIEQILSLNPDGVFLSNGPGDPEPCDYAIETIKQVIKEKLPIFGICLGHQLLALALGAKTSKMKFGHHGANHPVQDLQTQKVFITSQNHGFMVDEDSLGEDIVVTHKSLFDGSIQGITHKTLPAFSFQGHPEASP

SEQ ID NO: 198516 - protein, 131 aa, Unknown
  Bacterial polypetide isolated from the Sargasso Sea
ATGKYAVPVIQHLLENTELPIFGICLGHQMLALALGAKTIKMNHGHHGANHPVKEHSSGKVEITSMNHGFAVDAETLPSGVQETHVSLFDGSNCGIKMSDRPVFSVQYHPEASPGPQDSFYLFNQFVAAME

SEQ ID NO: 198517 - protein, 286 aa, Unknown
  Bacterial polypetide isolated from the Sargasso Sea
INFTFPHVGNVGTNNEDHESDKIWTKGVILNTEITNPSNYRSLKHLDEWLRKNKIVGITGIDTRNLTNFIRDKGAPKGTISFLKKDKLNLKKLLKITQKWSGLKNLDLAQKVTTKKKYVWNDFKTWKKNDGFLKNKKKILHVVAIDYGVKKNILRYFSDFNCKVTIVSCKTSAADILKEKPNGIFLSNGPGDPAATGKYAIPIIKELIKNKLPVFGICLGHQLLALTLGAKTDKMKLGHRGANHPVKNLIVGKVEITSQNHGFEVVKKNLPKKIKITHQSLFDNSI

SEQ ID NO: 198518 - protein, 73 aa, Unknown
  Bacterial polypetide isolated from the Sargasso Sea
MGLVILAATGKYAIKIIKELIKKNIPIFGICLGHQILALALGGKTKKMKLGHRGANHPVKNLINSKVEITSQN

SEQ ID NO: 198519 - protein, 288 aa, Unknown
  Bacterial polypetide isolated from the Sargasso Sea
CSGFIVKEAAEFPSNFRSKISLDEYLEKNKIIGIQGIDTRMITRMIRDEGAMNAVISSSELSDDDLFKRLQNLPNMNGLDLAKKVTCKEPYFYKNMESPQYKIAALDFGIKENILRIISDFNCEIKVFPATTTSSEIMDYNPDGIFLSNGPGDPAACTYAIKTVKELLGYKPIFGICLGHQILGLSLGADTFKMKFGHRGANHPVKNLETNVIEITSQNHGFSIDHANLPGNIDVTHINLNDNTIEGIRCKEFNAYSVQHHPEASPGPHDSRYLFDDFIELIKSKVYA

SEQ ID NO: 198520 - protein, 138 aa, Unknown
  Bacterial polypetide isolated from the Sargasso Sea
ATGKYAIPIIQDLIKKKLPLFGICLGHQMLALALGAKTEKMRLGHRGANHPVKNLIEGKVEITSQNHGFEVVKKGLPKNIRVTHQSLFDNSIEGIELKNKPVFSVQYHPESNPGPQDSVYLFDKFVKSMKKNAKKKRY

SEQ ID NO: 198521 - protein, 229 aa, Unknown
  Bacterial polypetide isolated from the Sargasso Sea
IGIAGLDTRHLTRRIRRDGPPTGSICFAPDGNIDVEDLKAKSANWPGLEGMDLAAEVSCRRPYDWTESLWSPGKGGKDQPENKYHVVAIDYGAKHNILRCLAAAGCRISVVPSDYSAKEILALKPDGIFLSNGPGDPAATGKYAVPIIRELLKAEKPIFGICLGHQLLALTLGAGTQKMKLGHRGANHPVKDLETGRIEITSQNHGFVVKRNSLPLGVSETHSSLFDGS

SEQ ID NO: 198522 - protein, 298 aa, Unknown
  Bacterial polypetide isolated from the Sargasso Sea
ALGTAVGEIVFNTGMTGYQEVITDPSYYGQILTFTYPEIGNTGINHEDSESSICVKGIIVRNYSSNNSNWRSLKDFNQWLVEKNIIGLFGIDTRALVKILRSNGSMNGVLTSEDKTIESCLKIIYGAPKMEGLNLSKKVSTKQEYLWQNPTETDFDVRKRHSEKQTKLKTVAIDFGIKKSILNRLVSHGCDILVLPSQSSFKDVLSKNPDGIFFSNGPGDPSSVTEGINLARSLIEYGEIPMFGICLGHQIFGLALGGSTYKLPFGHRGLNHPCGKNNQIEITSQNHGFAINPNSLPK

SEQ ID NO: 198523 - protein, 296 aa, Unknown
  Bacterial polypetide isolated from the Sargasso Sea
IGNYGTNPDDMESSTIHASALVVTQLTQIPSNWRSNKSLSDFLWESKVPVMEGVDTRALVRVLRSDGEVKGLMVPSDSLYTLDLLREEAIALPSMEGRNLARVVSTKEPYFWPAETEGVPLKVVAYDFGIKRNILRLMAALGINITIVPWDMPAEVVRQMNPDGVFLSNGPGDPAAVESAIEEVRSLLGVFPIFGICLGHQILALALNCKTYKLKCGHHGGNHPVMDYQTNKIEITSHNHGFSVDEDSLPEDVRVTHRNLNDQTVEGLESLQYPAYSVQYHPEAAPGPRDARFSQT

SEQ ID NO: 198524 - protein, 163 aa, Unknown
  Bacterial polypetide isolated from the Sargasso Sea
MIRVGVTTLKVSTVQQIESKRSFGVTQAALALEDGTFFLGEAFGHRGTVTGEVCFNTSMTGYQEILTDPSYRGQILTMTAPQIGNYGINSQDIESGHLQMAGFAVREASRMASNFTATGTLADYLKAAGVVGISGIDTRALVRHIRTQGAMNGVVSSEILEEE

SEQ ID NO: 198525 - protein, 300 aa, Unknown
  Bacterial polypetide isolated from the Sargasso Sea
PSYAEQIINFTFPHVGNVGSNKEDHESDKIWTKGVIINTEITDPSNYRSLKHLDQWLKQNKIVGITGIDTRNLTNLIRDKGAPKGTISFLRNKKFNIKKLLTTTQKWSGLKNLDLAEKVTTKKNYVWKDFKTWKKGDGFVKNKKKSLHVVAIDYGIKKNILRYFSNFNCKVTIVSCKTSASDILKLNPNGVFLSNGPGDPAATGKYAIPIIKKFINNNLPVFGICLGHQLLGLALGAKTKKMNLGHRGANHPVKNLTKGNVEITSQNHGFEIVKKSLPKNIQITHQSLFDNSIEGIKLKS

SEQ ID NO: 198526 - protein, 313 aa, Unknown
  Bacterial polypetide isolated from the Sargasso Sea
SEKVWTRGVIFNSEITNPSNYRSLIELDLWLKKNKIVGLTGLDTRSLTNFIRDKGAPRGTISHKKKGVFPLKKLINTTLKWPGLKGLDLAKTVSTKNKFSWKGLKTWTKEDGFKKIKKKKFRVVAIDYGIKTNILRYFSNFYCDVIVVPCDASAEYIMTLKPSGIFLSNGPGDPAATGKYAIKIIKNLIKKGLPIFGICLGHQLLALALGGKTKKMKLGHRGANHPVKNIKDNKVEITSQNHGFEVTKNNLPSKIEITHKSLFDNSIEGIKLKNKPVFSVQYHPESNPGPQDSHYLFNNFIMEVKKYAKKKRH

SEQ ID NO: 198527 - protein, 98 aa, Unknown
  Bacterial polypetide isolated from the Sargasso Sea
MKLGHRGANHPVKNLINSKVEITSQNHGFEVVKESLPKNVQMTHKSLFDNSVEGIKLKNKPVFSVQYHPESNPGPQDSHYLFNQFINEIKKNAKKKRY

SEQ ID NO: 198528 - protein, 162 aa, Unknown
  Bacterial polypetide isolated from the Sargasso Sea
VLVPAKTSVDKILSYSPNGIFLSNGPGDPKATGKYAIPIIKKLIKSGIPLFGICLGHQLISLALGAKTKKMFQGHRGANHPVKNLETEKVEITSQNHGFEVTEKSIPKDVKITHKSLFDGSVEGIRKGRNIFAVQYHPEASPGPHDSHYLFQEFKKMIKQNA

SEQ ID NO: 198529 - protein, 75 aa, Unknown
  Bacterial polypetide isolated from the Sargasso Sea
HGFVVTEESLPKSIKLTHKSLFDGTVEGIEHKKKNIFAVQYHPEASPGPHDSHYLFKKFIQMINKNKKNAKKKRY

SEQ ID NO: 198530 - protein, 237 aa, Unknown
  Bacterial polypetide isolated from the Sargasso Sea
STIKWSGLKNLDLAETVTTSKNYIWKGLKTWKKGIGYKKNTKNSFHIVAIDYGIKKNILRYFSDFKCKVTVVSCKTSAKKILDLKPHGVFLSNGPGDPAATGKYAIEILNKLIKKNLPIFGICLGHQILALALGGKTKKMKLGHRGANHPVKNLVRDKVEITSQNHGFVVVEETLPKKIEVTHKSLFDNTIEGIRLKNRPIFSVQYHPESNPGPQDSVYLFQEFINNIKKNAKKKRY

SEQ ID NO: 198531 - protein, 240 aa, Unknown
  Bacterial polypetide isolated from the Sargasso Sea
ESLDALKKEIKNWSGLENLDLAKVVSTKTNYNWNKKSWFNENKNINKNKFNVTCLDFGIKHNILRNLYEINLNPTVLNLSSSYEDILETNPDGIFLSNGPGDPYATGEKIIDTLKRLIDIEIPIFGICLGHQILSLALNAKTKKMFQGHRGSNHPVKNLTKNIVEITSQNHGFEVDRNTFSKDVIETHISLFDGTNEGIKHKNLPVFSVQYHPEASPGPHDSHYLFLEFYNLINKYAKKN

SEQ ID NO: 198532 - protein, 103 aa, Unknown
  Bacterial polypetide isolated from the Sargasso Sea
GLALGGRTFKLGFGHRGLNHPCGTSGQVEITSQNHGFALSSEALPETMVEVTHLNLNDRTVAAFQHRHQPVFGIQYHPEASPGPHDADHHFGRFVALMADRRG

SEQ ID NO: 198533 - protein, 246 aa, Unknown
  Bacterial polypetide isolated from the Sargasso Sea
WLENVGLTGITGVDTRNLTRRIRKFGAANGIISFSTRKEFDIDRLRLRANQHPSLSGKDLASVVSPKELTEWSIGTWTFGSKVTGDGFNHAVQKDYHIVAIDYGAKRNILRNLAQLGAKVTIVPSNMDADTILKLRPDGVFLSNGPGDPAATGEYAVQIIKGLLDSNTPIFGICLGHQLLSLALGAKTEKMKNGHRGGNHPVKQIETGKIEITSQNHGFVISENTLPSSTTITHRSLFDGSIEGFK

SEQ ID NO: 198534 - protein, 227 aa, Unknown
  Bacterial polypetide isolated from the Sargasso Sea
MDLAKDVSTRKNYTWKGLKTWSKEEGYKKNNKKKYRVIAIDYGIKKNILRYFSNFDCEVKVVSCKENPDNLLKLKPHGIFLSNGPGDPAATGEYAIPTVQKLIKSNLPVFGICLGHQILALALNAKTKKMKLGHRGANHPVKNLISKKVEITSQNHGFEVVKESLPKNVEITHKSLFDNSIEGIKLKNKPVFSVQYHPESNPGPQDSHYLFNEFINEIKKYAKKKRY

SEQ ID NO: 198535 - protein, 196 aa, Unknown
  Bacterial polypetide isolated from the Sargasso Sea
YYFGDENSKYKIAVLDLGVKMNILKNLSKRNAYMKVFPHNSKYEDMKKWNPDAYFISNGPGDPEPLSNAINVTKEILNSKKPLFGICLGHQVIALANGIKTYKMHNGHRGINHPVINLKTGKGEITSQNHGFAIDKEDTEKNKNIEITHMHLNDDTIAGIKINDKQCFSVQFHPEASAGPHDSSYLFDEFIDMIEK

SEQ ID NO: 198536 - protein, 292 aa, Unknown
  Bacterial polypetide isolated from the Sargasso Sea
RAFLHLDAWLKKNKIVGITGLDTRSLTNFIRDKGAPKGTISYSKNGKFNVSKLINTTIKWSGLKNLDLAKTVSTSKNYIWKGLKTWNKKTGYKKNTKNSFHVVAIDYGIKKNILRYFSDFKCKVTVVSCKTSAEKILDLKPNGIFLSNGPGDPAATGKYAIEILNKLIEKNLPIFGICLGHQILALALGGKTKKMKLGHRGANHPVKNLIHNKVEITSQNHGFVVVEETLPKKIEVTHKSLFDSTIEGIRLKNKPIFSVQYHPESSPGPQDSVYLFKEFINNLKKNAKKKRY

SEQ ID NO: 198537 - protein, 214 aa, Unknown
  Bacterial polypetide isolated from the Sargasso Sea
TWKGLKTWKKGKGYLRNKNKKLKIVAIDYGIKKNILRYFSDYDCEVKVVSCKKPAEDILKLKPQGIFLSNGPGDPAATGTYAIQTVKTLIKNNLPIFGICLGHQILALSLNAKTKKMKLGHRGANHPVKNLINSKVEITSQNHGFEVIENSLSKNIQITHKSLFDGSIEGIKLKNKPIFSVQYHPEANPGPQDSNYLFSDFIKEVKKYAKKKRH

SEQ ID NO: 198538 - protein, 159 aa, Unknown
  Bacterial polypetide isolated from the Sargasso Sea
MINPYKKNAKLVLSNRIVFPGFYFGAYGTAIGEIVFNTGMTGYQEVITDPSYYGQILTFTYPEIGNTGINFEDSESNTNVKGIIVRNFSSNNSNWRSKKNFDQWLVEKNIIGLHGIDTRALVKILRSNGSMNGVITSEDKNLESCLKMIHDTPKDGGGI

SEQ ID NO: 198539 - protein, 242 aa, Unknown
  Bacterial polypetide isolated from the Sargasso Sea
MGQKTHCGPNFAALRAARENPTAVLVLADGTVFSGVGFGAATTNVGEVCFNTSMTGYQEILTDPSYAGQIITFTFPHIGNVGANSKDFETNRPAALGMITRQPVTAPASWRAETNLGDWLATNNMPGIAGIDTRALTRRIRDAGAPHGVLCHASDGNIDIDALINLAAAWPGLTGLDLATEVTADAMHDWNEGSWEMATAAHRQTDAAFLVVAMDFGCKQNILRCLTDAGCKVRVVPADTSA

SEQ ID NO: 198540 - protein, 295 aa, Unknown
  Bacterial polypetide isolated from the Sargasso Sea
YNRQIITFTNPHIGNTGTNDDDFESRRAYASGIIIRDEEILPNNWRQTSDLKDFLKDQNIIGISGIDTRKLTRILRTKGSQNGCIITGDHSLDDAKQKLREFQGLEGADLAIQVTTKKEYDWDKGLIDIYQNTDSKNSGIKYDVIAYDYGIKNNILRILSDKGCKIKVVPADYPAKKVLESKPDGVFLSNGPGDPKACIYAIKNIKELLKHKIPMFGICLGFQLLALASDASTTKMKFGHHGANHPVMDLSSKKVFITSQNHGFMVDGENLPENIIKTHISLFDGSLQGFEVKDY

SEQ ID NO: 198541 - protein, 292 aa, Unknown
  Bacterial polypetide isolated from the Sargasso Sea
MFNTSQTGYQEALSDPSYTKQIITFTFPHVGIVGTNQEDQESKKIYADGCVINQPLSEYSNWRAENNLNSYFLKNKIPCIFGIDTRYLTKKLSVEGAKKAAIIHFGEDENKIEKLKTQINEWKGLQNLDLAGIVSTEQNYNWKKGIWKSDKSIKGQFKYNVTCLDFGIKNNILRNLNEYNLNPTVLNLFSSYEEIIETNPSGIFLSNGPGDPYATGSKIVDVIKKLIDDNIPIFGICLGHQILGLALNANTKKMFQGHRGSNHPVKNLTTGIVEITSQNHGFEVDRDSLAKI

SEQ ID NO: 198542 - protein, 229 aa, Unknown
  Bacterial polypetide isolated from the Sargasso Sea
GIISSKTDNIDELESKLSDAPSMEGLDLAKIVSTKNIYQWSEKGKYKVAAIDFGIKKNILRLLESFDCSVTVFPAETNAFEILSYDPDGVFLSNGPGDPAAVGYGIDTIKKLLGVKPIFGICLGHQLLALALGAKTFKLKFGHRGINHPVKNMNLGTIEITSQNHGFAVDLDSLPKNILSTHINLNDNTSAGIESIEYPAFSVQYHPESSPGPHDSRYLFKKFIGMMDA

SEQ ID NO: 198543 - protein, 207 aa, Unknown
  Bacterial polypetide isolated from the Sargasso Sea
MTGQDLAKFVSTRKMYKFSEQGKYKVAVLDFGVKRNILNILKKLDCRVSVFPANTSAKEILEISPDGIFLSNGPGDPAAVTYAITTVKQILGKKPMFGICLGHQILALSLGAKTFKLKFGHRGINHPVKNLITNAVEITSQNHGFAVDSKSLPDNTKETHVNLNDNTNAGIESIDNFAFSVQYHPESSPGPHDSRYLFQKFIEMMNA

SEQ ID NO: 198544 - protein, 149 aa, Unknown
  Bacterial polypetide isolated from the Sargasso Sea
ISNGPGDPRSLLTVIDTVQNLIGKLPIFGICLGHQILALACGLKVKKMQFGHHGSNHPVEIEGIKKALITAQNHGFSIEEFEDGFEHENFGNISVFARNLNDGTNEGISLWDSMAYSVQFHPESGPGTTDGLQIFNPFFEMIENNYAKK

SEQ ID NO: 198545 - protein, 232 aa, Unknown
  Bacterial polypetide isolated from the Sargasso Sea
SGLKNLDLAEVVSTQKNYTWKGLKTWKKEAGYKKNNKNSFHIVAIDYGIKKNILRYFSDFNCKVTVVSCKTNAQKILALKPNGIFLSNGPGDPAATGKYAIEIINDLIKHNLPIFGICLGHQILALALGGKTKKMKLGHRGANHPVKNLVHDKVEITSQNHGFVVVEETLPKKIEVTHRSLFDNTIEGIKLKNKPIFSVQYHPESNPGPQDSVYLFQEFINNMKKNAKKKRY

SEQ ID NO: 198546 - protein, 281 aa, Unknown
  Bacterial polypetide isolated from the Sargasso Sea
VKKNKIVGITGIDTRNLTNFIRDKGAPKGTISFYDKNKLNIKKLFKITNKWSGLKNLDLAKQVTTSKNYLWQDYKTWKKENGYLKNKKKLLHVVAIDYGIKKNILRYFSDFNCKVTVVPCKTSAKDIIRLNPNGIFLSNGPGDPAATGKYAIPIIQDLIQKKLPLFGICLGHQMLALALGAKTEKMKLGHRGANHPVKNLIEGNVEITSQNHGFEVVKKGLPKNIRVTHQSLFDNSIEGIELKNKPVFSVQYHPESNPGPQDSVYLFDKFVKSMKKNAKKK

SEQ ID NO: 198547 - protein, 207 aa, Unknown
  Bacterial polypetide isolated from the Sargasso Sea
ARVVSTKEPYFWPSETEGVPLKVVAYDFGIKRNILRLMAALGINITIVPWDTPAEVVRQMNPDGVFLSNGPGDPAAVESAIEEVRSLLGVFPIFGICLGHQILALALNCKTYKLKCGHHGGNHPVKDYQTNKIEITSHNHGFSVDEESLLEDVRVTHRNLNDQTVEGLESLQYPAYSVQYHPEAAPGPRDARYLFKRFVEMMGSTKR

SEQ ID NO: 198548 - protein, 231 aa, Unknown
  Bacterial polypetide isolated from the Sargasso Sea
GLKNLDLAKHVTTKKSYLWQDYKTWKKESGYLKNKKKLLHVVAIDYGIKKNILRYFSDFNCKVTIVPCKTTSKDILKLNPNGIFLSNGPGDPAATGKYAIPIIQDLIKKKLPLFGICLGHQMLALALGAKTEKMKLGHRGANHPVKNLIEGNVEITSQNHGFEVVKKGLPKNIRVTHQSLFDKSIEGIELKNKPVFSVQYHPESNPGPQDSIYLFDKFVKSMKKNAKKKRY

SEQ ID NO: 198549 - protein, 271 aa, Unknown
  Bacterial polypetide isolated from the Sargasso Sea
KIVGLTGLDTRSLTNFIRDQGAPKGTISNNKKGKFNIKKLTNMSVKWSGLNGLDLAKEVSTKKNYIWKGFKTWKKEVGYKKNTKIKFKIVAIDYGIKKNILRYFSDYSCEVKVVSCKSTAGEIVKLKPDGIFLSNGPGDPAATGRYAIKTVQKLIKLNFPIFGICLGHQILALALNAKTKKMKLGHRGANHPVKNLINNSVEITSQNHGFVVVEKSLSKKIQITHKSLFDDTIEGIKLKNKPIFSVQYHPEANPGPQDSQYLFNNFIQNVK

SEQ ID NO: 198550 - protein, 235 aa, Unknown
  Bacterial polypetide isolated from the Sargasso Sea
MAWPGLNGMDLAKEVSTKKNYNWKGLKTWSKEEGYKKNNKKKYRVIAIDYGIKKNILRHFSNFGCEVKVVSCKESAENLIKFKPHGIFLSNGPGDPAATGKYSIPIVQNLIKSGLPVFGICLGHQILALALNAKTKKMKLGHRGANHPVKNLISNKVEITSQNHGFEVVKESLPRNVEITHKSLFDNSIEGIRLKNKPVFSVQYHPESNPGPQDSHYLFSDFIYEIKKYAKKKRY

SEQ ID NO: 198551 - protein, 200 aa, Unknown
  Bacterial polypetide isolated from the Sargasso Sea
RWMWPGKFNRTPTNKRIIAIDFGIKTNILRCLAESGCGIKIVPATVTYDELLELNPDGIFLSNGPGDPEATGEYTIPTLKKIINNTRIPIFGICLGHQILALALGGKTLKMKCGHHGANHPVKDLMTGKVEITSMNHGFAVDRYSLPDNVHETHVSLFDNTNCGIELKGRNVFSVQFHPEASPGPMDSLYLFSKFVASMA

SEQ ID NO: 198552 - protein, 217 aa, Unknown
  Bacterial polypetide isolated from the Sargasso Sea
MAQQPSPRPTACLALADGTLFFGHGFGATGETTAELCFNTAMTGYQEIMTDPSYAGQIVTFTFPHIGNTGVTPEDDETADPVAAGMVVKWDPTVASSWRATQELGDWLAARGRIAIGGVDTRRLTRAIRQSGAPHVALSHDPEGNFDVESLVAAARGFAGLEGVDLAKDVTCAQSYHWNEMRWAWPDGYLPQTAPKHKVVAIDYGAKRNILRCLASA

SEQ ID NO: 198553 - protein, 296 aa, Unknown
  Bacterial polypetide isolated from the Sargasso Sea
QEIFTDPSYFGQIMVTTTSHIGNYGIKMSESQSKEIFISGLICKSFSSVNSRTNSKSLKEWFKSKNLVTLCDVDTRALVRYIRDNGAMNAAITTETDIIDTIKKNLDKFPRMDGLELASKVSTKKPYEFGDSNSQARLAVIDLGIKKNILENFSRRGLFIKVFPYDTNIEEMLKFKPNGFFLSNGPGDPKPLKQVINTTKKILDKNYPLFGICLGHQVIALANGIKTYKMFNGHRGINHPVLNLNTGRGEITSQNHGFAVDYDTAVSNKSVKISHKHLNDQTIAGLEIKGKDCFSV

SEQ ID NO: 198554 - protein, 44 aa, Unknown
  Bacterial polypetide isolated from the Sargasso Sea
DQLKGLELLNNPVFSVQYHPEASPGPHDHLGLFKKFYNLVQKNA

SEQ ID NO: 198555 - protein, 198 aa, Unknown
  Bacterial polypetide isolated from the Sargasso Sea
NKKKIYKIIAIDYGIKKNILRYFSNFNCEVVVVPCNLQAEEIIKLKPDGIFLSNGPGDPAATGKYAINIIQKLIKKNIPLFGICLGHQLLALALKAKTKKMKLGHRGANHPVKNLIYNKVEITSQNHGFEIVKESLPKNIVVTHKSLFDNCIEGIKLKNKPVFSVQYHPESNPGPQDSHYLFNQFINEVKNNAKKKRY

SEQ ID NO: 198556 - protein, 263 aa, Unknown
  Bacterial polypetide isolated from the Sargasso Sea
MKKDISSNKPTACLALADGTLFFGKGFGSTGETTAELCFNTSITGYQEILTDPSYASQIITFTFPHIGNVGVNTEDSETQNPAAEGLIVKWDPTQPSNWRSFEHLSDWLGKYNLLGMGGVDTRRLTRAIRMLGAPHVALAHNPDGVFDTAELIKKAKHFSGLEGLDLAKEVTCHQSYKWDEMRWAWPKGYEKQNYAKHKVVAIDYGAKRNILRCLASAGCEVIVLPASSSADEVLAHKPDGIFLSNGPGDPAATGKYAVPVIQ

SEQ ID NO: 198557 - protein, 279 aa, Unknown
  Bacterial polypetide isolated from the Sargasso Sea
NTSITGYQEIISDPSYAEQIINFTFPHVGNVGTNNEDHESDKIWTKGVILNTEITNPSNYRSLRHLDLWLKKNKVVGITGIDTRNLTNFIRDKGAPKGTISFLKNSRFNINKILKDTKKWSGLKNLDLAKKVTTKKNYTWNDFKTWKKGSGFIKNKKKSLHVVAIDYGIKKNILRYFSDFNCKVTIVSCKTSANDILRLKPNGIFLSNGPGDPAATGKYAIPTIKKFIKINLPVFGICLGHQLLGLSLGAKTKKMNLGHRGANHPVKNLIKGNVEITSQ

SEQ ID NO: 198558 - protein, 147 aa, Unknown
  Bacterial polypetide isolated from the Sargasso Sea
MSNGPGDPAATGKYAIKILNQLIKKNLPIFGICLGHQILALALGGKTKKMKLGHRGANHPVKNLVHDKVEITSQNHGFVVVEENLPKKIEVTHKSLFDNTIEGIRLKNKPIFSVQYHPESNPGPQDSVYLFQEFINNMKKNAKKKRY

SEQ ID NO: 198559 - protein, 113 aa, Unknown
  Bacterial polypetide isolated from the Sargasso Sea
MKDSYGTKPTACLALSDGTIFYGEGFGSTGRKTAELCFNTSMTGYQEILTDPSYAGQIVTFTFPHIGNVGVNLEDNEANMPFASGMVVKWRPTLASNWRSQQNLIEWLENNKL

SEQ ID NO: 198560 - protein, 217 aa, Unknown
  Bacterial polypetide isolated from the Sargasso Sea
MKSSNAILVLQDGTTFSGKSIGFQGESCGEVVFNTAMTGYQEILTDPSYCQQIVTLTYPHIGNTGTNVEDFESEKVWCSGLIIKDLPSTLSSWRNETNLSEFLISNKTVAISNIDTRKLVNIIREKGAQPGAIMTGKNPSKDKGFDLANSFPGLSGLDLAKEVTTSRNYSWKDGVWRKDSRSTKYKVVSLDFGVKKNILRILHNRGCEIEVVPAKTT

SEQ ID NO: 198561 - protein, 155 aa, Unknown
  Bacterial polypetide isolated from the Sargasso Sea
EEIIKLNPKGIFLSNGPGDPEPCDYAIESIKKILQEKIPIFGICLGHQLLALAGGANTYKMKFGHHGANHPVQDVLSKDVFITSQNHGFAVDENTLPKNIKITHLSLFDKSLQGIEFTDTPAFSFQGHPEASPGPQEIQILFEKFSLMVKEYAKT

SEQ ID NO: 198562 - protein, 142 aa, Unknown
  Bacterial polypetide isolated from the Sargasso Sea
SNGPGDPEPCDYAIKCIRELLKANIPIFGICLGHQLLALASGAKTEKMKFGHHGANHPVIDTQTGIVYITSQNHGFTVNEMTIPENVKVTHKSLFDQSIQGIELKDKNAFSFQGHPEASPGPHDIQPLFQKFISNINHAKKN

SEQ ID NO: 198563 - protein, 50 aa, Unknown
  Bacterial polypetide isolated from the Sargasso Sea
HISLLMGSNEGIRHKTLPVFSVQYHPEASPGPHDSNYLFREFYKLITKYA

SEQ ID NO: 198564 - protein, 241 aa, Unknown
  Bacterial polypetide isolated from the Sargasso Sea
CICPGDQKSFPLAKEALDSFNGLEGLDLAKEVSTDQSYTWEEGTWPNYQDVKDDKLIVAVDFGVKKNILRLLRKHVGKVKVVNAQIDFEELIMLKPDGVFLSNGPGDPEPCLYAVELIKQLLKINMPIFGICLGHQLLALAGGCKTFKMKFGHHGANHPVQNLVSKVVYITSQNHGFAVDLTSLPDNIEPNYISLFDQSLQGIAFKDKPAFSFQGHPEASPGPHELEELFVKFNSMIEEYA

SEQ ID NO: 198565 - protein, 205 aa, Unknown
  Bacterial polypetide isolated from the Sargasso Sea
KEFGYKKNNKNSFHVVAIDYGIKKNILRYFSNFNCKVTVVSCKTSAQKILSLKPNGIFLSNGPGDPAATGKYAIQIIKDLIKKNLPIFGICLGHQILALALGGKTKKMKLGHRGANHPVKNLVHDKVEITSQNHGFEVVKETLPKNIEVTHKSLFDNSIEGIKLKNKPVFSVQYHPESNPGPQDSVYLFQEFINNIKKNAKKKRY

SEQ ID NO: 198566 - protein, 191 aa, Unknown
  Bacterial polypetide isolated from the Sargasso Sea
IVAIDYGIKKNILRYFSNFNCEVIVIPCNLEAENIIKLKPDGVFLSNGPGDPAATGKYAINIIQKLIKTNIPIFGICLGHQLLALALKAKTKKMKLGHRGANHPVKNLINSKVEITSQNHGFEVIKDSLPKNVEMTHKSLFDNSVEGIKLKNKPVFSVQYHPESNPGPQDSHYLFNQFINEVKKNAKKKRY

SEQ ID NO: 198567 - protein, 296 aa, Unknown
  Bacterial polypetide isolated from the Sargasso Sea
NTEITSPSNYRSLKHLDKWLKKNKIVGITGIDTRSLTNFIRDKGAPKGTISFFNKNKLNIKKLFKITNKWSGLKNLDLAQQVTTKKNYLWQDYKTWKKDNGYLKNKKKILHVVAIDYGIKKNILRYFSDFNCKVTIVPCKTSAKDILKLEPNGIFLSNGPGDPAATGKYAIPTIQELIKEKLPLFGICLGHQILALALGAKTEKMKLGHRGANHPVKNLVEGNVEITSQNHGFEVVKKGMPKNIKVTHQSLFDNSIEGIELKNKPVFSVQYHPESNPGPQDSVYLFDKFVKSMKKN

SEQ ID NO: 198568 - protein, 118 aa, Unknown
  Bacterial polypetide isolated from the Sargasso Sea
FGICLGHQMLALALGAKTEKMKLGHRGANHPVKNLIAGNVEITSQNHGFEVVKKSLPKNIRITHQSLFDNSIEGIELKNKPVFSVQYHPESNPGPQDSIYLFDKFVKNMKKNAKKKRY

SEQ ID NO: 198569 - protein, 117 aa, Unknown
  Bacterial polypetide isolated from the Sargasso Sea
EICLGHQLLALTLGGKTKKMKIGHRGANHPVKNLKDNKVEITSQNHGFEVTKNNLPSKIEITHRSLFDNSIEGIKLKNKPVFSVQYHPESNPGPQDSHYLFNNFIMEVKKYAKKKRH

SEQ ID NO: 198570 - protein, 75 aa, Unknown
  Bacterial polypetide isolated from the Sargasso Sea
TAELCFTTSMTGYQEILTDPSYAGQIVTFTFPHIGNVGVNLEDNEANMPFASGMVVKWRPTLAFNWRSPQNLLNG

SEQ ID NO: 198571 - protein, 281 aa, Unknown
  Bacterial polypetide isolated from the Sargasso Sea
VLTGDAFGHRGSVVGEVVFNTGMTGYQEVLTDPSYAGQLVTFTYPELGNTGVNGDDQEADHPHARGVIARQLAPCASNWRCSESLDNWMERHGLVGICGVDTRALVRRLRDGGAINGVISSDGRSPADLLAEVRRAPSMEGLNLASQVSTTEPYEWSSPCRVGFDQRLKQHPDLPYRVVAIDFGIKRAILDRLVAHGCAVTVLPSDADLDTVLSHQPEGVFLSNGPGDPAAVNSGIDLARSLLERANLPLFGICLGHQILGLALKREDLQARLRPPWSEPS

SEQ ID NO: 198572 - protein, 179 aa, Unknown
  Bacterial polypetide isolated from the Sargasso Sea
MRYFSDFNCKVTVVSCKTSAEKILALKPNGIFLSNGPGDPAATGKYAIKIIQDLIKKNLPIFGICLGHQILALALGGKTKKMKLGHRGANHPVKNLINDNVEITSQNHGFEVVKEYLPKTIQVTHKSLFDHSIEGIKLKNKPVFSVQYHPESNPGPQDSVYLFQEFINKMKKNAKKKRS

SEQ ID NO: 198573 - protein, 262 aa, Unknown
  Bacterial polypetide isolated from the Sargasso Sea
EIRVRRKVRFLTIKKVNFNLKKLLNSSIKWPGLKGLDLAETVTTKKKYIWQGFKTWRKEKGFEKNKKKIYKIVAIDYGIKKNILRYFSDFDCEVIVVPCNLEAEEIIKLKPDGIFLSNGPGDPAATGKYATNIIQKIIKKNIPIFGICLGHQLLALALKAKTKKMKLGHRGANHPVKNLINNKVEITSQNHGFEVVKESLPKNVEVTHKSLFDNCIEGIKLKNKPIFSVQYHPESNPGPQDSHYLFNQFINEVKKNAKKKRH

SEQ ID NO: 198574 - protein, 306 aa, Unknown
  Bacterial polypetide isolated from the Sargasso Sea
VVFNTVLSGYQEVITDPSYAGQIITFTYPHIGNYGVNKVDNESDSPHCRGVVVRDLARRHSNWRATSDLNSFLKEMEISGIAGLDTRRLTMHIRESGAMPAAFGTLAADELHEIAKSEPGTSGIDLVSQVTTSESYMIDGDRKDKLIVAMDFGIKATIINHLKRLGNVFVVPASTSSKEILELKPDGVFLSNGPGDPEVVKGAPETISELIGKVPIFGICLGHQLLGLAVGGSIKKMTFGHHGGNHPVRQVSNGVVEITSQNHNFAIDPDSVAKVAEVTHVNLNDGVCQGIKLKSAAAFSVQHHPE

SEQ ID NO: 198575 - protein, 228 aa, Unknown
  Bacterial polypetide isolated from the Sargasso Sea
FRSCRKSNHTKKLYYGKVIKHGKKELGYKKNSKNSFHVVAIDYGIKKNILRYFSDFKCKVTVVSCKTSAEKILALKPNGIFLSNGPGDPAATGKYAIKIIKDLIKKNLPLFGICLGHQILALTLGGKTKKMKLGHRGANHPVKNLINDNVEITSQNHGFEVVKENLPKNIEITHKSLFDNSIEGIKLKNKPVFSVQYHPESNPGPQDSVYLFQEFINNMKKNAKKKRS

SEQ ID NO: 198576 - protein, 228 aa, Unknown
  Bacterial polypetide isolated from the Sargasso Sea
HTLDLLREEAMALPSMEGRNLARVVSTKEPYFWPAETEGVPLKVVAYDFGIKRNILRLMSALGINITIVPWDTPAEVVRQMNPDGVFLSNGPGDPAAVESAIEEVRNLLGVFPIFGICLGHQILALALNCKTYKLKCGHHGGNHPVKDYQTNKIEITSHNHGFSVDEDSLPEDVRVTHRNLNDQTVEGLESLQYSAYSVQYHPEAAPGPRDARYLFKRFVGMMGNTKR

SEQ ID NO: 198577 - protein, 225 aa, Unknown
  Bacterial polypetide isolated from the Sargasso Sea
LAKDFEGLAGLDLAKEVTTESSYDWKEGTWRGSNGESDFRVAVLDFGIKKNILRILVDQGYELKIFPAKTSYQEIIDFKPNGVFLSNGPGDPEPCIYAIEIIKELIQISMPIFGICLGHQLLAIALGGKTSKMKFGHHGANHPVQDLKTNKVSVSSQNHGFTVEENSLPANVEITHKSLFDGTIQGIQHSSKPFFSFQGHPEASPGPHDLAYLFKTFDKNMTKNA

SEQ ID NO: 198578 - protein, 233 aa, Unknown
  Bacterial polypetide isolated from the Sargasso Sea
CIYPSEKITDKEAMIQIIDFGSISDKNLIKNVATNSKFFIGEKKNKSQKRIAAVDFGVKENILRIFKDMGAVIEVFPPDCTAEEVLNSKPDGVFFSNGPGDPEVLSHAVSQIKLLMEKNIPMFGICLGHQLMSLAYGLKIMKMPFGHHGANHPVHDLETNEVFITSQNHNFAVKEPINNDSIKITHKSLFDNTIQGLAHKEKPFYSIQCHPEASPGPKEFEVLFKKFFKEMNA

SEQ ID NO: 198579 - protein, 295 aa, Unknown
  Bacterial polypetide isolated from the Sargasso Sea
GAKKVAIGEIVFNTSMSGYQEIITDPSYCKQIITFTHPHIGNTGINSEDNESDNIYAEGVVIRNYISKPSNYRSEENLDSFLTRNNSIGIFGIDTRQLTIILREKGSLKACISPIDENNEESAISLAKSFDGLEGMDLAKEVTTKNLYSWNEGVWPDYKESESKLHIVAYDYGIKKNILRLLSEHVGKVTVVNARCSFDEVLKMNPDGIFLSNGPGDPEPCDYAIENIKRALNENIPIFGICLGHQLLTLAGGAKTEKMKFGHHGANHPVQSLKSKEVFITSQNHGFAVNEDSCQ

SEQ ID NO: 198580 - protein, 215 aa, Unknown
  Bacterial polypetide isolated from the Sargasso Sea
MYGKVLKLGKKDKGFEKNKNKKYKIIAIDYGIKKNILRYFSNFNCEVVVVPCNLEAKEIIKLKPDGIFLSNGPGDPAATGKYAINIIQKLIKTNIPIFGICLGHQLLALALKAKTKKMKLGHRGANHPVKNLINSKVEITSQNHGFEVIKKSLPKNVEMTHKSLFDDSVEGIKLKNKPVFSVQYHPESNPGPQDSHYLFNQFINEIKKNAQKKRY

SEQ ID NO: 198581 - protein, 71 aa, Unknown
  Bacterial polypetide isolated from the Sargasso Sea
NHGFEVDKDNMPDDVEITHLSLFDQSIEGIKSKKYKAFSVQYHPEASPGPHDSHYLFIEFIKEVEKHAKKN

SEQ ID NO: 198582 - protein, 236 aa, Unknown
  Bacterial polypetide isolated from the Sargasso Sea
ESDKIWTRGVIFNSEITNPSNYRSLKHLDEWLKKNKIVGITGLDTRSLTNFIRDQGAPKGTISNNKSGKFNIKKLIKKTTIWPGLKGMDLAQEVSTRKNYTWKGLKTWSKEEGYKKNNKKRFRVIAIDYGIKKNILRYFSNFDCEVKVVSCKESAENLLKLKPHGIFLSNGPGDPAATGKYAISTVQKLIKSNLPVFGICLGHQILALALNAKTKKMKLGHRGANHPVKKFNFKEG

SEQ ID NO: 198583 - protein, 290 aa, Unknown
  Bacterial polypetide isolated from the Sargasso Sea
DNKTIFKGIGLGFHGTATGEVCFNTSLTGYQEIISDPSYAGQIINFTFPHIGNVGTNKEDMESDKIWTRGVIFNSEITNPSNYRSLTHLDQWLKKNKVVGLTGIDTRGLTNFIRDKGAPKGTLSISKTGIFNIKKLLNQSIKWHGLNGLDLASEVTTKKSYTWGGLKTWKKGVGFKRSSKNKLKIIAIDYGIKKNILRYFSDYDCQVKVVSCNLPLEKILDFEPQGIFLSNGPGDPAATGKYAIPVIRKLIKKNIPIFGICLGHQLLGLALKAKTKKMKLGHRGANHPVK

SEQ ID NO: 198584 - protein, 178 aa, Unknown
  Bacterial polypetide isolated from the Sargasso Sea
MSNPEAILMLADGTKFHGYSIGIKGFAVGEVVFNTSMTGYQEIITDPSYDSQIICFTNPHIGNTGINFEDYESNKIYASGIIIKDEDIASHNWREKNSLTNYLKESNKLAIAGIDTRRLTKILRKTGSQNACIITDSTDTKKAETKLKEFHGLDNKDLAIKVTSSEPYMWNEGIINIY

SEQ ID NO: 198585 - protein, 252 aa, Unknown
  Bacterial polypetide isolated from the Sargasso Sea
PRRMSSWRNACGLTDYLSDRNVVGIGGLDTRRLTRLLRDQGSQNGCIVAAKEIGPSDIDRARQSALDFPGLARMDLAKEVTTSEAYEWRQGTWQLGRGYRNVEETRFHVVAFDFGVKRNILRMLADRRCRLTVVPAKTTAAEVLQLKPDGIFLSNGPGDPEPCDYAIEAIRALLSENLPVFGICLGLQLLGLAAGMKTMKMGHGHHGANHPVRNLMDNTVLITSQNHGFCIDDASLPQNVKITHRSLFDDTI

SEQ ID NO: 198586 - protein, 224 aa, Unknown
  Bacterial polypetide isolated from the Sargasso Sea
MIHKKVIGICNVDTRKITKKIRDQGAQDVAIEHRKDRKFLDEELSKKLLNFPGLKGMELARNVSCRKPYNFTELGFPWIEQKRVTGKKVVVIDYGIKTNILRKLASYGFEITVVPADFPADEILKLNPQAIFLSNGPGDPAATHNYSGPIIKTIISQKNLPIFGICLGHQLLGLALGAQSKKMHHGHHGANHPVKELKSGKVIVTSMNHGFNIDSESLPKGTIE

SEQ ID NO: 198587 - protein, 290 aa, Unknown
  Bacterial polypetide isolated from the Sargasso Sea
FLHLDSWLKKNKIVGITGLDTRSLTNIIRDKGAPKGTISFSKKGKFNISKLYNITSKWGGLNNLDLAEEVSTKQNYLWKGFKTWKKGLGYKKNKKNSFHVVAIDYGIKKNILRYFSDFDCRVTVVSCKTDADKIISLNPNGVFLSNGPGDPAATGKYAIEIIKKLIKKNLPIFGICLGHQILGLALGAKTKKMKLGHRGANHPVKNLIDGKVEITSQNHGFEIVQRDLPKNIEITHKSLFDNSIEGIRLKNKPVFSVQYHPEANPGPQDSVYLFKKFINNMRSNAKKKRY

SEQ ID NO: 198588 - protein, 295 aa, Unknown
  Bacterial polypetide isolated from the Sargasso Sea
SNYRSLKHLDGWLKKNKIVGITGIDTRNLTNFIREKGAPKGTISFFKKNKLNIKKLLKITQTWSGLKNLDLAERVTTKKNYEWQDFKTWNKTNGFLKNKKKILHVVAIDYGIKKNILRYFSDFNCKVTIVSCKTSAADIIKEKPNGIFLSNGPGDPAATGKYAIPIIRKLIKNNLPIFGICLGHQLLALTLGAKTEKMKLGHRGANHPVKNLIKGNVEITSQNHGFEVMKRNLPRNIRITHQSLFDNSIEGIQLKNKPIFSVQYHPESNPGPQDSVYLFNQFIMSMKKNAKKKRY

SEQ ID NO: 198589 - protein, 154 aa, Unknown
  Bacterial polypetide isolated from the Sargasso Sea
EIIKYNPKGIFLSNGPGDPKPCDYAIENIRKFLEHKIPIFGICLGHQLLALAGGANTYKMKFGHHGANHPVQDMASKDVFITSQNHGFAVDENTLPKNIKVTHVSLFDKSLQGIEFIDRPAFSFQGHPEASPGPQEIQILFEKFSAMVKEYAKT

SEQ ID NO: 198590 - protein, 181 aa, Unknown
  Bacterial polypetide isolated from the Sargasso Sea
KYFKIFSDYNCEVKVVSCKTTSEKITKLKPDGIFLSNGPGDPAATGIYAIKTIQKLIKWNYPIFGICLGHQILALALNAKTKKMKLGHRGANHPVKNLINNKVEITSQNHGFVVIESSLSKKIQITHKSLFDNSIEGIRLKNKPVFSVQYHPEANPGPQDSQYLFNNFIQDIKKYAQKKRH

SEQ ID NO: 198591 - protein, 260 aa, Unknown
  Bacterial polypetide isolated from the Sargasso Sea
NKEDIESDKIWTKGVIFNSEITDPSNYRAFLHLDAWLKKNKIVGLTGLDTRSLTNFIRDKGAPKGTIAFSKKQKLNINKLTNATLKWSGLKNLDLAKEVSTSKNYIWKGFKTWKKKDGFVKNKKNHFHVVAIDYGIKKNILRYFSDFNCKVTVVHCKTSAEKILSLKPNGIFLSNGPGDPAATGKYAINIIKNLIKKNIPIFGICLGHQILALALGGKTKKMKLGHRGANHPVKNLIHDNVEITSQNHGFEVVKETYQKI

SEQ ID NO: 198592 - protein, 199 aa, Unknown
  Bacterial polypetide isolated from the Sargasso Sea
NKKKKYKIICNSIIGIKKNILRYFSNFNCEVTVVPCRLEAEEIIKLKPDGIFLSNGPGDPAATGKYAINIIQKLIKTNIPIFGICLGHQLLALALKAKTKKMKLGHRGANHPVKNLINSKVEITSQNHGFEVVKESLPKNVEMTHKSLFDNSVEGIKLKNKPVFSVQYHPESNPGPQDSHYLFNQFINEVKKNAKKKRY

SEQ ID NO: 198593 - protein, 132 aa, Unknown
  Bacterial polypetide isolated from the Sargasso Sea
IDVIKELIKKGLPIFGICLGHQILGLALGAKTKKMKLGHRGANHPVKNLDNGCVEITSQNHGFEIVKNSIPKNTEVTHISLFDNSIEGIRLKNKPVFSVQYHPESNPGPQDSVYLFKEFVNKMKKYAKKKRY

SEQ ID NO: 198594 - protein, 250 aa, Unknown
  Bacterial polypetide isolated from the Sargasso Sea
YEESGNFKIETLKNELKKHPKMDGLNLSSSITTKKQYKFTESVHKLISSEVLNLKNFKLKIAVIDFGVKHNILRHLVNLNAEVNVFSENTNIEEINNFKPDGIFLSNGPGDPSATEIKCRKLLNDLFQLKIPVFGICIGHQLIGLSFGAKTNKMPQGHRGANHPVKNLLNNKVEITSQNHGYEIDIDSLPNCLEVTHTSLFDNSIEGIRHKSLPIFSVQYHPEASPGPTESSYLFNEFLNLIKVSKNAKT

SEQ ID NO: 198595 - protein, 186 aa, Unknown
  Bacterial polypetide isolated from the Sargasso Sea
MIFGIKQNILRNLNNLDFNLTIINSKSSIKDVLSTKPDGIFLSNGPGDPFATAEHIVPTLKEIISNKIPIFGICLGHQLISLALGAKTKKMFQGHRGSNHPVKNLNTSTVEITSQNHGFEVDRNTFSNDIIETHISLFDGTNEGIKHKSLPIFSVQYHPEASPGPHDSNYLFKEFFKIIKNNAKKN

SEQ ID NO: 198596 - protein, 283 aa, Unknown
  Bacterial polypetide isolated from the Sargasso Sea
EMFFEKWLKNNRKICIAGVDTRMLTKKIRENGACNALIHFSKNKSFNLKKLKTNLENTESIKNQDLASQISTKEIYQWKNNKKQKFKFKNLSNKWIAVIDFGIKKNILKLLEDLDYEIIVFGIDFDFKKIVSYKPKGFFLSNGPGDPMATYKKIKNKIKYLTHKNIPIFGICLGHQILALGFGAKTEKMNHGHRGANHPIKNNNNKVEITVQNHGFVVSKKKLPNNISVTHKSLFDGTIAGIKIFKKPFFSVQYHPEASPGPHDSRYLFKEFKNKIDIYAKKN

SEQ ID NO: 198597 - protein, 230 aa, Unknown
  Bacterial polypetide isolated from the Sargasso Sea
IQKAKNFSGLEGLDLAKVVSTKENYLWDTGVWPHYTKSTLDYPIVAMDFGIKKNILNLLSDTLGKVHVVNAQTEYNEIKKLNPKGIFLSNGPGDPEPCDYAIKNIKKFLEDKIPIFGICLGHQLLGLASGAQTFKMKFGHHGANHPVQDSKTNEVFITSQNHGFAVDIETLPKNVNVTHQSLFDKSLQGIEFSDRPAFSFQGHPEASPGPHEIQILFMKFKKMVEEYAKT

SEQ ID NO: 198598 - protein, 219 aa, Unknown
  Bacterial polypetide isolated from the Sargasso Sea
LDLAKEVSTQNSFSWDEGTWPNYEEVKNEKLIVAIDFGVKKNILRLLRKHVGKVQVVNAEICFDELMQFKPDGVFLSNGPGDPEPCIYAIELIKQLLDINIPIFGICLGHQLLALSGGCKTYKMKFGHHGANHPVQDMVSKVVHITSQNHGFAVDFSSLPENIEPTHISLFDQSLQGIAFKDKSAFSFQGHPEASPGPHELEELFIKFNLMIDKNAEKK

SEQ ID NO: 198599 - protein, 148 aa, Unknown
  Bacterial polypetide isolated from the Sargasso Sea
MPVMGICLGHQLMGLAAGLRTYKLRYGHRGSNQPVMDLETGRVHITSQNHGFAVEDPVKGMLAPHPSGTCSDESENVLGADFKVRHVNSNDGTVEGLDLLDKPAFTIQFHPEACPGPHDASPLFDRFQDIVDQYLSTSKAEIATRGES

SEQ ID NO: 198600 - protein, 234 aa, Unknown
  Bacterial polypetide isolated from the Sargasso Sea
ITDPSYAKQIITFTNPHIGNTGINEEDNEASSIYASGIVIRSLTEIPSSWRSTTSLQDFLIKNNSIGISGIDTRKLVNTLRETGSQRAIIAANESLDPKDAKKELEKFSGLGGLDLAKVVSTKDSYRWDEGVWPDFKKTSSDFHIVAIDFGIKENILRLLAEHVGKITVINAQIPIEEILNLKPDGIFLSNGPGDPEPCDYAIQNIKIALDKQIPIFGICLGHQLLAIAGGCKT

SEQ ID NO: 198601 - protein, 239 aa, Unknown
  Bacterial polypetide isolated from the Sargasso Sea
KKNAKLVLSNGIVFPAFSFGASGTAVGEIVFNTGMTGYQEVITDPSYFGQILTFTYPEIGNTGINFEDSESSICVKGIIVRNYSSNNSNWRSQKKFDQWLVENNVMGLYGIDTRALVKILRSHGSMNGVLTSEDKTVESCLKIIYETPKMEGLNLSKVVSTKQQYFWQNPTETDFDVRKRYSDKPDKLKVIAIDFGIKKSILNRLVSHGCEILVLPSSSSFKDVLSNNPDGIFFSNGPG

SEQ ID NO: 198602 - protein, 105 aa, Unknown
  Bacterial polypetide isolated from the Sargasso Sea
KTKKMQLGHRGANHPVKDLTTSKVEITSQNHGFEVDPSSIPISMTVTHKSLFDGSIEGIEVKGEKLFSVQYHPEANPGPQDSKYLFDKFLKNIIAARKNGKKKRY

SEQ ID NO: 198603 - protein, 171 aa, Unknown
  Bacterial polypetide isolated from the Sargasso Sea
MKLFGRVHVVNAQTEYNEIKKLNPKGIFLSNGPGDPEPCDYAIENIKKFLEDKIPIFGICLGHQLLGLASGAQTFKMKFGHHGANHPVQDSKTNEVFITSQNHGFAVDIETLPKNVNVTHQSLFDKSLQGIEFSDRPAFSFQGHPEASPGPHEIQILFMKFKKMVEEYAKT

SEQ ID NO: 198604 - protein, 135 aa, Unknown
  Bacterial polypetide isolated from the Sargasso Sea
PDATIKIILPTIKELINLQIPIFGICLGHQLINLALGAKTKKMYQGHRGANQPVKNLINNTVEITSQNHGFEVDRASLPIEIEETHISLFDGSNEGIRHKTLPVFSVQYHPEASPGPHDSAYLFKEFYKLVKVNA

SEQ ID NO: 198605 - protein, 80 aa, Unknown
  Bacterial polypetide isolated from the Sargasso Sea
MKSAAILIDDGTIIPAKSIGSDQISVGEIVFNTSMTGYQEIITDPSYDRQIITFTNPHIGNTGINFDDYESNENGCSGII

SEQ ID NO: 198606 - protein, 208 aa, Unknown
  Bacterial polypetide isolated from the Sargasso Sea
MGKKQLWFNKNTNKKKEYNVTCLDFGIKNNILRNLCEYNLNPTVLNLFSNFDEIMNTKPDGIFLSNGPGDPYATGENIVKTLKKLIKIEIPIFGICLGHQILSLALNAKTKKMFQGHRGSNHPVKNLKRDFVEITSQNHGFEVDRNTFSDDIVETHVSLFDGSNEGLKHKHLPIFSVQYHPEASPGPHDSHYLFSDFYQLIEKYAKKN

SEQ ID NO: 198607 - protein, 203 aa, Unknown
  Bacterial polypetide isolated from the Sargasso Sea
WKSDKSDKSQSKYNVTCLDFGIKNNILRNLNEFNLNPTVLNLFSSYEEIIETNPSGIFLSNGPGDPYATGSKIVDVIKKLIDDNIPIFGICLGHQILGLALNAKTKKMFQGHRGSNHPVKNLSTGIVEITSQNHGFEVDRESFGKDIIETHVSLFDRTNEGLRHKHLPVFSVQYHPEASPGPHDSHYLFEEFYKLIEKNAKKN

SEQ ID NO: 198608 - protein, 233 aa, Unknown
  Bacterial polypetide isolated from the Sargasso Sea
MAWLNGMDLAQEVTTNKTYIWKGYKTWKKNKGYEKNKKKKFRVVAIDYGIKKNILRYFSDFDCEVKVVSCKENADNIINLKPHGIFLSNGPGDPAATGKYAIKIVKSLIKKNIPLFGICLGHQILALALDAKTKKMKLGHRGANHPVKNLITKKVEITSQNHGFEVVKESLKKNTEVTHLSLFDNSIEGIRLKNKPVFSVQYHPEANPGPQDSKYLFSNFIKDIKKYAKKKRH

SEQ ID NO: 198609 - protein, 208 aa, Unknown
  Bacterial polypetide isolated from the Sargasso Sea
HGEKEKGFKKNKKKKYKIIAIDYGIKKNILRYFSNYNCEVVVVPCNFEAVDIIKLKPDGIFLSNGPGDPAATGKYAINIIQRLIKTNIPIFGICLGHQLLALALKAKTKKMKLGHRGANHPVKNLINSKVEITSQNHGFEVVKESLPKNVEMTHKSLFDNSVEGIKLKNKPVFSVQYHPESNPGPQDSHYLFNEFINEVKKNAKKKRY

SEQ ID NO: 198610 - protein, 260 aa, Unknown
  Bacterial polypetide isolated from the Sargasso Sea
FKGIGLGYQGDATGEVCFNTSLTGYQEIISDPSYAGQIINFTFPHIGNVGTNKEDIESDKIWTRGVIFNSEITNPSNYRSLKHLDEWLKKNKIVGITGLDTRSLTNFIRDKGAPKGTISNNKSRKFNIKKLVKKTITWPGLNGMDLAEEVSTKKNYTWAGLKTWSKEEGYKKNNKKKYKVVAIDYGIKKNILRYFSNFDCEVKVVSCKENPDNLLKLKPHGIFLSNGPGDPAATGKYAIPTIQKLIKSNLPIFGICLGHQ

SEQ ID NO: 198611 - protein, 288 aa, Unknown
  Bacterial polypetide isolated from the Sargasso Sea
VESDKIWTRGVIFNSEITTPSNYRSFQNLNKWLIKNKVVGLTGIDTRGLTNFIRDNGAPKGTISVNKSGNFNIKKLIKDAVKWHGLNGLDLAKEVTTKSTYKWIGFKTWKKGVGYKRSIKNKLRIVALDYGIKKNILRYFSDYSCEVKVVSCNLSANEILRYKPQGIFLSNGPGDPAATGKYAIPVIRDLIKKGVPIFGICLGHQLLGLALNAKTKKMKLGHRGANHPVKNLLSGKVEITSQNHGFEVTEDSLPKNVQVTHKSLFDNSIEGLKLINKPVFSVQYHPEA

SEQ ID NO: 198612 - protein, 173 aa, Unknown
  Bacterial polypetide isolated from the Sargasso Sea
FNCKVTIVPCKSSAKDILKLKPNGIFLSNGPGDPAATGKYAIPIIQDLIKKKLPLFGICLGHQMLALALGAKTEKMKLGHRGANHPVKNLVEGNVEITSQNHGFEVVKKNLPKNIRVTHQSLFDNSIEGIELKNKPVFSVQYHPESNPGPQDSVYLFDKFVKSMKKNAKKKRY

SEQ ID NO: 198613 - protein, 222 aa, Unknown
  Bacterial polypetide isolated from the Sargasso Sea
EVTTPKTYTWKGLKTWKKIRGFEKNKRKKFKIVAIDFGIKKNILRYFSNYDCEVKVVSCATNSDEIFRLKPHGIFLSNGPGDPAATGKYAIDIVKNLVQSGIPLFGICLGHQILALALEAKTRKMKLGHRGANHPVKNLITNKVEITSQNHGFEVIKESLKKNTEITHISLFDNSIEGIRLKNKPVFSVQYHPEANPGPQDSKYLFYHFMKDVKKYAKKKRY

SEQ ID NO: 198614 - protein, 222 aa, Unknown
  Bacterial polypetide isolated from the Sargasso Sea
MSNLKALLALEDGTIFEGKSIGDSGKTNGEIVFNTSMTGYQEILTDPSYAKQIVTLTYPHIGNTGVNHEDVESDAIWCSGLVIRSNSLLESSWRSEDSLTNYLKANNILGISDIDTRKLTRLIRTKGAQAASIIASENINKDEAIHEARKFKGLAGMDLAQEVTTPNSYAWDTGVWREPNKKSKLKVVVLDFGIKQNILRILAGRGFDLKIVPAKTNINEIL

SEQ ID NO: 198615 - protein, 293 aa, Unknown
  Bacterial polypetide isolated from the Sargasso Sea
KLVLSNGIVFPGFYFGASGTAIGEIVFNTGMTGYQEVITDPSYYGQIITFTYPEIGNTGINFEDSESDINVKGIIVRNFSSNNSNWRSNKNFDQWLVEKNIIGLYGIDTRALVKILRSNGAMNGVITSLDKTDESCLKIIHDTPKMEGLNLSKVVSTKQQYLWKSHTQTIFDLRKRYPKSSKKLRIVAIDFGIKNSILNRLVSHGCEVLVLPARSSLKDVLSSKPDGIFFSNGPGDPASVSGGIDLAKSLIENGEIPMFGICLGHQIFGLALGGSTYKLSFGHRGLNHPCGEN

SEQ ID NO: 198616 - protein, 252 aa, Unknown
  Bacterial polypetide isolated from the Sargasso Sea
GIEGTSFGEICFNTGMTGYQEIFTDPSYFGQIMVTTNSHIGNYGTVGFDDQSSSPKISGLVCKNFSFNYSRPIASESLENYFSKINMVVISDVDTRALVNYIRENGAMNAAISTQDKNIELIKNELSKFPSMDGLELASKVSTQKSYYYGKLNSKYKVAVLDLGVKKSILENISKRGAYLKIFPYNTSFEEMDKWSPDAYFISNGPGDPKPLIDAQITAKKIISKNIPLFGICLGHQIIALANSIKTYKMFN

SEQ ID NO: 198617 - protein, 190 aa, Unknown
  Bacterial polypetide isolated from the Sargasso Sea
SSKLKVVAIDYGIKKNILNCLLDLNLEVILVPAKTSVEKILSYSPNGIFLSNGPGDPKATGKYAIPIIKKLIKSRIPLFGICLGHQLISLALGAKTKKMFQGHRGANHPVKNLETEKVEITSQNHGFEVTEKSIPKDVKITHKSLFDGSIEGIRKGKNIFAVQYHPEASPGPHDSHYLFQEFKKMINQNA

SEQ ID NO: 198618 - protein, 117 aa, Unknown
  Bacterial polypetide isolated from the Sargasso Sea
VFGICLGHQILALALGAKTEKMKLGHRGANHPVKNLIKGNVEITSQNHGFEVIKKNLPKNILITHQSLFDDSIEGIELKNKPVFSVQYHPESNPGPQDSVYLFEKFVKSMKKNAKKK

SEQ ID NO: 198619 - protein, 201 aa, Unknown
  Bacterial polypetide isolated from the Sargasso Sea
MINLYKKNAKLVLSNGIVFPGFFFGASGTAIGEIVFNTGMTGYQEVITDPSYFGQILTFTYPEIGNTGINFEDSESNINVKGIIVRNFSSNSSNWRSKKNFNQWLVEKKIIGLYGIDTRALVKILRSSGAMNGVITNLDTSDESCLKIIQDTPKMEGLNLSKVVSTKQQYLWQSHTHTIFDLRKRYDESSKKLKIVAIDFG

SEQ ID NO: 198620 - protein, 165 aa, Unknown
  Bacterial polypetide isolated from the Sargasso Sea
MQKAKIVLEDGTFFKGSVFAGLGEAYGELVFNTSMTGYQEILSDPSYYGQIITLTYPLIGNYGVNNEDNESKGIFASGLIINEYSRNYSNWRAEKSLAKYLEDHNKIGIHEVDTRAITLHIRDKGAMKCIITTNDESVESLIKKVKKSKGLIGNDLASEVTTKEI

SEQ ID NO: 198621 - protein, 257 aa, Unknown
  Bacterial polypetide isolated from the Sargasso Sea
SGGFDVRNITKYLRDNGSSMFALGIDVDIKDLKEILSKAKNILGDSSAMTAGNQNNKNIPTEGKIGIIDLGAKRSIIKVLEDHDYRVVMIPPNTTSNEILKMNLKGLLISNGPGDPRSLLSVINTVQNLIGKLPIFGICLGHQILGLACGLNVKKMQFGHHGSNHPVEIEGSKRALITAQNHGFSIEDFGDSIKHEIFGDINVYATNLNDGTNAGISIWDSMAYSVQFHPESGPGTTDGLQIFNPFFEMIEKNYAKK

SEQ ID NO: 198622 - protein, 75 aa, Unknown
  Bacterial polypetide isolated from the Sargasso Sea
MEVALTKSALLVLEDGTVFTGTAIGADGLSVGEVVFNTSMTGYQEIFTDPSYSRQIVTFTYPHIGNTGTNNEDVE

SEQ ID NO: 198623 - protein, 48 aa, Unknown
  Bacterial polypetide isolated from the Sargasso Sea
LFDKSLQGIHRIDKPAFSFQGHPEASPGPHDAAALFDHFIDLIEQSKQ

SEQ ID NO: 198624 - protein, 153 aa, Unknown
  Bacterial polypetide isolated from the Sargasso Sea
TKAHEILSYDPDGVFLSNGPGDPAAVGYGIETIKKLLGVKPIFGICLGHQLLALALGAKTFKLKFGHRGINHPVKNINLGTIEITSQNHGFAVELDSLPKNILSTHINLNDNTSAGIECVDHPAFSVQYHPESSPGPHDSRYLFKKFIGMMDA

SEQ ID NO: 198625 - protein, 269 aa, Unknown
  Bacterial polypetide isolated from the Sargasso Sea
MTEEAVLALADGTIFRGKSIGASGRINGEIVFNTSMTGYQEILTDPSYAKQIVTLTYPHIGNTGVNKEDIESENIWCSGLVIRSNSQLVSSWRSEDSLTEYLKKNKILGISDIDTRKLTRLIRTKGAQSASILVSEDLNADEAIEEARKFEGLAGLDLAKKVTTAKSYSWEEGVWREPKSNSKLKVVAVDFGIKRNILRILSGKGYDLTVVPAKSTSQDILDLKPDGVFLSNGPGDPEPCDYAIKTIRELSSEKIPLFGICLGHQLLAL

SEQ ID NO: 198626 - protein, 40 aa, Unknown
  Bacterial polypetide isolated from the Sargasso Sea
FDIPAFSVQYHPEASPGPHDSRYLFREFADLMSAFEGASS

SEQ ID NO: 198627 - protein, 253 aa, Unknown
  Bacterial polypetide isolated from the Sargasso Sea
ISFYNKNKLNIKKLIKITNKWSGLKNLDLAKMVTTKKNYLWQDYKTWKKESGYLKNKKKILHVVAIDYGIKKNILRYFSDFNCKVTIVPCKTDVKDILKLKPNGIFLSNGPGDPAATGKYAIPTIQKLIKKKLPLFGICLGHQILALALGAKTEKMKLGHRGANHPVKNLIEGNVEITSQNHGFEVVKKGMPKNIRVTHQSLFDNSIEGLELKNKPVFSVQYHPESNPGPQDSIYLFDKFVKSMKKNAKKKRY

SEQ ID NO: 198628 - protein, 333 aa, Unknown
  Bacterial polypetide isolated from the Sargasso Sea
TARPKPIHGQLILEDGSVFNGIKIGSSNMEIGEVCFNTSMTGYQEIITDPSYAGQIINFTFPHIGNVGTNLDDNESKKPFAKGIIINCDISDPSNYRSILHLDDWLKKNNVPGICNIDTRLITNRVRSKGAPKGGIIEGPINNKKTANCLKKIKQWKGLNGLDLAIDVSRNNIKIYKSKTKSELKVVAIDYGIKQNILNCLLNLNIEVILVPAETSAEKILSYDPNGIFLSNGPGDPKATGKYAIPIIKKLIKAKIPIFGICLGHQLISLALGAKTKKMFQGHRGANHPVKNLESKKVEITSQNHGFEVTEKSIPKGGKITHKSLFDGSIEGI

SEQ ID NO: 198629 - protein, 77 aa, Unknown
  Bacterial polypetide isolated from the Sargasso Sea
MINPYKKNAKLVLSNGIVFPGFFFGASGTAIGEIVFNTGMTGYQEVITDPSYYGQLLTFTYPEIGNTGINCEDSESN

SEQ ID NO: 198630 - protein, 270 aa, Unknown
  Bacterial polypetide isolated from the Sargasso Sea
DEDEESDKIWAKGLIIRDLPLLASNFRNQASLSQYLSSRNILGIADIDTRKLTRILRDKGAQNGCLMAGDNLDENKALELARAFPGLSGMDLAKEVSVKKSYQWTEGSWNLGQGFAKPDNSAFHVVAYDFGVKRNILRMLADRGCRLTVVPAQTPAEEVLALNPDGIFLSNGPGDPAPCDYAIKAIETFLTTDIPVFGICLGHQLLALASGAKTVKMTVGHHGGNHPGENLDTNKVLITAQNHGFAVEEATLPANLRATHKSLFDGTLQG

SEQ ID NO: 198631 - protein, 292 aa, Unknown
  Bacterial polypetide isolated from the Sargasso Sea
IISDPSYAGQIINFTFPHIGNVGTNNEDIESDKIWTRGVIFNSEITNPSNYRSLKHLDEWLKKNKIVGITGLDTRSLTNFIRDKGAPRGTISNNKSGKFNIKKLIKKTTNWPGLNGMDLAKEVSTIKNYNWKGLKTWNKEQGYKKNNKKKYRVIAIDYGIKKNILRYFSNFSCDVRVVSCKENVQNILKYKPHGIFLSNGPGDPAATGKYAIPIVQQLIKSGLPVFGICLGHQILALALNAKTRKMKLGHRGANHPVKNLISKKVEITSQNHGFEVLKESLPKNMQLHTNSF

SEQ ID NO: 198632 - protein, 149 aa, Unknown
  Bacterial polypetide isolated from the Sargasso Sea
IFLSNGPGDPAATGKYAINIIQNLIKKNIPIFGICLGHQILALALGGKTKKMKLGHRGANHPVKNLIHDNVEITSQNHGFEVVKETLPKDIEVTHKSLFDNSIEGIKLKNKPVFSVQYHPESNPGPQDSVYLFKEFINNMKKNAKKKRS

SEQ ID NO: 198633 - protein, 178 aa, Unknown
  Bacterial polypetide isolated from the Sargasso Sea
GKRAIFNQLSERFDLEIVPCTESAEAVLDKNPNLVFLSNGPGDPSALDYVISNIKKILGKIPIVGICLGHQILAQVLGGKTYKLKFGHHGVNHPVRKTSGRQVDITSQNHSFSVDLNTLPKNVEVTHLNLNDMTCEGLISEELRVCSVQYHPEASPGPHDARKLFDYFFDFCLPDYKP

SEQ ID NO: 198634 - protein, 140 aa, Unknown
  Bacterial polypetide isolated from the Sargasso Sea
PAATGKYAIEILNKLIKKNLPIFGICLGHQILALALGGKTKKMKLGHRGANHPVKNLILDKVEITSQNHGFVVVKENLPKKIEVTHKSLFDNTIEGIRIKNKPIFSVQYHPESNPGPQDSVYLFQDFINNMKKNAKKKRY

SEQ ID NO: 198635 - protein, 207 aa, Unknown
  Bacterial polypetide isolated from the Sargasso Sea
LKKNTGFEKNKKRKFNIVAIDFGIKKNILRYFSNYDCEVRVVSCKKKSDEIFKLKPHGVFLSNGPGDPAATGKYAISVVKNLIRGGMPLFGICLGHQILALALDAKTRKMKLGHRGANHPVKNLITNRVEITSQNHGFEVIKESLKKNTEITHLSLFDNSIEGIRLKNKPVFSVQYHPEANPGPQDSKYLFNHFIKEVKKYAKKKRY

SEQ ID NO: 198636 - protein, 167 aa, Unknown
  Bacterial polypetide isolated from the Sargasso Sea
MDRYLILEDGTMFEGLAFGGNAENSGEMVFNTTMTGYQEVLTDPSYSGQIVNMTYPLIGNYGINLSDSESSKIQVSGMLVRELCDTPSHSLSVDTLDNFMKHQDIPGIRNLDTRAIARKIRTSGVMRGLLTNSADLSAGLHTLENMDAYENINFVNGVSTDEITVMP

SEQ ID NO: 198637 - protein, 227 aa, Unknown
  Bacterial polypetide isolated from the Sargasso Sea
LRFSKQVSTKKNYLWQDYKTWKKENGYLKNKKKLLHVVAIDYGIKKNILRYFSDFNCKVTIVPCKTTAKDILKLNPDGIFLSNGPGDPAATGKYAIPIIQNLIKKKLPLFGICLGHQMLALALGAKTEKMKLGHRGANHPVKNLIEGNVEITSQNHGFEVIKKGLPKNIRVTHQSLFDNSIEGIELKNKPVFSVQYHPESNPGPQDSVYLFNKFVKSMKKNAKKKRY

SEQ ID NO: 198638 - protein, 297 aa, Unknown
  Bacterial polypetide isolated from the Sargasso Sea
KNSQINTGILVLENKKVFMGVGIGYQGEATGEVCFNTSLTGYQEIISDPSYAGQIINFTFPHIGNVGTNEEDHESDKIWARGVIFNSEITSPSNYRSFLHLDSWLKKNKIVGITGLDTRSLTNFIRDKGAPKGTISFLRNGKFNIKKLTNTTTKWSGLKNLDLAKTVTTQKSYVWKGLKTWKKNVGYKKNNKNSFHVVAIDYGIKKNILRYFSDFNCKVTVVSCKTSAKKILSLKPHGVFLSNGPGDPAATGEYALGILKKIIKKNLPIFGICLGHQILALASGGKTKKMKLGHRGA

SEQ ID NO: 198639 - protein, 263 aa, Unknown
  Bacterial polypetide isolated from the Sargasso Sea
VGTNKEDFESDKIWTRGVIFNSEITSPSNYRSFQHLDAWLKKNKIVGITGLDTRSLTNFIRDKGAPKGTIAFLKNGKFNISKLTNLTIKWNGLKNLDLAEKVSTTKNYIWKGLKTWKKETGYKKNNKNFFHVVAIDYGIKKNILRYFSDFNCKVTVVSCKTSAEKILNLKPNGIFLSNGPGDPAATGKYAIGIIREFIKKNLPIFGICLGHQILALALGGKTKKMKLGHRGANHPVKNLIDDNVEITSQNHGFEVVKENLPKN

SEQ ID NO: 198640 - protein, 258 aa, Unknown
  Bacterial polypetide isolated from the Sargasso Sea
ILKKIKLVGIKEIDTRSLTRHIRDRGAMNGIISSNDLNIQSLEKKLKKSPDMNGLDLAKDVTTQKKYKWPGKGEYKVAVIDFGIKKNILRLLSNAGCELTVFPASIKAEDIFSFEPDGVFLSNGPGDPLAVTYGIETVKKLLGKVPLFGICLGHQILALALGASTFKLKFGHRGINHPVRNNEKNTVEITSQNHGFAVDLDSLPPNVISTHINLNDNTSGGIRCTDIPAFSVQYHPESSPGPHDSRYLFNEFIEMMNA

SEQ ID NO: 198641 - protein, 273 aa, Unknown
  Bacterial polypetide isolated from the Sargasso Sea
NPEDNEADKAWVKGVIFNSNVTEPSNYRSIKKLDEWLKKRKIVGIVGLDTRVITNYIRDKGAPKGIIQFSRKGKHNFKELLKKTKSWSGLLGLDLAKKVTCKTSYKWASLKSWDKDKGYKKNKRNKYKVIAVDYGIKKNQLRCFSDLNCAVTVVPANYPAEKIIKLNPDGVFLSNGPGDPAATGKYAIPIIKKLINNKLPIFGICLGHQLLSLALGAKTKKMSLGHRGANHPVKDLTTNKVEITSQNHGFEVDSKSIPTSVKITHKSLFDGSI

SEQ ID NO: 198642 - protein, 298 aa, Unknown
  Bacterial polypetide isolated from the Sargasso Sea
KAAVGELCFNTSQTGYQEALSDPSYTKQIITFTFPHVGIVGTNQEDQESKKIYADGCVINQPLSEYSNWRAENDLNSYFLKNKIPCIFGIDTRYLTKKLSIEGAKKAAIIHFGEDENKIEKLKTQINAWKGLQNLDLAGIVSTEQNYNWKKGIWKSDKSIKGQFKYNVTCLDFGIKNNILRNLNEFNLNPTVLNLFSSYEAIIETNPSGIFLSNGPGDPYATGSKIVDVIKKLIDDNIPIFGICLGHQILGLALNAKTKKMFQGHRGSNHPVKNLTTGIVEITSQNHGFEVDRDSLAK

SEQ ID NO: 198643 - protein, 133 aa, Unknown
  Bacterial polypetide isolated from the Sargasso Sea
AINIIKKLIKSNYPIFGICLGHQILALALNAKTKKMKLGHRGANHPVKNLINNSVEITSQNHGFVVIEKSLPKNIQITHKSLFDDTIEGIRLKNKPVFSVQYHPEANPGPQDSQYLFNNFIQDVKKYAKKKRH

SEQ ID NO: 198644 - protein, 214 aa, Unknown
  Bacterial polypetide isolated from the Sargasso Sea
SWQDYKTWKKENGYLKNKKKILHVVAIDYGIKKNILRYFSDFNCKVTIVPCNTSSIDILKLNPDGIFLSNGPGDPAATGKYAIPIIQELIKKKLPLFGICLGHQILALALGAKTEKMKLGHRGANHPVKNLVEGKVEITSQNHGFEVVKKGMPENIRVTHQSLFDNSIEGIELKNKPVFSVQYHPESNPGPQDSVYLFDKFVKCMKKNAKKKRY

SEQ ID NO: 198645 - protein, 259 aa, Unknown
  Bacterial polypetide isolated from the Sargasso Sea
MVTTTSHIGNYGIKENESQSEKIYISGLICKNFSYFNSRVSSNSVDSWFNKQKLIAISDVDTRALVRYIRENGAMNAAITTDINDIDKLKKRLINSPEMEGLELASKVSTKKAYFLGNSKARYRLAVLDLGVKKNILSNFIDRGFYIKVFPYDTNFDELIKFKPNGFFLSNGPGDPKPLSKVIETTKEIIKNNYPLFGICLGHQVIALANGINTYKMFNGHRGINHPVLNLKTIKGEITSQNHGFAVDFKEAKKNKKVL

SEQ ID NO: 198646 - protein, 290 aa, Unknown
  Bacterial polypetide isolated from the Sargasso Sea
TGYQEIISDPSYAGQIINFTFPHIGNVGTNKEDFESDKIWTKGVIFNSEITSPSNYRSFQHLNAWLRKNKIVGITGLDTRSLTNFIRDRGAPKGTISYSNKGRFNINKLTNSTIKWSGLKNLDLAEKVTTQKNYIWKGFKTWKKEYGYRKNNRNSLHVVAIDYGIKKNILRYFSDFRCKVTVVSCKTTSKKILALKPDGVFLSNGPGDPAATGKYAIQIIKDLVQKKIPLFGICLGHQILALSLGGKTKKMKLGHRGANHPVKNLINDNVEITSQNHGFEVVKENLPKNI

SEQ ID NO: 198647 - protein, 279 aa, Unknown
  Bacterial polypetide isolated from the Sargasso Sea
YRRSLLHTSLTGYQEIISDPSYAGQIINFTFPHIGNVGTNKEDHESDKIWTKGVIFNTEITNPSNYRSLKKLDSWLKKNKIVGITGLDTRSLTNFIRDKGAPKGTISNNNKGIFNLKKLTNNSIKWPGLNGLDLAKTVTTKKKYIWKGLKTWKKDKGFEKNKKKKYKIIAIDYGIKKNILRYFSNFNCEVIVVPCDLGAEEIIKLKPDGIFLSNGPGDPAATGKYAINIIQKLIKTNIPIFGICLGHQLLALALNGKTKKMKLGHRGANHPVKNLINSK

SEQ ID NO: 198648 - protein, 225 aa, Unknown
  Bacterial polypetide isolated from the Sargasso Sea
WSGLNNLDLAKEVSCKKPFTLKSKNKKNLLRIVAIDYGIKHNIINSLINLNAEVIIVPATSNTEMIVSYRPDGIFLSNGPGDPKATGKYAIPIIKELIEMKIPMFGICLGHQLISLALGAKTKKMFQGHRGANHPVKNLITNKVEITSQNHGFVVEEKSVPKSVLITHKSLFDGSVEGIKHKNKKVFSVQYHPEASPGPHDSHYLFEDFISSIKDHLKHGKKKRY

SEQ ID NO: 198649 - protein, 247 aa, Unknown
  Bacterial polypetide isolated from the Sargasso Sea
MTKSALLVLEDGTVFRGTAIGAEGVSVGEVVFNTSMTGYQEILTDPSYAEQIVTLTYPHIGNTGTNLEDEESGQIWARGLIIRDLPLLASNFRNQLSLSQYLTQHNILGIADIDTRKLTRILREKGAQNGCLMAGDNLDEAKALELAKGFPGLSGMDLAKEVTVKAPYQWTEGSWQLGEGHRTPDNAKFHVVAYDYGVKRNILRMLVDRGCKLTVVPAQTPASDVLAMNPDGIFLSNGPGDPAPCTY

SEQ ID NO: 198650 - protein, 324 aa, Unknown
  Bacterial polypetide isolated from the Sargasso Sea
YAGQIINFTFPHIGNVGTNKEDVESDKVWTKGVIFNSEITSPSNYRAFLHLDAWLKTNKIVGITGLDTRNLTNFIRDKGAPKGTIAYSKNGKFNVNKLTNSTIKWSGLKNLDLAETVTTSKNYIWKGFQTWKKEIGYKKNTKNLFHVVAIDYGIKKNILRYFSDFKCKVTVVSCKTSAEKILNLKPNGIFLSNGPGDPAATGKYAIEILNELIKKNLPIFGICLGHQILALALGGKTKKMKLGHRGANHPVKNLVHDKVEITSQNHGFVVVEETLPKKIEVTHKSLFDNTIEGIRLKNKPIFSVQYHPESKPGHKIASTSFKNL

SEQ ID NO: 198651 - protein, 267 aa, Unknown
  Bacterial polypetide isolated from the Sargasso Sea
LTNFIRDKGAPKGTISYLKKGRFNINKLTNTTVKWSGLKNLDLAEVVSTKKNYIWKGFKTWKKKTGYKKNNKDLFHVVAIDYGIKKNILRYFSDFNCKVTVVSCKTPAHKILGLRPNGVFLSNGPGDPAATGRYAIGIIKELIKKNLPIFGICLGHQILALALGGKTKKMKLGHRGANHPVKNLINDNVEITSQNHGFEVVKQTLPKSIEVTHKSLFDNSIEGIRLKNKPVFSVQYHPESNPGPQDSVYLFQEFINNMKKNAKKKRS

SEQ ID NO: 198652 - protein, 195 aa, Unknown
  Bacterial polypetide isolated from the Sargasso Sea
RKKIFKEFPIVCIDFGIKHNILRSLKKHNFKPTVINASCSVEEVMKNKPKGIFLSNGPGDPYATSKKVLSTVKELINLQIPIFGICLGHQILSIAFDGKTKKMFQGHRGANHPVKNLLNNKVEITSQNHGFEVDRNSFSDQIIETHVSLFDGTNEGFKHKSLPVFSVQYHPEASPGPHDSSYLFREFYNLVNKHA

SEQ ID NO: 198653 - protein, 176 aa, Unknown
  Bacterial polypetide isolated from the Sargasso Sea
RNLNEFNLNPTVLNLFSSYEEIVNTNPAGIFLSNGPGDPYATGSKIVEVIKKLIDDNIPIFGICLGHQILGLALNAKTKKMFQGHRGSNHPVKNLTTGIVEITSQNHGFEVDRDSFSKDIIETHVSLFDGTNEGLRHKHLPVFSVQYHPEASPGPHDSHYLFEEFYKLIEKNAKKN

SEQ ID NO: 198654 - protein, 183 aa, Unknown
  Bacterial polypetide isolated from the Sargasso Sea
WNKQNILRNFHEFNLKPTILNLSSSYEEIISTNPDGIFLSNGPGDPFATSQEIIGVLKKLIEKQIPIFGICLGHQILSLALGAKTKKMFQGHRGSNHPVKNLINNFVEITSQNHGFEVDRNTFSNDIIETHISLFDGTNEGLRHKNLPVFSVQYHPEASPGPHDSHYLFSDFYNLITKHAKKN

SEQ ID NO: 198655 - protein, 309 aa, Unknown
  Bacterial polypetide isolated from the Sargasso Sea
MQFNHQFPTGILVLDNKLVFKGIGLGYQGTSTGEVCFNTSLTGYQEIISDPSYAGQIINFTFPHIGNVGTNNEDFESDKIWTKGVIFNSEITSPSNYRALKTLDEWLKKNQIVGLTGLDTRSLTNFIRDKGAPKGTITNNKKGKFNINKLINMSVKWPGLNGLDLANEVSTKKTYIWKGFRTWKKDIGYKKNTKKKFKIIAVDYGIKKNILRYFSDYDCEVKVVSCKLAANEIVKLKPDGIFLSNGPGDPAATGKYAIDTVQKLIKLNYPIFGICLGHQILALALNAKTKKMKLGHRGANHPVKNLINN

SEQ ID NO: 198656 - protein, 293 aa, Unknown
  Bacterial polypetide isolated from the Sargasso Sea
LPIITFTFPHIGNVGLNSDDNEGSDKPHISGAIFRSLITDPSNWRSEVDLDKWLKDNSIVGIYGIDTRALTNLIREKGLINGTIVHDKNGIQEFVSYLEDTKMFRGVNDQDLAKIVTCKEKISWNEKEINIYNDRIERKRINAHVVVIDFGVKKNILRCLSSRFEKISIVPCTSSYNEIINLEPDGIFLSNGPGDPSATGIYAIPVIKQLIELNLPIFGICLGHQLLALSLGLKTYKMHQGHHGANHPVKNNHDSSVNITSMNHGFAVKSDNLPQDVIETHTSLFDGSNCGIE

SEQ ID NO: 198657 - protein, 243 aa, Unknown
  Bacterial polypetide isolated from the Sargasso Sea
MKGRLIFEDGSHFDGIKIGSSNMEIGEVCFNTSMTGYQEIITDPSYAGQIINFTFPHIGNVGTNLEDDESRKPFAKGIIINCDISDPSNYRSILHLDAWLKKNNVPGICNIDTRLITNRIRSKGAPKGGIIEGPINNKKTALCLKEIKKWKGLKGLDLAIDVSRKDIKIFKAKSKSNLKVVAVDYGIKQNILNCLLNLNLEVILVPAKTSAEKILEYNPNGVFLSNGPGDPKATGKYAIPILK

SEQ ID NO: 198658 - protein, 159 aa, Unknown
  Bacterial polypetide isolated from the Sargasso Sea
MIYPYKKNAKLVLSNGIVFPGFYFGANGTAFGEIVFNTGMTGYQEVITDPSYYGQILTFTYPEIGNTGINFEDSESSTNVKGIIVRNYSSNNSNWRSKKDFNQWLVEKNIIGLHGIDTRALVKILRSNGSMNGVITSVDKTLESCLKIIHDMPKMEGLN

SEQ ID NO: 198659 - protein, 156 aa, Unknown
  Bacterial polypetide isolated from the Sargasso Sea
MNLKGLLISNGPGDPRSLLTVIDTVQNLIGKLPIFGICLGHQILALACGLKVKKMQFGHHGSNHPVEIEGIKKALITAQNHGFSIEEFEDGFEHENFGNISVFARNLNDGTNEGISLWDSMAYSVQFHPESGPGTTDGLQIFNPFFEMIENNYAKK

SEQ ID NO: 198660 - protein, 186 aa, Unknown
  Bacterial polypetide isolated from the Sargasso Sea
YGIKKNILRYFSDFKCEVNIVSCKTSAEKILNMKPDGIFLSNGPGDPAATGKYAIRIIKTLIKKGMPIFGICLGHQILALALGAKTKKMKLGHRGANHPVKNLINGNVEITSQNHGFEIVKESLPKNIEITHKSLFDNCIEGIRLKNKPVFSVQYHPESNPGPQDSVYLFQEFINNIKKNAKKKRS

SEQ ID NO: 198661 - protein, 162 aa, Unknown
  Bacterial polypetide isolated from the Sargasso Sea
ESTEDLIKFKPHGIFLSNGPGDPAATGKYSIPIVQNLIKSGLPVFGICLGHQILALALNAKTKKMRIGHRGANHPVKNLISNKVEITSQNHGFEVLKESLPKNVEITHKSLFDNSIEGIKLKNKPVFSVQYHPESNPGPQDSHYLFNDFINEVKKYAKKKRY

SEQ ID NO: 198662 - protein, 228 aa, Unknown
  Bacterial polypetide isolated from the Sargasso Sea
KLDLAEKVSTKKSYVWKGLKTWRKEDGYLKNRKDSFHVIAIDYGVKKNILRYFSDFNCKVTVVSCKTKAADIINLKPNGIFLSNGPGDPAATGKYAIPIIQELIQKNFPMFGICLGHQILALALGAKTKKMSLGHRGANHPVKNLIKGNVEITSQNHGFEVIKSNLPRNIQITHQSLFDKSIEGIKLKNKPVYSVQYHPESNPGPQDSVYLFEEFIISMKKNAKKKRY

SEQ ID NO: 198663 - protein, 232 aa, Unknown
  Bacterial polypetide isolated from the Sargasso Sea
MINPYKKNAKLILSNGFVFPGFSFGASGTAVGEIVFNTGMTGYQEVITDPSYYGQILTFTYPEIGNTGINFEDSESSINVKGIIVRNYSSNNSNWRSIKNFNQWLVEKNIIGLYGIDTRALVKILRSNGSMNGVLTSEEKSLENCLKLIHETPKMEGLNLSENVSTKQQYLWQKPTETDFDVRKKYLERLKKLKIVAIDFGIKKSILNRLVSHGCEILVLPSRSSFKDVLAN

SEQ ID NO: 198664 - protein, 131 aa, Unknown
  Bacterial polypetide isolated from the Sargasso Sea
YAIPVIKQLIELNLPIFGICLGHQLLALSLGLKTYKMHQGHHGANHPVKNNHDSSVNITSMNHGFAVKSDNLPQDVIKTHTSLFDGSNCGIEVINKPIFSVQHHPEASPGPNDSYYLFDKFLNNIEKYINA

SEQ ID NO: 198665 - protein, 215 aa, Unknown
  Bacterial polypetide isolated from the Sargasso Sea
KKVPSMKNLELASYVTTKKSYFYGNKSSKKKVAVLDLGCKKSILMNFESRNIYCKVFPAKTKSKEILKWNPDGFFISNGPGDPASMGYAVNTVGDIINKNIPTFGICLGHQILARACGLATYKLHHGHRGINHPVKNILTGKSEVTSQNHGFSVKMDDVKKIKDIELTHINLNDNTVEGIRLKNKNAFSVQYHPESSPGPHDSRYLFDDFVKMMN

SEQ ID NO: 198666 - protein, 223 aa, Unknown
  Bacterial polypetide isolated from the Sargasso Sea
NDFVGLAGLDLAKKVTTESSYKWKEGTWRGSSGESDFRVAVLDYGIKKNILRILVDQGYELKVFPAKTSCQEILNFKPNGVFLSNGPGDPEPCIYAIETIKELIQINMPIFGICLGHQLLAIALGGKTTKMKFGHHGANHPVQDLKTSKVSVSSQNHGFTVEQNSLPANVEITHKSLFDGTIQGIQHSSKPFFSFQGHPEASPGPHDLAYLFSTFDKNMSINA

SEQ ID NO: 198667 - protein, 232 aa, Unknown
  Bacterial polypetide isolated from the Sargasso Sea
KIIEWKGLENLDLATIVSTDNKYETNESIWDQRDNKYNQNNNGKFNIACLDFGIKKNILRNLNNNFFLPKILPANSSIEEILDTNPKGVFLSNGPGDPFATGKIVIPTIKKIIDMKIPIFGICLGHQILSLTLGAKTKKMFQGHRGANHPVKNLKTSQVEITSQNHGFEVDKNTLPSNVIETHVSLFDGTNEGIEHKELPIFSVQYHPEASPGPHDSHYLFKKFYKEVEKYA

SEQ ID NO: 198668 - protein, 97 aa, Unknown
  Bacterial polypetide isolated from the Sargasso Sea
MINPYKKNAKLVLSNGIVFPGFFFGASGTAIGEIVFNTGMTGYQEVITDPSYFGQILTFTYPEIGNTGINFEDSESNINVKGIIVRNFSSNSSNGDL

SEQ ID NO: 198669 - protein, 129 aa, Unknown
  Bacterial polypetide isolated from the Sargasso Sea
MPDSPSDKAHLVLADGTVLTGVGFGHRGTSIGEVVFNTGMTGYQEVLTDPSYSGQLVSFTYPELGNTGVNADDQEADRPHARGVIARQVAPFPSSWRCEQPLETWMQSHQLVGISGLDTRALVRHLREV

SEQ ID NO: 198670 - protein, 180 aa, Unknown
  Bacterial polypetide isolated from the Sargasso Sea
ILRYFSDFKCKVTVVSCKTSAEKILDLNPNGIFLSNGPGDPAATGKYAIEILNELINKNLPIFGICLGHQILALALGGKTKKMKLGHRGANHPVKNLVHDKVEITSQNHGFVVVEETLPKKIEVTHKSLFDNTIEGIRLKNKPIFSVQYHPESNPGPQDSVYLFQEFINNMKKNAKKKRY

SEQ ID NO: 198671 - protein, 328 aa, Unknown
  Bacterial polypetide isolated from the Sargasso Sea
VYFNTAMTGYQEIITDPSYDGQMITFTYPHIGNTGINSADYESKKIFARGLIVRDFCTFPSNWRSEQSLDDYLKLNKTICISNIDTRFLTKKIRDEGCKVGVIYPSEKITDKEAMIQIKDFGSISDKNLIKNVATNSKFIIGEKKNKSQKKIAAVDFGVKENILRIFKDMGAVIEVFPPDCTAEEVLNSKPDGIFFSNGPGDPEVLSHAVSQIKLLMDENIPMFGICLGHQLMSLAYGLKIMKMPFGHHGANHPVHDLETNEVFITSQNHNFAVEEPIDNDSIKITHKSLFDNTIQGLAHKEKPFYSIQCHPEASPGPKEFEVLFKKF

SEQ ID NO: 198672 - protein, 277 aa, Unknown
  Bacterial polypetide isolated from the Sargasso Sea
MSKEKAILALADGTIFEGISIGASGKVNGEIVFNTSMTGYQEILTDPSYAKQIVTLTYPHIGNTGTNNVDTESDKIWCSGLVIRSLSQAESSWRNTETLSDHLIRNNIQGISDIDTRKLTRIIREKGAQSASIFTGNSIDSKNAIDLAKDFEGLAGLDLAKEVTTESSYDWKEGTWRGSTGESDFRVAVLDFGIKKNILRILVDQGYELKIFPAKTSCQEILDFKPNGVFLSNGPGDPEPCIYAIETIKELIQISMPIFGICLGHQLLAIALGGKTS

SEQ ID NO: 198673 - protein, 251 aa, Unknown
  Bacterial polypetide isolated from the Sargasso Sea
NNKNGNFNIKKLINISTKWPGLNGLDLAKDVTTNKTYTWKGLKTWEKGKGFKKNKKKSLRIIAIDYGIKKNILRYFSNYNCEVKVVSCKQTAEEILKLNPNGIFLSNGPGDPAATGKYAIQTVQKLIRSDLPVFGICLGHQILALALNGKTKKMKLGHRGANHPVKNLNNKKVEITSQNHGFEVVKESLSKNIQITHKSLFDNSIEGIKLKNKPVFSVQYHPESNPGPQDSHYLFNDFIKDVKKYAKKKRH

SEQ ID NO: 198674 - protein, 286 aa, Unknown
  Bacterial polypetide isolated from the Sargasso Sea
MPRLKKNKIVGITGLDTRSLTNFIRDKGAPKGTIAYSKNGKFNVNKLTNSTIKWSGLKNLDLAETVTTSKNYIWKGFQTWKKEIGYKKNTKNLFHVVAIDYGIKKNILRYFSDFKCKVTVVSCKTSAEKILDLKPNGIFLSNGPGDPAATGKYAIEILNKLIKKNLPIFGICLGHQILALALGGKTKKMKLGHRGANHPVKNLVHDKVEITSQNHGFVVVEETLPKKIEVTHKSLFDNTIEGIRLKNKPIFSVQYHPESNPGPQDSVYLFQEFINNMKKNAKKKRY

SEQ ID NO: 198675 - protein, 237 aa, Unknown
  Bacterial polypetide isolated from the Sargasso Sea
MKKDRIIARSKPILGQLILEDGTSFEGLKIGSDINSIGEVCFNTSMTGYQEIITDPSYAGQIINFTFPHIGNVGTNLEDNESSISYAKGIIINCDISDPSNFRSIQHLDKWLKKKGIPGLCNIDTRSITNRIRSKGAPKGGIVKKLINKRHEKKFLSDVKKWQGLNNLDLAIEVTRKKIQKFKSKSKSTLNIVAIDYGMKQNILNCLLELNMNVIVVPANTTSDEILEYNPNGIFLS

SEQ ID NO: 198676 - protein, 128 aa, Unknown
  Bacterial polypetide isolated from the Sargasso Sea
MEVALTKSALLVLEDGTVFTGTAIGADGLSVGEVVFNTSMTGYQEILTDPSYSRQIVTLTYPHIGNTGTNNEDVESNGVHACGLIIRDLPLVASSFRNQQTLSDYLKANNVVGIADIDTRKLTRILRE

SEQ ID NO: 198677 - protein, 101 aa, Unknown
  Bacterial polypetide isolated from the Sargasso Sea
QKKMKLGHRGANHPVKNLIHDNVEITSQNHGFEVVKETLPKSIEVTHKSLFDGSIEGIRLKNKPVFSVQYHPESNPGPQDSIYLFQEFIHNIKRNAKKKRH

SEQ ID NO: 198678 - protein, 289 aa, Unknown
  Bacterial polypetide isolated from the Sargasso Sea
MNKDKAILALADGTIFEGKSIGAKGEVNGEIVFNTSMTGYQEILTDPSYAKQIVTLTYPHIGNTGTNLEDEESNEIWCSGLVVRSVSQIESNWRNKETLSQYLIRNNIQGISDIDTRKLTRIIRNKGAQSASIFAGENISHKAAVGLAKQFDGLAGMDLAKEVSVSSSYEWTEGTWRGNKLESNFQIVVLDFGIKKNILRILADRGYKIKVLPAKASYEEVMESKPDGVFLSNGPGDPEPCTYAIETITKLAERDMPLFGICLGHQLLALSLGGKTSKMKFGHPWRKSS

SEQ ID NO: 198679 - protein, 312 aa, Unknown
  Bacterial polypetide isolated from the Sargasso Sea
MKSQARFKLHGFIIKEETVFPSNWRSTDSIGNYLMKNNITGIKNVDTRAIVSHIRDNGAMNGIISSLDYDRNSLNSKIQEHPPMDGLDLAKEVSCSKKYLYNANKKFKYNVAVIDFGIKKNILHILNDIGCRLSVFPADVTKEEIIDEEPDGIFLSNGPGDPSVVTYAINTIKSLLGYVPMFGICLGHQILALALGASTFKLKFGHRGINHPVKNIQNGKIEITSQNHGFAVEIHSLPKNINTTHINLNDNTLAGFECKNYDVFSVQYHPESSPGSHDSRYLFDQFIQLMRNAKRTDIESILIIGAGPIYIG

SEQ ID NO: 198680 - protein, 124 aa, Unknown
  Bacterial polypetide isolated from the Sargasso Sea
KNNIPVFGIFLGHQLLALALGARTKKMKLGHRGANHPVKNLRKGTVEITSQNHGFEVVKNNLPKNVMITHQSLFDNSIEGIQLKNKPVFSVQYHPESNPGPHDSVYLFEQFIMSVKKNAKKKRY

SEQ ID NO: 198681 - protein, 109 aa, Unknown
  Bacterial polypetide isolated from the Sargasso Sea
LALALKAKTKKMKLGHRGANHPVKNLINSKVEITSQNHGFEVIKESLPKNVEITHKSLFDNSVEGIKLKNKPVFSVQYHPESNPGPQDSHYLFNQFINLVKKNAKKKRY

SEQ ID NO: 198682 - protein, 266 aa, Unknown
  Bacterial polypetide isolated from the Sargasso Sea
MINPYKKNAKLILNNGIVFHGFSFGAFGTAVGEIVFNTGMTGYQEVITDPSYYGQILTFTYPEIGNTGINLEDSESSISVKGLIVRNYSSNNSNWRSIKNFNQWLVEKNIVGLYGIDTRALVKILRSNGSMNGVLTSEDKTVESCLKIIHETPKMEGLNLSKEVSTEQKYLWQNTTETVFDIRKKYSEKNKKLKIVAIDFGIKKSILNRLVSHGCEIIVLPSSSTLKDVLSNKPDGIFFSNGPGDPSSVTEGICLAKSLIEYGDIP

SEQ ID NO: 198683 - protein, 124 aa, Unknown
  Bacterial polypetide isolated from the Sargasso Sea
LKELIDLRIPIFGICLGHQLISLALGAKTKKMYQGHRGANQPVKNLINNTVEITSQNHGFEVERSSLPNQVEETHVSLFDGSNEGIRHKTHPVFSVQYHPEASPGPHDSAYLFEEFYKLVKNHA

SEQ ID NO: 198684 - protein, 274 aa, Unknown
  Bacterial polypetide isolated from the Sargasso Sea
TGLDTRSLTNFIRDKGAPKGTISNNNKGIFNLKKLTNNSIKWPGLNGLDLAKVVTTKKKYIWRGFKTWKKEKGFEKNKKKKYKIIAIDYGIKKNILRYFSNFNCEVIVVPCKLEAEDIIRLKPDGIFLSNGPGDPAATGKYAISIIQKLIKTNIPIFGICLGHQLLALALKAKTKKMKLGHRGANHPVKNLINSRVEITSQNHGFEVIEESLPKNVEMTHKSLFDNSVEGIKLKNKPIFSVQYHPESNPGPQDSHYLFNQFINLVKKNAKKKRY

SEQ ID NO: 198685 - protein, 315 aa, Unknown
  Bacterial polypetide isolated from the Sargasso Sea
VGYQEIITDPSYFDQIVVMTMPHVGNYGINPIDEESEKIQAAGLVIKEETPYPSSWRSKQSLDDYLISQNIVSIKSIDTRALTRHIRDRGAMNGIISSIGKETRALEEKLKKHPKMEGLDLAKKVTTKKIYKIKSTDSRFRVAVVDFGIKKNILKLLVNEGCDLTVFPSNVSSNELLNSRPDGIFLSNGPGDPAALNYAIKTVHKLLGTVPIFGICLGHQILGLALGAKTYKLKFGHRGINHPVKNIKTGLVEITSQNHGFALDLNTFPSNVISTYINLNDNTSAGIECKEYNAFSVQYHPESNPGPHDSRYLFG

SEQ ID NO: 198686 - protein, 171 aa, Unknown
  Bacterial polypetide isolated from the Sargasso Sea
RCLASAGCEVTVLPASSSADDVLAHKPDGIFLSNGPGDPAATGKYAVPVIQHLLKNTDLPIFGICLGHQMLALALGAKTIKMNHGHHGANHPVKELSSGKVEITSMNHGFAVDAQTLPDGVEETHVSLFDGSNCGIKMSDRPIFSVQHHPEASPGPQDSFYLFNEFVAAMK

SEQ ID NO: 198687 - protein, 280 aa, Unknown
  Bacterial polypetide isolated from the Sargasso Sea
MGKSKLHQSYIEIIKKNNLSAVLILETGEVFHGSGYGKPGIKMGEVCFNTSMTGYQEIITDPSYNGQIINFTFPHIGNIGTNQEDNEAKKSYASGMITRERPTGSSNWRSNQDLNDWLFEKNITGISGLDTRQLTKIIKDKKAPMGLISYNLNKQFNIVSLKQKLLSHPKIKGSNLVPVVSSNKSFHWDKSTSWSKNINSNKNKIFHVLAYDFGIKHNILRCLKDLNFEITVVPYNFDFEELKNLNPDGIFLSNGPGDPFETYKSIRKNFDKLLNLNLPI

SEQ ID NO: 198688 - protein, 125 aa, Unknown
  Bacterial polypetide isolated from the Sargasso Sea
IKNNLPIFGICLGHQILALALGGKTKKMKLGHRGANHPVKNLVHDKVEITSQNHGFVVVEETLPKKIEVTHKSLFDNTIEGIKLKNKPIFSVQYHPESNPGPQDSVYLFQEFINNMKKNAKKKRY

SEQ ID NO: 198689 - protein, 125 aa, Unknown
  Bacterial polypetide isolated from the Sargasso Sea
IKSNLPVFGICLGHQILALALNAKTKKMKLGHRGANHPVKNLISKKVEITSQNHGFEVVKNSLPKNVEITHKSLFDSCIEGIKLKNKPIFSVQYHPESNPGPQDSHYLFNDFIKEIKKYAKKKRY

SEQ ID NO: 198690 - protein, 239 aa, Unknown
  Bacterial polypetide isolated from the Sargasso Sea
AALSDEELVARAKAYDIVGKDLISEVTCGEPYEWKDTTGEWEFSNEAKANKDSFNVVVYDFGVKHNILRRLASFGCKLTVVPASYPADKVLAMNPDGILFSNGPGDPSAVPYAVENAKQILGKLPVFGICMGHQVLGQAFGGSTFKLKFGHHGGNHPVRGPDGAVEISSQNHNFAVDPKTLPAGVQVSHVNLNDGTCAGMVWPEQRAMTIQYHPEASPGPHDSDRCFADFVQMMRDSKK

SEQ ID NO: 198691 - protein, 146 aa, Unknown
  Bacterial polypetide isolated from the Sargasso Sea
SNGPGDPAATGKYAIEIIKDLIKKKLPIFGICLGHQILALALGGKTKKMKLGHRGANHPVKNLIHDNVEITSQNHGFEVVKETLPKNIEVTHKSLFDNSIEGIKLKNKPVFSVQYHPESNPGPQDSVYLFQEFINNMKKNAKKKRY

SEQ ID NO: 198692 - protein, 126 aa, Unknown
  Bacterial polypetide isolated from the Sargasso Sea
MRGYVFLTDDALLALEDGSLFHGVSFGSDGETTGEVVFNTAMTGYQEILTDPSYYKQIVTLTHPHIGNVGTNPEDEESDSVYVSGLVIRDLPEVISSWRANDNLSNYLKNHNIPAIAGIDTRQLTR

SEQ ID NO: 198693 - protein, 232 aa, Unknown
  Bacterial polypetide isolated from the Sargasso Sea
MGKSSILYLENGKMFNGSGFGFHGETIGEIVFNTSMTGYQEILTDPSYHSQVVLMTYPHIGNYGINSKDNESNECYVKGFIVREFCPYPSNFISEMTLEEYLIQNKVVGISGIDTRELTRIVRNEGAQRCIISSKQEDVGKLKRKLEMSPEMKGNDLTLKATCKEIYRIDRQRNKKNIFVYDFGCKKNILNILHEELNINLIVGPCDTDVDTVKSLNPDGILLSNGPGDPSA

SEQ ID NO: 198694 - protein, 319 aa, Unknown
  Bacterial polypetide isolated from the Sargasso Sea
MVLSNGVVFPGFFFGASGTAIGEIVFNTGMTGYQEVITDPSYYGQILTFTYPEIGNTGINFEDSESNIHVKGIIVRNFSSNSSNWRSKKNFNQWLVDKNIIGLYGIDTRALVKILRSNGAMNGVITSLDKTDESCLKIIQDTPKMKGLNLSKFVSTKQQYLWKSHTQTSFDLRKRFDKYSKKLKIVAIDFGIKNSILNRLVSHGCEVLVLPSRSSLKDVLSNKPDGIFFSNGPGDPSSVSEGINLAKSLIEYGEIPMFGICLGHQIFGLALGGSTYKLPFGHRGLNHPCGENNKIEITSQNHGFAIDPNSLSKDLVRIT

SEQ ID NO: 198695 - protein, 221 aa, Unknown
  Bacterial polypetide isolated from the Sargasso Sea
VSTKKTYIWKGFKTWKKEIGYKKNIKTKFKIVAIDYGIKKNILRYFSDYNCEVKVVSCKKTADEIIKLNPDGIFLSNGPGDPAATGEYAIDNIKKLIKFKYPIFGICLGHQILALALNAKTKKMKLGHRGANHPVKNLITNSVEITSQNHGFVVIEKSLSKNIQITHKSLFDDSIEGIRLKNKPVFSVQYHPEANPGPQDSQYLFNNFIQDVKKYAKKKRH

SEQ ID NO: 198696 - protein, 292 aa, Unknown
  Bacterial polypetide isolated from the Sargasso Sea
MATGEVCFNTSLTGYQEIISDPSYAGQIINFTFPHIGNVGTNNEDHESDKIWTKGVIFNSEITNPSNYRSLRNLDIWLKKNRIVGITGLDTRSLTNFIRDEGAPKGTISNNNKGIFNLKKLTNSSTKWPGLNGLDLAKIVTTKKKYTWKGFKTWKKERGFEKNKKKKYKIIAIDYGIKKNILRYFSNFNCQVIVVPCNLESRDIIKLKPDGIFLSNGPGDPAATGKYAINIIQKLIKTNIPIFGICLGHQLLALALKAKTKKMKLGHRGANHPVKNLINSKVEITSQNHGLK

SEQ ID NO: 198697 - protein, 280 aa, Unknown
  Bacterial polypetide isolated from the Sargasso Sea
IWLKKNKIVGITGLDTRSLTNLIRDKGAPKGTISYSKKGKFNINKLKNLSNKWSGLKNLDLAEKVTTKKNYKWSGFKTWKKESRFLKNKIRSFKIVAVDYGIKKNILRYFSDFKCEVNIVSCKTSAEKILKMKPDGIFLSNGPGDPAATGKYAIGIIKTLIKKEIPIFGICLGHQILALALGAKTKKMNLGHRGANHPVKNLINNNVEITSQNHGFEIVKESLPKNVEITHKSLFDDCIEGIRLKNKPVFSVQYHPESNPGPQDSVYLFQEFINSIKKNA

SEQ ID NO: 198698 - protein, 292 aa, Unknown
  Bacterial polypetide isolated from the Sargasso Sea
TFKGIKIGSDIDAIGEVCFNTSMTGYQEIITDPSYASQIINFTFPHIGNVGTNFQDNESSISYAKGIIINCDISNPSNFRSLQHLDAWLKKKDIPGLCNIDTRSITNRIRSKGAPKGGIVKKLINKDHEKKFLSEIKKWQGLNNLDLAIEVTRKKIQKFKSKSKSKLNIVAIDYGMKQNILNCLLELNINVIVVPANTTSDEILEYNPNGIFLSNGPGDPKATGKYAIQTIKDLIHKKIPIFGICLGHQLISLALGAKTKKMFQGHRGANHPVQNLENKKVEITSQNHGFVV

SEQ ID NO: 198699 - protein, 113 aa, Unknown
  Bacterial polypetide isolated from the Sargasso Sea
ICLGHQILALALGANTFKMKFGHRGINQPVKNLITNKVEITSQNHGFAVDEDTLPSNVTVTHKHLNDDTVAGISCNDISAYSVQYHPEASPGPHDSRYVFKEFFNMMKSNAKT

SEQ ID NO: 198700 - protein, 283 aa, Unknown
  Bacterial polypetide isolated from the Sargasso Sea
SNYRSLNHLDKWLQTNKIVGLCGVDTREITNLIRTNGALKGTIINQSKKIDKKFYLKKSRDWSGLKGLDLASKVSTKQIYKWDNQALWKKKDGYEINNTFKYHVVAIDFGIKKNILRNFSNLNTRVTVVPINTSFKTIVALKPDGVFLSNGPGDPAATSKIVNSTIKQILINKIPVFGICLGHQLLAHALKCQTKKMHQGHRGANHPVKNIKTSKVEITSQNHGFEVIRKSIPKDVEITHVSLFDNSIEGISYKKSIAFSVQYHPEASPGPHDSNYLFNQFIN

SEQ ID NO: 198701 - protein, 294 aa, Unknown
  Bacterial polypetide isolated from the Sargasso Sea
GVLVLENRTIFKGIGIGYQGTATGEVCFNTSLTGYQEIISDPSYAGQIINFTFPHIGNVGTNEEDHESDKIWTKGVIFNTEITNPSNYRSLKKLDIWLKKNKIVGITGLDTRSLTNFIRDKGAPKGTISNNNKGNFNLKKLTNSSIKWPGLNGLDLAKIVTTKKKYLWKGFKTWKKEKGFEKNKKKKYKIIAIDYGIKKNILRYFSNFDCEVIVVPCNLEADDIAKLKPDGIFLSNGPGDPAATGKYAINIIQKLIKKNIPIFGICLGHQLLALALKAKTKKMKLGHRGANHPV

SEQ ID NO: 198702 - protein, 235 aa, Unknown
  Bacterial polypetide isolated from the Sargasso Sea
MESELIKFPGLVGQDLAKLVSTKKIYDWNEGSINLYGKKINKPRDELKVIAYDFGIKQNILRILKDLGCSVKVVPATFSAEEALEHNPDGIFLSNGPGDPEACHYAVKNIKELLKHKIPIFGICLGFQLLGISVGGKTMKMKFGHHGANHPVIDLDTKKVLITSQNHGFMIDEKSLPSNIRLTHRSLFDNSLQGIELTDCYAYGFQGHPEASPGPHDIHHIFNKFISFMKESKNA

SEQ ID NO: 198703 - protein, 161 aa, Unknown
  Bacterial polypetide isolated from the Sargasso Sea
FPANVSHEEILSSNPDGIFLSNGPGDPAAVTYGIETVKNLLGKKPIFGICLGHQILALALGANTFKMKFGHRGINQPVKNLITNKVEITSQNHGFAVDEDSLPSNVIVTHKHLNDDTVAGISCNDISAYSVQYHPEASPGPHDSRYVFKEFFNMMKNDAKT

SEQ ID NO: 198704 - protein, 259 aa, Unknown
  Bacterial polypetide isolated from the Sargasso Sea
LIREQGMPKCAIAHAPDGQIDIDALIQTAIAWEGLEHADLAAQVTEQDNFEHVERLWDLTTGFQDQQKADFHVVVLDYGVKKNILRNLAHIGARATVVPGDMPFADIAALAPDGVVLSNGPGDPAATILRSRQTISDLIASGLPVLGICLGHQLLALTLGAQTMKMEQGHHGANHPVKDLATGKVEIVSMNHGFTVDASTLPDGVEESHVSLFDGTNSGLAVRGRPIISVQHHPEASPGPQDSFYLFERFAELMRQHAK

SEQ ID NO: 198705 - protein, 299 aa, Unknown
  Bacterial polypetide isolated from the Sargasso Sea
DKVWAKGVILNSNVTEPSNYRSIKKLDKWLKKRKIIGIVGLDTRVITNYIRDKGAPKGSIQFSKKGNHNFKKLLKNARSWNGLLGLDLAGKVTCKKIYKWKSLKTWNKKNGYVKNKKNKYQIIAIDYGMKKNQLRCFSDINCGVTVVPANYPADEILKLKPNGIFLSNGPGDPAATGRYAIPIVKKLIEKKIPIFGICLGHQILSLALGAKTKKMPLGHRGANHPVKDLNTNKVEITSQNHGFEVDAKSIPKNVKVTHKSLFDGSIEGIEVKNEKLFSVQYHPEANPGPQDSKYLFEKF

SEQ ID NO: 198706 - protein, 240 aa, Unknown
  Bacterial polypetide isolated from the Sargasso Sea
TSLTGYQEIISDPSYAGQIINFTFPHIGNVGTNKEDHESDKIWARGVIFNSEITSPSNYRSFQHLDAWLKKNKIVGITGLDTRSLTNFIRDKGAPKGTISYSKKGKFNINKLTNTTIKWSGLKNLDLAEVVSTQKNYIWKGLKTWKKEIGYKKNNKKLFHVVAIDYGIKKNILRYFSDFNCKVTVVSCRTSAQKILALKPNGIFLSNGPGDPAATGKYAIEIIKDLIKKNLPIFGICLGH

SEQ ID NO: 198707 - protein, 190 aa, Unknown
  Bacterial polypetide isolated from the Sargasso Sea
YNIAVIDFGIKNNILRLLKNSGCSITVFPANVKNEEIKSINPDGLFLSNGPGDPAAVTYAIKTVRSLLGFLPIFGICLGHQILALSLGCDTFKLKFGHRGINHPVKNLESGRVEITSQNHGFCVNIDSLSNNIQPTHINLNDNTLAGISCPEYSAFSVQYHPESSPGPHESRYLFQRFIQLMENAKKNRY

SEQ ID NO: 198708 - protein, 182 aa, Unknown
  Bacterial polypetide isolated from the Sargasso Sea
GIKKNILRLLKNSGCNITIFPANVTNEEIKSINPDGLFLSNGPGDPAAVTYAIQTVKSLLGYIPIFGICLGHQILALALGCDTFKLKFGHRGINHPVKNLESGKIEITSQNHGFCVNIDTLPNNIQPTHINLNDNTLAGISCPEYSAFSVQYHPESSPGPHESRYLFQHFIQLMENAKKNRY

SEQ ID NO: 198709 - protein, 98 aa, Unknown
  Bacterial polypetide isolated from the Sargasso Sea
MKLGHRGANHPVKNLLTNKVEITSQNHGFEVIKESLKKNTEITHLSLFDKSIEGIRLKNKPVFSVQYHPEANPGPQDSKYLFTHFIKDIKKYAKKKRH

SEQ ID NO: 198710 - protein, 137 aa, Unknown
  Bacterial polypetide isolated from the Sargasso Sea
TGKYAVPVIKELIKLNIPIFGICLGHQLLCLSFGAKTKKMYHGHRGANHPVQNLISKKVEITTQNHGFEVIRSSLPKEIKETHISLFDKSNEGVEHSKLPIFSVQYHPESSPGPHDSQYLFNKFHQNIKKYAKKKRY

SEQ ID NO: 198711 - protein, 81 aa, Unknown
  Bacterial polypetide isolated from the Sargasso Sea
INLKSGKGEITSQNHGFAIDKDDTSKNKNIEITHMHLNDDTIAGIKIKNKKCFSVQYHPEASAGPHDSSYLFDEFIELIKN

SEQ ID NO: 198712 - protein, 175 aa, Unknown
  Bacterial polypetide isolated from the Sargasso Sea
MKGLELISKISTTKNYTWKDGIHSLLDSNKKNSKIQNKKNYTVVAIDYGIKRNILRNLYSRNLDVVVVPYASTTNEILKYKPSGIFLSNGPGDPSVTSRNSIEVIKDLMKIKIPIFGICIGHQLLALASGGETLKMQQGHRGANHPVKNHLNNKVEITSQNHGFTICRKSLCKDF

SEQ ID NO: 198713 - protein, 144 aa, Unknown
  Bacterial polypetide isolated from the Sargasso Sea
SNGRGDPFATGEKIVKTLKKLIDSEIPIFGICIGHQILSLALNAKTKKMFQGHRGSNHPVKNLINGYVEITSQNHGFEVDRESFSKDIIETHISLFDGTNEGIKHKYLPVFSVQYHPEASPGPHDSHYLFSEFYDLIKHYAKKN

SEQ ID NO: 198714 - protein, 217 aa, Unknown
  Bacterial polypetide isolated from the Sargasso Sea
CNFLVSTKKIYKWDYGLWKKDIEKESFENFPIVCLDFGIKQNILRNLKNLNFNPTILPAVTNIKEILSKKPKGIFLSNGPGDPDATIKFILPTIKELINLEIPIFGICLGHQLINLALGAKTKKMYQGHRGANQPVKNLINNTVEITSQNHGFEVDRSSLPDEVEETHVSLFDGSNEGIRHKTLPVFSVQYHPEASPGPHDSAYLFKEFYKLIKIHA

SEQ ID NO: 198715 - protein, 96 aa, Unknown
  Bacterial polypetide isolated from the Sargasso Sea
MFQGHRGANHPVKNIKTNRVEITSQNHGFEVDTQSFNNNIFETHVSLFDGSNEGFEHKYLPIFGVQYHPESSPGPHDSRYLFEKFFNNIENYAKKN

SEQ ID NO: 198716 - protein, 116 aa, Unknown
  Bacterial polypetide isolated from the Sargasso Sea
ICLGHQILALALNAKTRKMKLGHRGANHPVKNLLTNKVEITSQNHGFEVIKESLRKDTEITHLSLFDKSIEGIRLKNNPVFSVQYHPEANPGPQDSKYLFTHFMENVKKYAKKKRY

SEQ ID NO: 198717 - protein, 271 aa, Unknown
  Bacterial polypetide isolated from the Sargasso Sea
RGSVVGEVVFNTGMTGYQEVITDPSYAGQLVTFTYPELGNTGVNEDDQEADLPHAKGVIARQLAPQASNWRCSESLDGWMDRHGLVGICGVDTRALVRRLRDGGAINGVISSNGRTPADLLDEVRRAPSMEGLNLASQVSTTEPYKSSSPCRVSFDQRLKHRLDHPYRVVAIDFGIKRAILDRLVAHGCAITVLPSNADLEMVMSHQPEGVFLSNGPGDPAAVESGIDLARALLEISNLPLFGICLGHQILGLALGGRTFKLGYGHRGLNH

SEQ ID NO: 198718 - protein, 259 aa, Unknown
  Bacterial polypetide isolated from the Sargasso Sea
VLRKEQYSFFKKKRFNIKKLLKTTQKWSGLKNLDLAKKVTTKKNLIWQDFKTWKKSDGFVKNKKKLLHVVAIDYGIKKNILRYFSDFNCKVTIVSCKTNAIDILKLKPDGIFLSNGPGDPAATGKYAISIIKELIKNNLPIFGICLGHQLLALTLGAKTEKMKLGHRGANHPVKNLIKGNVEITSQNHGFEVVKNNLPKNVKITHQSLFDNSIEGIQLKNKPIFSVQYHPESNPGPQDSVYLFKQFIMSMKKNAKKKRY

SEQ ID NO: 198719 - protein, 145 aa, Unknown
  Bacterial polypetide isolated from the Sargasso Sea
MIEEKAVLALADGTIFRGKSIGASGRVNGEIVFNTSMTGYQEILTDPSYSKQIVTLTYPHIGNTGTNQEDIESGNIWCSGLVIRSNSLLVSNWRSENSLTEYLKTNNILGISDIDTRKLTRLIRTKGAQSASIFVSENIDEDEAI

SEQ ID NO: 198720 - protein, 356 aa, Unknown
  Bacterial polypetide isolated from the Sargasso Sea
MQNGDFFTGYGFGAKTIGIGEICFNTSMTGYQEIITDPSYSKQIINFTFPHIGNVGTNKEDFESQKSYASGIITRLLPTNYSNWRSLNKFDEWLKSLNVPGIAGIDTRLLTKRIRESDSTNGLIVHSDKRKFDFDELKSKLAEHPSMKGLELFSFISTKKKYYWKEGVNLLLKNKNHQERKKSDLLTIVTLDFGIKKNILRNLYERNLNVIVLPENSNFNKIMSYKPSGIFLSNGPGDPSATSKRTFDLLSKLIEVKIPIFGICIGHQLLALSLGAKTKKMKQGHRGANHPVKNLENNSVEITSQNHGFYVDKDTLPSDLLVTHLSLFDDSIEGLSHKTLPIFSVQFHPEASPGPT

SEQ ID NO: 198721 - protein, 350 aa, Unknown
  Bacterial polypetide isolated from the Sargasso Sea
VVFNTGMTGYQEVLTDPSYAGQLVSFTYPELGNTGVNGQDLEAETPHARGVIARQLSPCPSNWRSTGDLQTWMVGHGLVGICGVDTRALVRHLREAGAMNGVIGSDGRTPAELMQQLKQAPSMEGLNLADAVSTRTPYAWQSPCAASFDQRLRTNPEERYRVVAIDFGIKRAILDRLAAHGCAVTVLPASTDLETVLDHRPEGVFLSNGPGDPAAVSGGISLARQLLDQPDLPLFGICLGHQILGLALGGSTFKLTYGHRGLNHPCGTHGQVEITSQNHGFALDAASLDSSRIAITHLNLNDRTVAALAHRNRPVFGVQYHPEASPGPHDADHHFARFVTLMADRRSSGG

SEQ ID NO: 198722 - protein, 375 aa, Unknown
  Bacterial polypetide isolated from the Sargasso Sea
MDALLVLADGTVLRGRGFGAIGTAIGEVVFNTGMTGYQEVITDPSYTGQLITFTYPELGNTGINGEDLEADAPAVNAVITRELAPAASNWRSSGSLESWLQQHGVVGLSGVDTRAVVRLLREGGAINGAVSNDGTSPQVLLERVRQTPSMEGQNLAAQVSTASPYQWQQATAAGFDQRLQPQPERPYRVVAIDFGIKRAILERLSAHGCHVEVLPASAEIDEVMAMQPEGVFLSNGPGDPAVVSSGIALAEALLQQPQLPLFGICLGHQILGLALGGTTFKLGYGHRGLNHPCGGDGLVEITSQNHGFAIDAASLDSKRVAITHHNLNDGTVAALEMRDQPVFGVQYHPEASPGPHDADHHFSRFHTLMAERRNI

SEQ ID NO: 198723 - protein, 352 aa, Unknown
  Bacterial polypetide isolated from the Sargasso Sea
NTSLTGYQEIISDPSYAGQIINFTFPHIGNVGTNNEDLESDKIWTRGAIFNSEITSPSNYRALKTLDEWLKKNKIVGLTGLDTRGLTNFIRDKGAPKGTISNNKKGKFNIKKLINNSIKWPGLDGLDLAKEVSTKKTYSWKGFKTWKKKNGYKKNNKKIFKIVAIDYGIKKNILRYFSDYNCDVKVVSCKITAEEISKLKPDGIFLSNGPGDPAATGKYAIKTIQKLIKWNYPIFGICLGHQILALALNAKTKKMKLGHRGANHPVKNLINNKVEITSQNHGFVVIEKSLSKKIQITHKSLFDNTIEGIRLKSRPVFSVQYHPEANPGPQDSQYLFKSFIQDVKKYAKKKRH

SEQ ID NO: 198724 - protein, 260 aa, Unknown
  Bacterial polypetide isolated from the Sargasso Sea
RLTRAIRMLGAPHVALSHKPDGDFDTAELVQKAKSFSGLEGLDLATKVTCHQMYKWDEMRWAWPKGFERQNQAKHKVVAIDYGAKRNILRCLASAGCEVTVVPASSLADEILAHKPDGVFLSNGPGDPAATGKYAVPVIQHLLENTDLPIFGICLGHQMLALALGAKTIKMNHGHHGANHPVKEHSSGKVEITSMNHGFAVDAQTLPDGVEETHVSLFDGSNCGIKMSDRPVFSVQHHPEASPGPQDSFYLFNQFVASME

SEQ ID NO: 198725 - protein, 154 aa, Unknown
  Bacterial polypetide isolated from the Sargasso Sea
MNPDGVFLSNGPGDPAATGKYAVSVIKKLIILNIPIFGICLGHQLLALALNAKTKKMKLGHRGANHPVKNILTDKVEITSQNHGFEVIKSSLPKNVIITHKSLFDNSIEGIKLKNKPVFSVQYHPEANPGPQDSQYLFDQFINAIKQNAKKKRY

SEQ ID NO: 198726 - protein, 160 aa, Unknown
  Bacterial polypetide isolated from the Sargasso Sea
MNFKADDILNKKFDGIFLSNGPGDPKKVYDNIKLELNKLLDKKIPTFGICLGHQILSLAFNASTARMEKGHRGGNHPVKNLNTNKVEITSQNHGFVVLDKNFPSNLQITHKSLFDKTIDGMKSKDQPLFSVQYHPESSPGPHDSRYLFDEFINLIDKNAS

SEQ ID NO: 198727 - protein, 397 aa, Unknown
  Bacterial polypetide isolated from the Sargasso Sea
MNKKQKVNSTNFSNLSSGVLVLENKKIFKGIGIGYQGTATGEVCFNTSLTGYQEIISDPSYAGQIINFTFPHIGNVGTNKEDHESDKIWTKGVIFNTEITNPSNYRSLKKLDTWLKKNKIVGITGLDTRSLTNFIRDKGAPKGTISNNNKGNFNLKKLTNSSIKWPGLNGLDLAKTVTTKKQYIWKGFKTWKKEKGFEKNKKKKYKIIAIDYGIKKNILRYFSNFNCEVIVVPCNLEAEDIIKLKPDGIFLSNGPGDPAATGKYAISIIKKLIKTNIPVFGICLGHQLLALALKAKTKKMKLGHRGANHPVKNLINSKVEITSQNHGFEVVKESLPKNVEMTHKSLFDNSVEGIKLKNKPVFSVQYHPESNPGPQDSHYLFNQFINLVKKNAKKKRY

SEQ ID NO: 198728 - protein, 373 aa, Unknown
  Bacterial polypetide isolated from the Sargasso Sea
MNHPFKKNAKLVLSNGITFTGYSFGAMGSTVGEIVFNTGMTGYQEVITDPSYFGQIITFTYPEIGNTGINFEDSESDNSVRGIIVRNFSNNNSNWRSKLNFNQWLIEKNIIGLYGIDTRALVKILRSNGSMNGVITTEKNDFDSCLEIISNTPNMQGLNLAKDVSTKKNYIFKETTMTDFDVREKIHNNINKYKIVAIDFGIKKSILNRLVSHGCEILVLPSNSSFEDVLSHDPDGIFFSNGPGDPSSVLDGINLAKALIDFGKIPMFGICLGHQIFGLALGGKTYKLPFGHRGLNHPCGMNNNNIEITSQNHGFAIDPNSLSTESVEITHLNLNDKTVAGLKLINKPIFSVQYHPEASPGPHDSDYLFEKFV

SEQ ID NO: 198729 - protein, 363 aa, Unknown
  Bacterial polypetide isolated from the Sargasso Sea
TKGKQLGEICFNTSLTGYQEIISDPSYAGQIINFTFPHIGNVGTNNEDLESDKIWTRGVIFNSEITSPSNYRSLKNLDEWLKKNKIVGITGLDTRSLTNFIRDKGAPKGTISNNKKGNFNIKKLINISTKWPGLNGLDLAKEVSTKKTYTWKGLKTWEKGKGFKKNNNKSLRIVAIDYGIKKNILRYFSNYDCEVKVVSCKQTTEEILKLKPNGIFLSNGPGDPAATGTYAIQTVQKLISSNLPVFGICLGHQILALALNGKTKKMKLGHRGANHPVKNLNNKKVEITSQNHGFEVVKESLSKNIQITHKSLFDNSIEGIKLRNKPVFSVQYHPESNPGPQDSHYLFIDFIKDVKKYAKKKRH

SEQ ID NO: 198730 - protein, 358 aa, Unknown
  Bacterial polypetide isolated from the Sargasso Sea
VEAHLVLSDGTIFNGEMVGAVPEGGLVSGEVVFNTVLSGYQEVITDPSYAGQIITFTYPHIGNYGVNAEDNESSAPFCRGIVVRDLARRHSNWRANQGLDEMLKSRGISGIAGVDTRRLTRHIRNLGAMPGAFGDVGIEKLKLAASKEPGTDNIDLVKTVTCDEIYNVASTGGTRKIVAYDFGVKSTILRHLSKLGEIIVVPAGTSSEVVLDMKPDGVFLSNGPGDPAPLDYVRENIKSILGKVPVFGICLGHQLLAETLGAEIFKLPFGHHGGNHPVKNLKTGIVEITSQNHNYCVAEGSIKDAEVTHINLNDGTIAGINCLNVPAFSVQYHPEAGPGPHDSSYLFEQFENLLGRAG

SEQ ID NO: 198731 - protein, 400 aa, Unknown
  Bacterial polypetide isolated from the Sargasso Sea
MKKTGHNINSKKNLKKIDSTAILVLQNGKFFKGVGLGYKGTATGEVCFNTSITGYQEIISDPSYADQIINFTFPHVGNVGTNKEDHESDTIWTKGVIINTEITNPSNYRSLKHLDQWLKKNKIVGITGIDTRNLTNFIRDKGAPKGTISFYNKNKVNIKKLLRITNKWSGLKNLDLAKQVTTKRNYLWQDYKTWKKESGYLKNKKKLLHVVAIDYGIKKNILRYFSDFNCKVTIVPCKSTAKDIIKLKPNGIFLSNGPGDPAATGKYAIPVIQDLIKKKLPLFGICLGHQILALALGAKTEKMKLGHRGANHPVKNLIEGNVEITSQNHGFKVVKKSLPKNIRVTHQSLFDNSIEGIELKNKPVFSVQYHPESNPGPQDSVYLFDKFVKSMKKNAKKKRY

SEQ ID NO: 198732 - protein, 399 aa, Unknown
  Bacterial polypetide isolated from the Sargasso Sea
MRQIKNKKENNSHSFSTGILVFEDGTKFFGKGIGYEGNAVGEVCFNTSITGYQEIMTDPSYSDQIINFTFPHIGNVGTNPEDNEADKAWAKGVIFNCNTTEPSNYRSIKKLDYWLRKRKIVGIVNLDTRIITNYIRDKGAPKGVIQFSKKGKHNIKDLVKKSKSWKGLLGLDLAQKVTCKKIYTWNSLKSWDKKRGYLKNKKNLFKIIAIDYGIKKNQLRCFSDINCKVIVVPANYSAENIMSLKPDGVFLSNGPGDPAETGKYAIPIIKKLISYKIPIFGICLGHQILSLALGAKTKKMLLGHRGANHPVKDLMNNKVEITSQNHGFEVDKKSIPKNVTVTHKSLFDGSIEGIEVKNKKLFSVQYHPEANPGPQDSKYLFEKFLNNIKMKKNAKKKRY

SEQ ID NO: 198733 - protein, 399 aa, Unknown
  Bacterial polypetide isolated from the Sargasso Sea
MGKSKLHQSYIEILKKNNLTAILILETGEVFHGSGYGKPGIKMGEVCFNTSLTGYQEIITDPSYNGQIINFTFPHVGNIGTNQEDNEAKKSYASGVITRELPTGSSNWRSNKNLNDWLFEKNITGISGLDTRQLTKIIKDKNAPMGLISYNLNKRFNIDSLKQKLLSYPKIKGSNLVPVVSSNKSFNWDKSTSWPKNIRFNKNKIFHILAYDFGIKHNILRCLKDLNFKITVVPYNFDFEELKSLNPDGIFLSNGPGDPVETYKSIQKNFDKLLNLNLPIFGICIGHQLLALAFGAQTEKMKQGHRGANHPVYRLKDKTVEITSQNHGFKVVEETLPTFLNITHKSLFDGTIEGLEHKSKPIFSVQYHPEASPGPHDSRYLFQKFYKLISDRAKNAQKK

SEQ ID NO: 198734 - protein, 230 aa, Unknown
  Bacterial polypetide isolated from the Sargasso Sea
MKPSAILLADGTVIPAESIGHDLITIGEIVFNTSMTGYQEIITDPSYNKQIVTFTNPHIGNTGINVDDYESSYNGCSGIIIRNYPTKESSWRNENNFIEFLKDKSISAVCSVDTRYLTSLLREKGSIDGCIVPDIKKLDQARDLLSKFPGLNGLDLAKNVTAKEQYIWNEGTHDLVNVESSKNQEELRVFAYDYGIKKNILRILTDLGCNVTVVPAETTYNEVLKHKPDG

SEQ ID NO: 198735 - protein, 393 aa, Unknown
  Bacterial polypetide isolated from the Sargasso Sea
RKNKTSHLSNFNTAILVLENRSVFKGIGLGHAGEATGEVCFNTSLTGYQEIISDPSYAGQIINFTFPHIGNVGVNKEDIESDKIWTRGVIFNSEITSPSNYRSLQNLDKWLKKNKIVGITGLDTRSLTNFIRDKGAPKGTISNNKNGKFNINKLINKSIKWPGLNGMDLAEEVSTNKTYIWKGYKTWKKNKGYEKNKKKKFRVVAIDFGIKKNILRYFSDFDCEVKVVSCKENANNILNLKPHGIFLSNGPGDPAATGKYAIKVVKNLIKKNIPLFGICLGHQILALALDAKTKKMKLGHRGANHPVKNLITNKVEITSQNHGFEVVRESLKKNTEITHLSLFDNSIEGIRLKNRPVFSVQYHPEANPGPQDSKYLFSNFIKDIKKYAKKKRH

SEQ ID NO: 198736 - protein, 397 aa, Unknown
  Bacterial polypetide isolated from the Sargasso Sea
MIKKQKNKIAINHQFPTGILVLDNKLVFKGIGLGYQGTSTGEVCFNTSLTGYQEIISDPSYAGQIINFTFPHIGNVGTNNEDLESDKIWTKGVIFNSEITSPSNYRALETLDEWLKKNQIVGLTGLDTRSLTNFIRDKGAPKGTITNNKKGKFNIKKLINMSVKWPGLNGLDLAKEVSTKKTYIWKGFRTWKKNIGYQKNKKKKFKIIAVDFGIKKNILRYFADYNCEVKVVSCKLAADEIVKLKPDGIFLSNGPGDPAATGKYAIDTVQKLIKLNYPIFGICLGHQILALALNAKTKKMKLGHRGANHPVKNLINNSVEITSQNHGFVVIEKSLSKNIQITHKSLFDDTIEGIKLKNKPVFSVQYHPEANPGPQDSQYLFKNFIQDVKKHAKKKRH

SEQ ID NO: 198737 - protein, 256 aa, Unknown
  Bacterial polypetide isolated from the Sargasso Sea
ILRSSGSMNGVITSLDKTDESCLKILSDTPKMEGLNLSKVVSTKKKYLWKSHTQTIFDLRKRYDEFSKKLKIVAIDFGIKNSILNRLVSHGCEVLVFPSRASLNDVLSIKPDGIFFSNGPGDPSSVTEGIELAKSLIEYGEIPMFGICLGHQIFGLALGGSTYKLPFGHRGLNHPCGENNKIEITSQNHGFAIDPNSLSKEIVRITHYNLNDNTVAGLEVNNKPIFSVQYHPEAGPGPHDSDYLFKKFVSLMLERC

SEQ ID NO: 198738 - protein, 282 aa, Unknown
  Bacterial polypetide isolated from the Sargasso Sea
MTNEFSSNTPTACLALADGTLFFGKGFGATGETTAELCFNTSITGYQEILTDPSYASQIVTFTFPHIGNVGVNTEDAETENPAAEGLIVKWDPTQPSNWRSLEHLSDWLRKYNLLGMGGVDTRRLTRAIRMLGAPHVAISHNSNGVFDTAELIKKAKSFSGLEGLDLAEKVTCKQSYKWNEMRWAWPKGFERQKQAKHKVVAIDYGAKRNILRCLASAGCEVTVLPASSSADEVLAHKPDGIFLSNGPGDPAATGKYAVPVIQHLLDNTDLPIFGIWLGHKC

SEQ ID NO: 198739 - protein, 125 aa, Unknown
  Bacterial polypetide isolated from the Sargasso Sea
IETFLTTDIPVFGICLGHQLLALASGAKTIKMTVGHHGGNHPVKNLDTNKVLITAQNHGFAVDEATLPANVRATHKSLFDGTLQGIHRTDKPAFSFQGHPEASPGPHEASELFDHFIELMQQRQA

SEQ ID NO: 198740 - protein, 249 aa, Unknown
  Bacterial polypetide isolated from the Sargasso Sea
IKDIDTRSLTIHLRNHGAMNGVVCSEDFNESVLKEELNNYPSMEGMDLAKIVSTKNEYIFSKKGAKKVAVLDFGVKKNILNIFQKLDCCVTVLPANTSAEKILDLNPDGIFLSNGPGDPAAVSYAIGTVKTLLGKKPIFGICLGHQILALSLNAKTFKLKFGHRGINHPVKNIDSNLVEITSQNHGFAVDSNSLPSNVIETHINLNDNTNAGIDCPEYSAFSVQYHPESSPGPHDSRYLFEKFIGLMNA

SEQ ID NO: 198741 - protein, 363 aa, Unknown
  Bacterial polypetide isolated from the Sargasso Sea
MKEAILLLQDGSIFNGVSLGHIGETVGEVCFNTGMTGYQEILTDPSYRKQIVTMTSPHVGNYGINANDVESKTIQVAGFVIKEGTDIPSNWQSKECLDGYLKREEIVGIQDIDTRALTRHIRDCGAMNGIISSIEKDDNLLKRKLDLVPSMEGRDLVKEVTCNEPYTWENKSEGSLKVAAIDFGIKHNILRLLKERDCTINVFPANISPEEIMETDPDGIFLSNGPGDPSAVSYGIETVKALLGKKPIFGICLGHQILALALGATTSKLKFGHRGINHPVKRIATGAVEITSQNHGFVVDLESLPKNVALTHVNLNDNTSAGISCDELSAFSVQYHPESSPGPHDSRYLFNHFIDLMNNAKEK

SEQ ID NO: 198742 - protein, 363 aa, Unknown
  Bacterial polypetide isolated from the Sargasso Sea
MKKAILLLADGRVFKGFVFGAEGETIGEVCFNTGMTGYQEILTDPSYCRQIVTMTAPHIGNYGINDEDVESHKIQVAGFVIKEESPITSNWRSKSSISDYLKREKIVGIQGIDTRSLTSHLRDNGAMNGIISTTDMDIESLNEKLNSSNDMTGLDLAKEVSCEKKYLWNEKHKGQHKVAAIDFGVKYNILRLLEDHDCNVTVFPAATSATEIFDFQPDGVFLSNGPGDPAAVKYGIRTVRDILGKIPIFGICLGHQILALALGAKTYKLKFGHRGINHPVKNLKTNEIEITSQNHGFAVDITSLPKNVISTHINLNDSTSEGIECKELSAFSVQYHPESSPGPHDSRYLFNYFIQLMKDAKKN

SEQ ID NO: 198743 - protein, 376 aa, Unknown
  Bacterial polypetide isolated from the Sargasso Sea
MFVTVEAILALEDGTIFTGTSIGVNGHAIGEVVFNTSMTGYQEILTDPSYCQQIVTLTYPHIGNTGTNIEDMESRKTQASGLIIRNSSLVESSWRSTQSLNGFLESSNTVAIADIDTRKLTQLLREKGAQSGCIMAGEIDENIAIKNAKGFPGLLGMDLAKKVTTNQPYEWTEGSLYENRLSASKKDDLKYHVVAYDYGIKTNILRLFVDLGCKITVVPAEMPAIDVLALNPDGVFLSNGPGDPDACKYAIEAIKHFIDNFVPVFGICLGYQLLALASGAKTIKMKFGHHGANHPVLDLNTGKVIITSQNHGFAVEESSLPSNIKVTHKSLFDHTLQGIEIENKNAFGFQGHPEASPGPQDLMGLFNKFIKMLKNR

SEQ ID NO: 198744 - protein, 373 aa, Unknown
  Bacterial polypetide isolated from the Sargasso Sea
MSFPAILALKDGSVFYGKGFGKEKFDVGELVFNTSMSGYQEIITDPSYKKQIITFTHPHIGNTGINNDDNESNQVHSSGVVVNKFCEKPSNWRSVKSLEEFLNENDVMAISDVDTREITTILREKGALNCCVGSLSKISKKDAVKKAQEFDGLKGMDLAQVVSTKDEYLWNEGVWPENKKTRDSNMVVAYDYGIKENILRLLADHVGEVKVVNAETPFEEIMKFSPKGIFLSNGPGDPEPCVYAIDSIKKFLKEEVPIFGICLGHQLLALAGGAKTYKMKFGHHGANHPVQDIDSKEVFITSQNHGFAVDEDTLPSNIKTTHISLFDKSLQGIEFKDTPAFSFQGHPEASPGPQEIQSLFKKFSSMVKDYAKT

SEQ ID NO: 198745 - protein, 294 aa, Unknown
  Bacterial polypetide isolated from the Sargasso Sea
MKNAILLLADGRAFKGSAFGAEGETIGEVCFNTGMTGYQEILTDPSYCKQIVTMTAPHIGNYGINMEDVESKRIQVGGFIIKEESPITSNWRSEISIGDYLKDEKIIGIQGVDTRALTSHLRDNGAMNGIISTIDMDTASLRSKLDSVPDMKGLDLAKEVSCKNKYSWVKEQNGKYNVAAIDFGIKHNILRLLEENNCNVTVFPANVSSSEVLGMKPHGVFLSNGPGDPAAVTYGIQTVKELLGRVPIFGICLGHQILAIALGADTFKLKFGHRGINHPVKNLETGMIEITSQN

SEQ ID NO: 198746 - protein, 363 aa, Unknown
  Bacterial polypetide isolated from the Sargasso Sea
MKFDVKLLLENGISFEGIGFGYQKIGVGEVVFNTAITGYQEILTDPSYDGQIITFTYPHIGNTGINFEDNESKQVSARGMIVKNFCDFPSNWRSKQSLEEFLIEQKVICISDIDTRQLTKILRDEGCKVGAIYPTQSFTDDEAQFEIQNFGSIEDKDFTENVSVKEPYNFGQPKNKKTYKIIAIDFGIKENILRILQRMGGDVEVVPPSISVEEIQKKNPDGIFLSNGPGDPQVLVEPIKEVKKMMRLDIPIFGICLGHQIMSLAYDLEIEKMPFGHHGANHPVHDLKNNIVFITSQNHNFAVAEPKNRDDINITHRSLFDNSIQGIEHKEKPFYSIQCHPEASPGPKEFEILFKRFFEDMNA

SEQ ID NO: 198747 - protein, 222 aa, Unknown
  Bacterial polypetide isolated from the Sargasso Sea
MVTTKKQYKFNERPHKLLSKKNIEKRNFKPKIVVIDFGVKQNILRHLVNLNADIVVLPEDTNFEKIENFEPDGIFLSNGPGDPAATESKCRKLLKSIFKLNIPVFGICIGHQLIGLSFGATTSKMSQGHRGANHPVKNLINNKVEITSQNHGYQIDINSLPKCFEITHTSLFDSSIEGLKHKDLPIFSVQYHPEASPGPTESSYLFEEFLNHIKVSKNAKTK

SEQ ID NO: 198748 - protein, 317 aa, Unknown
  Bacterial polypetide isolated from the Sargasso Sea
MNKKQKVNSKKKSNFSPGILVLENKSIFNGIGIGYEGTATGEVCFNTSITGYQEIISDPSYAGQIINFTFPHIGNVGTNKQDNESEKVWTRGVIFNSEITNPSNYRSLIELDLWLKKNKIVGLTGLDTRSLTNLIRDKGAPRGTISHKKKGVFPVKKLINKTLKWPGLNGLDLAKTVTTKNKFTWKGLQTWTKKDGFKKIKKKKFRVVAIDYGIKTNILRYFSNFYCDVIVVPCDASAEYIMTLKPSGIFLSNGPGDPAATGKYAIKIIKNLIKKGLPIFGICLGHQLLALALGGKTKKMKLGHRGANHPVKNIKNN

SEQ ID NO: 198749 - protein, 333 aa, Unknown
  Bacterial polypetide isolated from the Sargasso Sea
MRAHPVDAFRCGSQSDRQVGNRVFPKESPVLPSFSPALLALADGTVFRGYSIGAPGHTIGEVVFNTAITGYQEILTDPSYARQIVTLTYPHIGNVGVNAEDVEATKVHAAGLIIRDLPVLASNFRMERTLPQYLKDEGVVAIAGLDTRMLTRVLRDKGAQNGAILAGSDDEAKAIELARSFPGLSGMDLAKVVSTKETYEWTQTEWRLGTGYGKQNAPKYRVVAFDYGVKYNILRMLAERGCHVTVLPAQASAADALALNPDGIFLSNGPGDPEPCDYAIAATKELIERGIPTFGICLGHQIMGLAVGAKTMKMKTGHHGANHPVKDLDDGRV

SEQ ID NO: 198750 - protein, 398 aa, Unknown
  Bacterial polypetide isolated from the Sargasso Sea
MKKKAKKNNSNKISKIHTGVLVLENRTVLKGIGIGYEGTATGEVCFNTSLTGYQEIISDPSYAGQIINFTFPHIGNVGTNKEDHESDKIWTKGVILNSEITNPSNYRSLANLDLWLKRNKVVGITGLDTRSLTNFIRDKGAPKGTIALNKKGKFNLKKLMNITIKWNGLKNLDLAEKVTTKKNYIWKGFKTWKKEIGYIRNNTKSLNVVAIDYGIKKNILRYFSDFNCKVNIVSCKTSVEKILKLKPNGIFLSNGPGDPAATGKYAIGIINELIKKDLPVFGICLGHQILGLALGAKTRKMKLGHRGANHPVKNLIENKVEITSQNHGFEIVRENLPKNIQVTHTSLFDNSIEGIRLKNKPVFSVQYHPESNPGPQDSVYLFQEFINNMKKNAKKKRS

SEQ ID NO: 198751 - protein, 366 aa, Unknown
  Bacterial polypetide isolated from the Sargasso Sea
MQKLKKAILFLEDGLFFIGKSLGKSGETFGEVCFNTGMTGYQEILTDPSYSNQMIAMSSPHIGNYGTNNSDTESERVYATGFIIKSESIQPSNWRSEESISSFLIKHNIVGIQDIDTRALTIHIRKKGAMRGIISTEDFDAHNLASKIKNIPKMEGQDLAIKVARKEKVVLSNTDNPTCKIAAIDFGMKSNIYDIMLEHDAEVEIFPANVSHNEILASNPDGVFLSNGPGDPAAVTYGIETVKNLLGKKPIFGICLGHQILALALGANTFKMKFGHRGINQPVKNLITNKVEITSQNHGFAVDEDSLPSNVSVTHKHLNDDTVAGISCNDISAYSVQYHPEASPGPHDSRYVFKEFFNMMKNDAKT

SEQ ID NO: 198752 - protein, 230 aa, Unknown
  Bacterial polypetide isolated from the Sargasso Sea
MQKLKKAILFLEDGLFFIGKSLGESGETFGEVCFNTGMTGYQEILTDPSYSNQMIAMSSPHIGNYGTNNSDTESERVYATGFIIKSESIQPSNWRSEESLSSFLIKHNIVGIQDIDTRALTIHIRKKGAMRGIISTEDFDTHNLASKIKNIPKMEGQDLAIKVARKKKVVLSNTDNPIYKIAAIDFGMKSNIYDIMLEHDAEVEIFPANVTHDEILASNPDGVFLSNGPG

SEQ ID NO: 198753 - protein, 296 aa, Unknown
  Bacterial polypetide isolated from the Sargasso Sea
MSFKAILAFEDGSVFHGRGFGKEKFDVGELVFNTSMTGYQEIITDPSYKKQIITFTHPHIGNTGINYEDMESNIIHASGIVVKNYCSKPSNWRSKASLEDFLIENEVIGISEVDTREITTLLREKGAMNCCIASSSLITKEEAISAAKDFDGLKGMDLAKVVSTQSKYEWNKGIWPQNKKSDESFSVVAYDYGIKENILRLLTEHVGKVHVVNAKTPFEEIIKLNPKGIFLSNGPGDPEPCDYAIENIKKCLMLKLPIFGICLGHQLLALAGGAKTYKMKFGHHGANHPVQDIMTK

SEQ ID NO: 198754 - protein, 373 aa, Unknown
  Bacterial polypetide isolated from the Sargasso Sea
MSFRAILAFEDGSVFHGRGFGKEKFDVGELVFNTSMTGYQEIITDPSYKKQIITFTHPHIGNTGINYEDMESNIIHASGIVVKNYCAKPSNWRSKASLEDFLIENEIIGISEVDTREITTLLREKGAMNCCIASSSLITKEEAISAAKDFDGLKGMDLAKEVSTESKYEWNKGIWPQNKKSDESFSVVAYDYGIKENILRLLTEHVGKVHVVNAKTPFEEIIKLNPKGIFLSNGPGDPEPCDYAIENIKKCLMQKFPIFGICLGHQLLALAGGAKTYKMKFGHHGANHPVQDIMTKDVFITSQNHGFAVDEKTLPSNIKVTHLSLFDKSLQGIEFTDAPAFSFQGHPEASPGPQEIQILFRKFSLMVREHAKT

SEQ ID NO: 198755 - protein, 301 aa, Unknown
  Bacterial polypetide isolated from the Sargasso Sea
MLNYQNGYLIYNKKYIFKGKFLSKDQFKIAEICFNTSMTGYQEILTDPSYKSQFINFTFPLIGIVGCNNEDYESWKIHASGLICNELFELSSNWRAQTNFTNWITSQNSCAFFDLDTRAVTKIVRNFGPKNIMLCSEEYFENKGIEQICNQIDQSLSLEENDVIKDFTSELNIEKQEIGKKKYSIAFLNFGAKDNIKKNLYSRNCMVEEFNMNFKAKDIINKNFDGFFLSNGPGDPKKVYENIKPELNKLLNKKIPTFGICLGHQILSLAFNASTARMEKGHRGGNHPVKNLETNKVKLHL

SEQ ID NO: 198756 - protein, 363 aa, Unknown
  Bacterial polypetide isolated from the Sargasso Sea
MKFAAKLLLENGISFEGIGFGFQKIGVGEVVFNTAITGYQEILTDPSYDGQIITFTYPHIGNTGINFEDNESKKIAARGLIVKNFCDFPSNYRSKMSLEDFLVEQKTICISDIDTRHLTRILRDEGCKIGAIYPTKLFTDEEAVSEIKKFGSMSDNNFIENVAVSESYAYGDPKTKKKFKIAAVDFGVKENILRIMKDMGGDITVMPPTTTAKEMAALKPDGIFLSNGPGDPKVLTSAVEEVKQMMKLEIPIFGICLGHQIMSLAYDLKIEKMPFGHHGANHPVHDLKNNTVFITSQNHNFAVANIEDRSDVVVTHRSLFDGSIQGIEHNDKPFYSIQCHPEASPGPKEFEVLFERFFEDMNA

SEQ ID NO: 198757 - protein, 161 aa, Unknown
  Bacterial polypetide isolated from the Sargasso Sea
WSFSCTSSADEILEHKPDGVFLSNGPGDPAATGKYAVPVIQHLLKNTDLPIFGICLGHQMLALALGAKTIKMNHGHHGANHPVKEHSSGKVEITSMNHGFAVDAQTLPSGVEETHVSLFDGSNCGIKMSDRPVFSVQHHPEASPGPQDSFYLFNQFVATME

SEQ ID NO: 198758 - protein, 359 aa, Unknown
  Bacterial polypetide isolated from the Sargasso Sea
MNQNGDEFLGWTTESFKPTTGELIFNTAMTGFVEILSDPSYINQIVTFTSSHIGNYGMSKNDFESNKPKIEAAIGNSFTNSPSSWRSEKSITSWLKEYEIPYSGGFDVRNITKYLRDNGSSMFALGIDVDTKDLNEILSKAKNILGDSSAMTAGNQNNENTPTEGKIGIIDLGAKRSIIKVLEDNDYKVVMISPSTTPNEILKMNLKGLLISNGPGDPRSLVTVIDTVQNLIGKLPIFGICLGHQILGLACGLEVKKMQFGHHGSNHPVEIEGIKKALITAQNHGFSIEEFGDGFEHENFGNINVFARNLNDGTNEGISLWESMAYSVQFHPESGPGTTDGLQIFNPFFEMIENNYAKK

SEQ ID NO: 198759 - protein, 272 aa, Unknown
  Bacterial polypetide isolated from the Sargasso Sea
MKDAYLLLSNNECLKGVSIGYSGSTFGELVFNTSITGYQEIISDPSYKNQIITFTYPHIGNVGFNINDYEANDTYVNGVVVNQLPTNPSNWRAESSFSDFLIKNKIICIADIDTRYLTSMLRDKGSLNACISTEVKKINSLQDKLKKYNGIIGMDLAKEVSTKKSYFFNEKNYYVDNKKIKSKQKYSVVAYDFGIKKNILKILKDLGCKTKVIPANTKAKDVLNMNPDGIFLSNGPGDPAACKYAIDSIKEFYKHNIPLFGICLGHQLMGIA

SEQ ID NO: 198760 - protein, 397 aa, Unknown
  Bacterial polypetide isolated from the Sargasso Sea
MTKKVKKTHKKNSQINTGVLVLENKKVFKGIGIGYQGEATGEVCFNTSLTGYQEIISDPSYAGQIINFTFPHIGNVGTNKEDFESDKIWTKGVVINSEISSPSNYRSFQHLDAWLKKNKIVGITGLDTRSLTNLIREKGAPKGTVAHSKKGKFNISKLTNSTIKWSGLKNLDLAEKVTTPKNYIWKGHKTWKKELGYKKNSKNSFHVVAIDYGIKKNILRYFSDFKCKVTVVSCKTSAEKILALRPNGIFLSNGPGDPAATGKYAIKIIKNLIKKNLPLFGICLGHQILALTLGGKTKKMKLGHRGANHPVKNLINDNVEITSQNHGFEVVKENLPKNIEVTHKSLFDNSIEGIKLKNKPVFSVQYHPESNPGPQDSVYLFQEFINNMKKNAKKKRS

SEQ ID NO: 198761 - protein, 397 aa, Unknown
  Bacterial polypetide isolated from the Sargasso Sea
MIKKAKKTNSKNSQINTGVLVLENKKVFKGIGIGYQGEATGEVCFNTSLTGYQEIISDPSYAGQIINFTFPHIGNVGTNKEDVESDKIWTRGVIFNSEITSPSNYRAFLHLDAWLKKNKIVGITGLDTRSLTNFIRDKGAPKGTIAYSKDGKFNVNKLTNSTIKWSGLKNLDLAETVTTAKNYIWKGLQTWKKEIGYKKNTKNLFHVVAIDYGIKKNILRYFSDFKCKVTVVSCKTSAEKILNLKPNGIFLSNGPGDPAATGKYAIEILNELIKKNLPIFGICLGHQILALALGGKTKKMKLGHRGANHPVKNLVHDKVEITSQNHGFVVVEETLPKKIEVTHKSLFDNTIEGIRLKNKPIFSVQYHPESNPGPQDSVYLFQEFINNMKKNAKKKRY

SEQ ID NO: 198762 - protein, 386 aa, Unknown
  Bacterial polypetide isolated from the Sargasso Sea
MEVALTKSALLVLEDGTVFTGTAIGADGLSVGEVVFNTSMTGYQEILTDPSYSRQIVTLTYPHIGNTGTNNEDVESNGVHACGLIIRDLPLVASSFRNQQTLSDYLKANNVVGIADIDTRKLTRILREKGAQAGCIMAGADLDEAKALAAAKAFPGLKGMDLAKEVTTDKAYPWRKGSWRLVGGLPEDTPAEALKYKVVAYDYGVKQNILRMLVDRRCDVTVVPAKTSAAEVLAMNPDGVFLSNGPGDPEPCDYAIEAIQQILKTDTPIFGICLGHQLLALASGAKTLKMKFGHHGANHPVSNIEKGNVMITSQNHGFAADEATLPANIKVTHKSLFDGSLQGIHLTDKPAFSFQGHPEASPGPNDAAPLFDHFIELIEQYRQNAK

SEQ ID NO: 198763 - protein, 387 aa, Unknown
  Bacterial polypetide isolated from the Sargasso Sea
MVNWVSKKPTGALILNDGTIFKGFGFGTIGRSSGEVCFNTAISGYQEIMTDPSYCSQIITFTFPHIGNVGLNLEDNESSDRPYISGAVFRSLITDPSNWRSEINLDNWLKDNSIVGIYGIDTRALTNLIREKGLINGTIVHNNNGIEEFEDYLEDTKKFKGINDQDLAKLVTCKETILWDEKEINIYNSKIKRKKINAHVVVVDYGVKKNILRCLSSRFKKISLVPCTSSYSDIINLKPDGVFLSNGPGDPSATGIYAIPVIKQLIDSNIPIFGICLGHQLLALSLGLETYKMHQGHHGANHPVKNNYDSSVSITSMNHGFAVRSDNLPEGIIETHTSLFDGSNCGIEMINKPIFSVQHHPEASPGPNDSYYLFDKFLENIEKHTNA

SEQ ID NO: 198764 - protein, 365 aa, Unknown
  Bacterial polypetide isolated from the Sargasso Sea
MKKIKNTQEKEAVLLLDDRRLFRGRVFGAIGESIGEVCFNTGMTGYQEILTDPSYAKQMVTMTAPHIGNYGINSEDVESEKIQVSGFIIKEESFIPSNWRSEISLAEYLKKQNVVGIKNIDTRALTKHIRDNGAMNGIISSKTVNIDELANKLNDAPSMEGLDLAKIVSTKKIYQWSEKGRYKIAAIDFGIKKNILRLLESFDCSVTVFPAKTKAHEILSYDPDGVFLSNGPGDPAAVGYGIETIKKLLGVKPIFGICLGHQLLALALGAKTFKLKFGHRGINHPVKNINLGAIEITSQNHGFAVELDSLPKNILSTHINLNDNTSAGIECVDHPAFSVQYHPESSPGPHDSRYLFKKFIGMMDA

SEQ ID NO: 198765 - protein, 279 aa, Unknown
  Bacterial polypetide isolated from the Sargasso Sea
MSEYLKAKGVVGIADIDTRRLTRILRDKGAQNGCIICSDELDESSALAQAKAFPGLKGMDLAKVVSITEPKTWTEGSWELGKGYVTPSEFKYHVVAFDYGVKNNILRMLADRGCKVTLVPAQTPAEDVLAMNPDGVFLSNGPGDPEPCDYAVTAIKTIVETGTPVFGICLGHQLLAIASGAKTVKMKFGHHGANHPVKDLKRNVVMITSQNHGFAVDESSLPDNLEVTHISLFDKSLQGIHRTDKPAFSFQGHPEASPGPHEAAPLFDHFIELIEQHKQ

SEQ ID NO: 198766 - protein, 359 aa, Unknown
  Bacterial polypetide isolated from the Sargasso Sea
MKKNSAILLLDDGRKFIGKSFGFIGETIGEVCFNTGMTGYQEILTDPSYCKQIVTMTSPHIGNYGINEEDVESKKIQVSGFIIKEETLIPSNWRSVASIGDYLTKNKIVGIQQIDTRALTRHIRDNGAMNGIISSLDSNIKSLSGKLKKAPSMNGLDLAKNVSTKKVYQWSSKGKYNVAAIDYGIKHNILKLLADNNCKITVFPAKTTAEEIIEFNPQGVFLSNGPGDPAAVAYGIEMVKELLGKKPIFGICLGHQILSLALGAKTFKLKFGHRGINHPVKNMNSGIVEITSQNHGFAVDLNSLPKNVKSTHINLNDNTSAGIECEELQAFSVQYHPESSPGPHDSRYLFDKFIDQMKG

SEQ ID NO: 198767 - protein, 157 aa, Unknown
  Bacterial polypetide isolated from the Sargasso Sea
MKKDSILYLESGISFTGSSFGYDSEAIGEIVFNTSMTGYQEIITDPSYDSQIVLMTYPHIGNYGTNEMDIESNKSSAKGLIAREFCDYPSNFESTAKLSEYLNKNKIVGISNIDTRKLTKIIRNQGSQKCIISNRSNDIDYLKSQLETLPVMEGNDL

SEQ ID NO: 198768 - protein, 397 aa, Unknown
  Bacterial polypetide isolated from the Sargasso Sea
MKEKHKNKIAIKSKFPSAILILDNKTIFRGIGLGYHGEATGEVCFNTSLTGYQEIISDPSYAGQIINFTFPHIGNVGTNNEDVESDKIWTRGVIFNSEITNPSNYRSLKHLDEWLKKNKIVGITGLDTRSLTNFIRDKGAPKGTISNNKSGRFNIKKLIKKTTIWPGLKGMDLAQEVSTRKNYTWKGLKTWSKEEGYKKNNKKKFRVIAIDYGIKKNILRYFSNFNCEVKVVSCKESAENLLKLKPHGIFLSNGPGDPAATGKYAISTVQKLIQSNLPVFGICLGHQILALALNAKTKKMKLGHRGANHPVKNLISKKVEITSQNHGFEVVKESLPKNVEITHRSLFDNCIEGIKLKNKPVFSVQYHPESNPGPQDSHYLFNNFINEIKKYAKKKRH

SEQ ID NO: 198769 - protein, 373 aa, Unknown
  Bacterial polypetide isolated from the Sargasso Sea
MSFKAILAFEDGSVFYGKGFGKEKFDVGELVFNTSMTGYQEIITDPSYKKQIITFTHPHIGNTGINHEDNESNIIHASGIVVKNFCEKPSNWRSSSTLDEFLIKNETIAISNVDTREITSILREKGAMNCCIGSLSMISEDDAIFAAKEFSGLEGMDLAKVVSTKSDYIWNKGTWPQNNSSKESHNVVAYDFGIKENILRLLNEHLGEVKVINAETPYEEIIKLSPNGIFLSNGPGDPEPCDYAIKSIKKFLKDKIPIFGICLGHQLLSLAGGANTYKMKFGHHGANHPVQDIESKEVYITSQNHGFAVDADTLPKNIKITHISLFDKSLQGIEFIDSPAFSFQGHPEASPGPQEIQNLFKKFSLMVKEYAKT

SEQ ID NO: 198770 - protein, 207 aa, Unknown
  Bacterial polypetide isolated from the Sargasso Sea
ELASKVSTKKSYEYGNKDSKVRLAVIDLGIKNNILENFSRRGLFVKVFPYNTDFEEMLKFKPDGFFLSNGPGDPKPLTKVINTTIKILDKNYPLFGICLGHQVIALANGIKTYKMFNGHRGINHPVLNLNTGKGEITSQNHGFAVDYKTAVSNKSVKISHQHLNDQTVAGLEIKGKDCFSVQYHPEAGPGPNDGNYLFDQFLSKLNK

SEQ ID NO: 198771 - protein, 339 aa, Unknown
  Bacterial polypetide isolated from the Sargasso Sea
MSGYQEIITDPSYCKQIITFTHPHIGNTGINSEDNESDNIYAEGVVIRNYISQPSNYRSEENLDDFLARNNSIGIFGIDTRQLTIILREKGSLKACISPIDENNEQSAISLAKSFDGLEGMDLAKEVTTKNLYSWNEGVWPDYKELKSKLHIVAYDYGIKKNILRLLSEHVGKVTVVNARCSFDEVLKMNPDGIFLSNGPGDPEPCAYAIENIKRALNENIPIFGICLGHQLLALAGGAKTEKMKFGHHGANHPVQSLNSKEVFITSQNHGFAVNEDSLPDNIEISHVSLFDQSIQGISFKDKPAFSFQGHPEASPGPQDIVSLFKQFKEMIDKNAKKK

SEQ ID NO: 198772 - protein, 213 aa, Unknown
  Bacterial polypetide isolated from the Sargasso Sea
MESFKTWRKETGYKKNTKKTFKIIAIDYGIKKNILRYFSDYNCDVKVVSCTTTAEEISKLKPDGIFLSNGPGDPAATGKYAIKTIQKLIKKDYPIFGICLGHQILALALNAKTKKMKLGHRGANHPVKNLINNKVEITSQNHGFIVIEKSLSKKVQITHKSLFDNTIEGIRLKNRPIFSVQYHPEANPGPQDSQYLFKNFIQDVKKYAKKKRH

SEQ ID NO: 198773 - protein, 136 aa, Unknown
  Bacterial polypetide isolated from the Sargasso Sea
GAYAIQTIKTLIKNNLPIFGICLGHQILALSLNAKTKKMKLGHRGANHPVKNLINSKVEITSQNHGFEVIENSLSKNIQITHKSLFDGSIEGIKLKNKPIFSVQYHPEANPGPQDSHYLFGDFVKEVKKHAQKKRH

SEQ ID NO: 198774 - protein, 260 aa, Unknown
  Bacterial polypetide isolated from the Sargasso Sea
APKGTIQFLKRGEHNLKKLLKEARSWNGLLGLDLAKKVTCKKIYKWKSFKSWNKKSGYIKNRRNKYHIVAIDYGIKKNQLRCFSDINCGVTVVPANFSADEIIKLKPHGVFLSNGPGDPAATGKYAIPIIRKLIKNKIPIFGICLGHQILSLALGAKTKKMSLGHRGANHPVKDLTTNKVEITSQNHGFEVDAKSIPKNVNVTHKSLFDGSIEGIEVKDKKLFSVQYHPEANPGPQDSKYLFEKFLNNIKLNKNGKKKRY

SEQ ID NO: 198775 - protein, 191 aa, Unknown
  Bacterial polypetide isolated from the Sargasso Sea
DEYPVVAYDYAFKENILRLLSEHVGSVKVVNAKTPFEEIIKYNPKGIFLSNGPGDPEPCDYAIENIKKFLENKIPIFGICLGHQLLALAGGANTYKMKFGHHGANHPVQDMASKDVFITSQNHGFAVDENTLPKNIKVTHVSLFDKSLQGIEFIDRPAFSFQGHPEASPGPQEIQILFEKFSSMVKEYAKT

SEQ ID NO: 198776 - protein, 387 aa, Unknown
  Bacterial polypetide isolated from the Sargasso Sea
MQRDIIKNQHLRPPSAALIFDDGEILWGHGLGALKSVIAELCFNTSQTGYQETLTDPSYAKQIITFTFPHIGIVGINDEDLESNKIYAEGCVINQSIEEYSNWRAQDSLSSFLKKNNIPGIIGVDTRYLTRKLAVDGAKKVALIHFGEKKESFDNLQQKLKQWSGLENLDLATSVSATNEYQWNYGLWKQNVKDKKYDNFPIVCLDFGIKQNILRNLKNLNFNPTILPAISPTKEILNKKPKGIFLSNGPGDPDATIKIILPTLKELIDLKIPIFGICLGHQLISLALGGKTKKMYQGHRGANQPVKNLINNNVEITSQNHGFEVERSSLPNEVEETHISLFDGSNEGIRHKIHPVFSVQYHPEASPGPHDSAYLFEEFYNLVKKHA

SEQ ID NO: 198777 - protein, 395 aa, Unknown
  Bacterial polypetide isolated from the Sargasso Sea
MNKKQKVNSKKFSHLSSGVLVLENKTIFKGIGIGYQGTATGEVCFNTSLTGYQEIISDPSYAGQIINFTFPHIGNVGTNKEDHESDKIWTKGVIFNTEITNPSNYRSLKKLDSWLKKNKIVGITGLDTRSLTNFIRDKGAPKGTISNNNKGIFNLKKLTNSSIKWPGLNGLDLAKIVTTKKKYLWKGFKTWKKGEGFEKNKKKKYKIIAIDYGIKKNILRYFSNFNCEVIVVPCSLEAEDIIKLKPDGIFLSNGPGDPAATGKYAINIIQNLIKTNIPIFGICLGHQLLALALKAKTKKMKLGHRGANHPVKNLINSKVEITSQNHGFEVVKDSLPKNVEMTHKSLFDNSVEGIKLKKKPVFSVQYHPESNPGPQDSHYLFNQFINEVKKNAKKK

SEQ ID NO: 198778 - protein, 226 aa, Unknown
  Bacterial polypetide isolated from the Sargasso Sea
SFDGLEGMDLAKEVTTKSLYSWNEGVWPDFKESKSKLHIVAYDYGIKKNILRLLSEHVGKVTVVNARCSFDEVLKMNPDGIFLSNGPGDPEPCDYAIENIKRALNENIPIFGICLGHQLLALAGGAKTEKMKFGHHGANHPVQSLNSKEVFITSQNHGFAVNENSLPNNIEISHVSLFDQSIQGISFKDKPAFSFQGHPEASPGPQDIVSLFKQFKEMIDKNAKKK

SEQ ID NO: 198779 - protein, 397 aa, Unknown
  Bacterial polypetide isolated from the Sargasso Sea
MNKKQKVNSKKLSYIPSGVLVLENKKIFKGIGIGYQGTATGEVCFNTSLTGYQEIISDPSYAGQIINFTFPHIGNVGTNKEDHESDKIWTKGVIFNTEITNPSNYRSLKKLDNWLKKNKIVGITGLDTRSLTNFIRDKGAPKGTISNNNKGIFNLKKLTNNAIKWPGLNGLDLAKTVTTKKQYIWKGFKTWKKDKGFEKNKKNKYKIIAIDYGIKKNILRYFSNFNCEVIVVPCHLEAKDIIKLKPDGIFLSNGPGDPAATGKYAINIIQNLIKTNIPVFGICLGHQLLALALKAKTKKMKLGHRGANHPVKNLINSKVEITSQNHGFEVVKESLPKNVEMTHKSLFDNSVEGIKLKNKPVFSVQYHPESNPGPQDSHYLFNQFINLVKKNAKKKRY

SEQ ID NO: 198780 - protein, 371 aa, Unknown
  Bacterial polypetide isolated from the Sargasso Sea
MSKEKAILALADGTIFEGISIGASGRVNGEIVFNTSMTGYQEILTDPSYAKQIVTLTYPHIGNTGTNSEDTESDKIWCSGLVIRSLSQAESSWRNAETLSNYLIRNNIQGISDIDTRKLTRIIREKGAQSASIFTGNSVDSNNAIDFAKDFEGLAGLDLAKEVTTESSYDWKEGTWRGNHGESDFRVAVLDFGIKKNILRILADHGYELKIFPAKTSYQEILDFKPNGVFLSNGPGDPEPCIYAIETIKELIQISMPVFGICLGHQLLAIALGGKTSKMKFGHHGANHPVQDLKTRKVSVSSQNHGFTVEENSLPADVEITHKSLFDGTIQGIQHSSKPFFSFQGHPEASPGPHDLAYLFSTFDKNMSINA

SEQ ID NO: 198781 - protein, 373 aa, Unknown
  Bacterial polypetide isolated from the Sargasso Sea
MSFKAILAFEDGSVFYGKGFGKEKFDVGELVFNTSMTGYQEIITDPSYKKQIITFTHPHIGNTGINQEDNESKVIHASGMVVKNFCEKPSNWRSETSLEDFLVKNDVMAISEVDTRQITSMLRENGAMNCCIGSISVISEEGAIKEAKSFKGLKGMDLAQVVSSASEYEWNEGIWPENKKSNESLPVVAYDYGIKENILRLLAEHVGEVKVVNAKTTYEEIIKLKPKGIFLSNGPGDPEPCDYAIRNIKKFLEAKIPIFGICLGHQLLALAGGANTYKMKFGHHGANHPVQDISSKEVFITSQNHGFAVDIDSLPSNIEATHISLFDKSLQGIQFKDSPAFSFQGHPEASPGPQEIQILFNKFSLMIKEYAKT

SEQ ID NO: 198782 - protein, 138 aa, Unknown
  Bacterial polypetide isolated from the Sargasso Sea
IQALPGEYAIPVIKKLIDSNIPIFGICLGHQLLALSLGLKTYKMHQGHHGANHPVKNNYDSSVSITSMNHGFAVRSDNLPEDIIETHTSLFDGSNCGIEMVNKPIFSVQHHPEASPGPNDSYYLFDKFLENIEKHKNA

SEQ ID NO: 198783 - protein, 154 aa, Unknown
  Bacterial polypetide isolated from the Sargasso Sea
MINPYKKNAKLVLSNGIVFPGFYFGASGTAIGEIVFNTGMTGYQEVITDPSYYGQILTFTYPEIGNTGINFEDSESNINIKGIIVRNFSSNSSNWRSKKNFNQWLVEKNIIGLYGIDTRALVKILRSAGAMNGVITSIDKTDESCLKIIQDTPK

SEQ ID NO: 198784 - protein, 300 aa, Unknown
  Bacterial polypetide isolated from the Sargasso Sea
MTTKRKKNNSIKPQFSSAILVLENKSVYRGIGLGYQGEATGEICFNTSLTGYQEIISDPSYAGQIINFTFPHIGNVGTNNEDLESDKIWARGVIFNSEITSPSNYRSLKNLDEWLKKNKIVGITGLDTRSLTNFIRDKGAPKGTISNNKQGNFNIKKLINISTKWPGLNGLDLAKDVTTKKAYTWKGLKTWEKGKGFKKNKKKSLRIVAIDYGIKKNILRYFSNYDCEVKVVSCKQTADEILKLKPNGIFLSNGPGDPAATGKYAIQTVQKLISSNLPVFGICLGHQILALALNGKTKKM

SEQ ID NO: 198785 - protein, 242 aa, Unknown
  Bacterial polypetide isolated from the Sargasso Sea
RKKGAMRGIISTEDFDTHNLASKIKNIPKMEGQDLAIKVARKKKVVLSNTDNPIYKIAAIDFGMKSNIYDIMLEHDAEVEIFPANVTHDEILASNPDGVFLSNGPGDPAAVTYGIETVKNLLGKKPIFGICLGHQILALALGANTFKMKFGHRGINQPVKNLITNKVEITSQNHGFAVDEDSLPLNVSVTHKHLNDDTVAGISCKDISAYSVQYHPEASPGPHDSRYVFKEFFNMMKNDAKT

SEQ ID NO: 198786 - protein, 167 aa, Unknown
  Bacterial polypetide isolated from the Sargasso Sea
IVPCKTSARNILKLEPNGIFWSNGPGDPAATGKYAIPIIKEFIRNNLPVFGICLGHQLLGLALGAKTKKMDLGHRGANHPVKNLIKGNVEITSQNHGFEIVKKSLPRNILVTHQSLFDNSIEGIKLKSKPVFSVQYHPESNPGPQDSVYLFEEFVKSMKKNAKKKRY

SEQ ID NO: 198787 - protein, 134 aa, Unknown
  Bacterial polypetide isolated from the Sargasso Sea
YAIKIIQNLIKKKMPLFGICLGHQILALALGGKTKKMKLGHRGANHPVKNLIKDNVEITSQNHGFEVVRENLPKNIQITHKSLFDNSIEGIRLKNNLVFSVQYHPESNPGPQDSVYLFQEFINNMKKNAKKKRS

SEQ ID NO: 198788 - protein, 109 aa, Unknown
  Bacterial polypetide isolated from the Sargasso Sea
MVKKINLVLEDGTFYSGFSFGFQKDVYGEVVFNTSMTGYQEMLTDPSYRGQILIPTYPLIGNYGISSKDVESSNIQVKGFVVRQFCEEPSHNNSIMNLDQYLENNKIPG

SEQ ID NO: 198789 - protein, 198 aa, Unknown
  Bacterial polypetide isolated from the Sargasso Sea
NKKKKFRVVAIDYGIKKNILRYFSDFDCEVKVVSCKEDADNIINLKPHGIFLSNGPGDPAATGKYAIEVVKKLIKKNIPLFGICLGHQILALALDAKTKKMKLGHRGANHPVKNLITKKVEITSQNHGFEVVKESLRKNTEITHLSLFDNSIEGIRLKSKPVFSVQYHPEANPGPQDSKYLFSNFIKEIKKYAKKKRH

SEQ ID NO: 198790 - protein, 329 aa, Unknown
  Bacterial polypetide isolated from the Sargasso Sea
SLIQKTNNYFHTSTYWEIPGVNEEDNESKTIHASGMVVKNFCDKPSNWRSKATLGEFLIKNEVIGIADVDTREITTILREKGAMNCCIASLSEISDKEAVAKAKAFEGLKGMDLAKVVSTDKEYKWNEGVWPENNKFNDEYPVVAYDYGIKENILRLLSEHVGSVKVVNAKTPFEEIIKYNPKGIFLSNGPGDPEPCDYAIENIKKFLENKIPIFGICLGHQLLALAGGANTYKMKFGHHGANHPVQDMASKDVFITSQNHGFAVDENTLPKNIKVTHVSLFDKSLQGIEFIDRPAFSFQGHPEASPGPQEIQILFEKFSSMVKEYAKT

SEQ ID NO: 198791 - protein, 183 aa, Unknown
  Bacterial polypetide isolated from the Sargasso Sea
IKKNILRYFSNFKCDVLVVPCQTSAEQILKLKPDGIFLSNGPGDPAATGKYAIKIIQNLINSNIPIFGICLGHQLLALALKAKTKKMKIGHRGANHPVKNLVNDRVEITSQNHGFEVVKESLPKNVEMTHKSLFDNSVEGIKLKNKPVFSVQYHPESNPGPQDSHYLFNQFINLVKNAKKKRY

SEQ ID NO: 198792 - protein, 362 aa, Unknown
  Bacterial polypetide isolated from the Sargasso Sea
MILEDGTKFSGKSIGIESHSVGEVVFNTAMTGYQEIITDPSYHKQIVTLTYPHIGNTGTNDEDNESKDSFCSGLVIRESSPISSNWRNKLSLEDFLSKNEIVGISNIDTRKLTNHLRNHGSMNACLASNGISTEEALSEAKSFSGLAGLDLAKEVSTKKPYIFSSSADSTNQQYHVVAIDFGVKTNILNLLSKNGCKVTVLPAQSSFDEVMSHDPDGVFLSNGPGDPEPCDYAIKCIRELLKVDIPIFGICLGHQLLALASGAKTEKMKFGHHGANHPVIDTQTGIVYITSQNHGFTVNEMTIPENVKVTHKSLFDQSIQGIELKDKNAFSFQGHPEASPGPHDIQPLFQKFISNINHAKKN

SEQ ID NO: 198793 - protein, 371 aa, Unknown
  Bacterial polypetide isolated from the Sargasso Sea
MSKEKAILALEDGTIFEGISIGASGQVNGEIVFNTSMTGYQEILTDPSYAKQIVTLTYPHIGNTGTNSEDTESDKIWCSGLVIRSLSQAESSWRNTETLSNYLIRNNIQGISDIDTRKLTRIIREKGAQSASIFTGNSVDSNNAVDLAKDFEGLAGLDLAKEVTTESSYDWKEGTWRGCNGESDFRVAVLDFGIKKNILRILVDQGYELKIFPAKTSCQEILDFKPNGVFLSNGPGDPEPCIYAIETIKELIQISMPIFGICLGHQLLAIALGGKTSKMKFGHHGANHPVKDLKTSKVSVSSQNHGFTVEENSLPTNVEITHKSLFDGTIQGIQHSSKPFFSFQGHPEASPGPHDLAYLFTTFDKNMTKNA

SEQ ID NO: 198794 - protein, 375 aa, Unknown
  Bacterial polypetide isolated from the Sargasso Sea
KKDLSTTRPKPIEGQLILEDGSRYNGLKIGSPNMEIGEVCFNTSMTGYQEIITDPSYAGQIINFTFPHIGNVGTNLDDNESSKPYAKGIIINCDISDPSNYRSILHLDAWLKKNNVPGICNIDTRLITNRIRSKGAPKGGIIEGPINNKKTESCLKEIKKWKGLNGLDLAIDVSRKDIKIYKTKKSSKLKVVAIDYGIKQNILNCLLDLNLEVILVPAKTSVDKIISYSPNGIFLSNGPGDPKATGKYAIPIIKKLIKSGIPLFGICLGHQLISLALGAKTKKMFQGHRGANHPVKNLETEKVEITSQNHGFEVTEKSIPKDVKITHKSLFDGSVEGIRKGRNIFAVQYHPEASPGPHDSHYLFQEFKKMIKQNA

SEQ ID NO: 198795 - protein, 360 aa, Unknown
  Bacterial polypetide isolated from the Sargasso Sea
MIKKAKKTNSKIKSQINTGILVLENKKVFKGIGIGYQGEATGEVCFNTSLTGYQEIISDPSYAGQIINFTFPHIGNVGTNKEDHESDKIWARGVIINSEITSPSNYRSFLHLDYWLKKNKIVGITGLDTRNLTNFIRDKGAPKGTISFSKKGKFNINKLTNATVKWSGLKNLDLAEVVSTHKSYIWKGLKTWKKGFGYKKNNKNLFHVVAIDYGIKKNILRYFSDFNCKVTVVSCKYNAQKILALKPNGIFLSNGPGDPAATGKYAIEIIKDLIKKNLPIFGICLGHQILALALGGKTKKMKLGHRGANHPVKNLIHDKVEITSQNHGFVVVEETLPKKIEITNKSLFDNTIEGIKLKNK

SEQ ID NO: 198796 - protein, 337 aa, Unknown
  Bacterial polypetide isolated from the Sargasso Sea
MKEKHKNRIAIKSIFSPAILILENKTIFKGIGLGYRGEATGEICFNTSLTGYQEIISDPSYAGQIINFTFPHIGNVGTNNEDIESDKIWTRGVIFNSEVTDPSNYRSLKHLDIWLKKNKIVGITGLDTRSLTNFIRDKGAPKGTISNNKTGKFNIKKLIKRTIIWPGLNGMDLAKEVSTKKTYTWKGLKTWNKEEGYKKNNKKKYKVIAIDYGIKKNILRYFSNFDCEVKVVSCKESAENLIKFKPHGIFLSNGPGDPAATGKYAIPTVQKLIKSNLPVFGICLGHQILALALNAKTKKMKLGHRGANHPVKNLLSKKVEITSQNHGFEVIKESLPK

SEQ ID NO: 198797 - protein, 362 aa, Unknown
  Bacterial polypetide isolated from the Sargasso Sea
MDKHQKQTILLLDDGREFYGNSFGYHGETTGEVCFNTGMSGYQEILTDPSYCKQIVTMTSPHIGNYGVNKEDIESDNIQVAGFVIKEESEIPSNWRSELSIGKYLDQQKIVGIKDIDTRALTCHIRDNGAMNGIISSIDDDIKSLKLKLDKVPSMSGLDLAKLVTTKKSYEWSNSKGLYKVAAIDYGIKLNILRLLEDHKCDITVFPAQTTADEIIEFDPDGIFLSNGPGDPSAVTYGIEMVRSLLGKKPIFGICLGHQILSLALGAKTFKLKFGHRGINHPVRNNDTKIIEITSQNHGFAVDLDSLPKNVVSTHINLNDNTSEGIMCKEHSAFSVQYHPESSPGPHDSRYLFNQFTDMMKK

SEQ ID NO: 198798 - protein, 205 aa, Unknown
  Bacterial polypetide isolated from the Sargasso Sea
GGFDQEPYFWPSETEGVPLKVVAYDFGIKRNILRLMAALGINITIVPWDTPAEVVRQMNPDGVFLSNGPGDPAAVESAIEEIRSLLGVFPIFGICLGHQILALALNCKTYKLKCGHHGGNHPVKDYQTNKIEITSHNHGFSVDEDSLPEDVRVTHRNLNDQTVEGLESLHYSAYSVQYHPEAAPGPRDARYLFKRFVEMMGNTKR

SEQ ID NO: 198799 - protein, 358 aa, Unknown
  Bacterial polypetide isolated from the Sargasso Sea
MIKKAKKTNSKKSQNHTGVLVLENKRVFKGIGIGYQGEATGEICFNTSLTGYQEIISDPSYAGQIINFTFPHIGNVGTNKEDVESDKIWTRGVIFNSEITSPSNYRAFLHLDSWLKKNRIVGITGLDTRYLTSFIRDKGAPKGTISYSKNGKFNISKLTNSTIKWSGLKNLDLAETVTTSKNYIWKGLKTWKKETGYKKNTKNSFHVVAIDYGIKKNILRYFSNFKCKVTVVSCKTSAEKILDLKPHGIFLSNGPGDPAATGKYAIEILNKLIKKNLPIFGICLGHQILALALGGKTKKMKLGHRGANHPVKNLVHDKVEITSQNHGFVVVEETLPKKIEVTHKSLFDNTIEGIRLKT

SEQ ID NO: 198800 - protein, 98 aa, Unknown
  Bacterial polypetide isolated from the Sargasso Sea
MKLGHRGANHPVKNLMSKKVEITSQNHGFEVVKESLPKNVEITHRSLFDNCIEGIKLKNKPVFSVQYHPESNPGPQDSHYLFNDFIKEIKKYAKKKRH

SEQ ID NO: 198801 - protein, 397 aa, Unknown
  Bacterial polypetide isolated from the Sargasso Sea
MTSKQKNKKSVNSKLSQAVLVLDNKSIFKGLGLGYKGVATGEVCFNTSITGYQEIISDPSYAGQIINFTFPHIGNVGTNKEDIESDKIWTRGVIFNSEITSPSNYRSLKNLDEWLRKNKIVGITGLDTRNLTNYIRDNGAPRGTISNTKTGNFNIKKLINTSLKWPGLKGLDLAKEVSTKKIYKWKGLKTWVKGKGFQKTNKKNYKIIAIDYGIKKNILRYFSNYNCEVIVVPCKHSSDQILNLKPQGIFLSNGPGDPAATGKYSVKIIQELIKKNLPVFGICLGHQLLALALNAKTKKMKLGHRGANHPVKNLINNKVEITSQNHGFEVIKESLPKNVEITHKSLFDNSIEGIKLKNKPVYSVQYHPESNPGPQDSHYLFNEFIKDVKKYAKKKRY

SEQ ID NO: 198802 - protein, 362 aa, Unknown
  Bacterial polypetide isolated from the Sargasso Sea
MILEDGTTFSGKSIGIDSYSVGEIVFNTAMTGYQEIITDPSYHKQIVTLTYPHIGNTGTNEEDNESKDSFSSGLVIREVSPISSNWRNKLSLEDFLVRNKIVGISNIDTRKLTNHLRNNGSMNACLAANGLSHKEALSEAKSFPGLAGLDLAKEVSTKTAYEFSPNIENSDSLFHVVAIDYGVKTNILNLLSKNGCKVTVIPAQSSYDDVMSYDPDGVFLSNGPGDPEPCDYAINCIRKLLELNIPLFGICLGHQLLALASGAKTEKMKFGHHGANHPVIDIETGVVYITSQNHGFTVNEKSIPENVNITHKSLFDQSIQGIELSDKNAFSFQGHPEASPGPHDIQPLFKKFITKMKNGKKN

SEQ ID NO: 198803 - protein, 120 aa, Unknown
  Bacterial polypetide isolated from the Sargasso Sea
PLFGICLGHQILALTLGGKTKKMKLGHRGANHPVKNLIHGNVEITSQNHGFEVVKENLPKNIEVTHKSLFDNSIEGIKLKNKPVFSVQYHPESNPGPQDSVYLFQEFINNMKKNAKTKRS

SEQ ID NO: 198804 - protein, 145 aa, Unknown
  Bacterial polypetide isolated from the Sargasso Sea
MTNPYKKNAKLVLSNGIVFPGFFFGASGTAIGEIVFNTGMTGYQEVITDPSYYGQILTFTYPEIGNTGINFEDSESNINVKGIIVRNFSSNSSNWRSKKNFNQWLVEKNIIGLYGIDTRALVKILRSSGAMNGVITSLHKTDESC

SEQ ID NO: 198805 - protein, 125 aa, Unknown
  Bacterial polypetide isolated from the Sargasso Sea
MILEDGTTFSGKSIGIDSYSVGEIVFNTAMTGYQEIITDPSYHKQIVTLTYPHIGNTGTNDEDNESKDSFSSGLVIRESSPISSNWRNKLSLEDFLVKNKIVGISNIDTRKLTNHLRNNGSMNAC

SEQ ID NO: 198806 - protein, 241 aa, Unknown
  Bacterial polypetide isolated from the Sargasso Sea
KLTNSSIKWHGLNDLDLAKTVTTKKQYIWKGFKTWKKEKGFEKNKKKKYKIVAIDYGIKKNILRYFSNFNCEVIVVPCCLEAEDIIKLKPDGIFLSNGPGDPAATGKYAIDIIQKLIKTSIPIFGICLGHQLLALALKAKTKKMKLGHRGANHPVKNLINNKVEITSQNHGFEVVKESLPKNVEMTHKSLFDNSVEGIKLKNKPVFSVQYHPESNPGPQDSHYLFNQFINEVKKNAKKKRY

SEQ ID NO: 198807 - protein, 83 aa, Unknown
  Bacterial polypetide isolated from the Sargasso Sea
GRVVITSQNHGFAVDADTLPANAKVTHISLFDGTLQGFALTDKPAFCFQGHPEASPGPHDIAYLFDRFTGLMDAQKAGNTAAA

SEQ ID NO: 198808 - protein, 350 aa, Unknown
  Bacterial polypetide isolated from the Sargasso Sea
MKKDHSTTRPKPIEGQLILEDGSRFNGLKIGSPNMEIGEVCFNTSMTGYQEIITDPSYAGQIINFTFPHIGNVGTNLDDNESSKPYAKGIIINCDISDPSNYRSILHLDAWLKKNNVPGICNIDTRLITNRIRSKGAPKGGIIEGPINNRKTVSCLKEIKKWKGLNGLDLAIDVSRKDIKIYKSKKNSKLKVVAIDYGIKKNILNCLLDLNLEVILVPAKTSVEKILSYSPNGIFLSNGPGDPKATGKYAIPIIKKLIRSRIPLFGICLGHQLISLALGAKTKKMFQGHRGANHPVKNLETEKVEITSQNHGFEVTEKSIPKDVKITHKSLFDGSVEGIRKGKNIFAVQY

SEQ ID NO: 198809 - protein, 223 aa, Unknown
  Bacterial polypetide isolated from the Sargasso Sea
NLDLASIVSTSKSYKSSEGIWDINKDEYIDNKNSQFKIACLDFGIKKNILRNLNNNFFSPYVLPANSSLDEILKINPKGIFLSNGPGDPYATGKKIIPTIKEIINKKIPIFGICLGHQILNLALGGSTKKMFQGHRGGNHPVKNLENSTVEITSQNHGFEVDRNTLPNNVIETHISLFDGTNEGIKHKNLPIFSVQYHPEASPGPHDSHYLFKKFYDQVKEYA

SEQ ID NO: 198810 - protein, 192 aa, Unknown
  Bacterial polypetide isolated from the Sargasso Sea
HVVAIDYGIKKNILRYFSDFNCKVTIVSCKTDSNEILKLKPNGVFLSNGPGDPAATGKYAIPIIKKLIKSNLPVFGICLGHQLLGLALGAKTKKMSLGHRGANHPVKNLIKGNVEITSQNHGFEIVKKNLPKNIQVTHQSLFDNSIEGIKLKSKPVFSVQYHPESNPGPQDSVYLFEEFVKCMKKNAKKKRY

SEQ ID NO: 198811 - protein, 353 aa, Unknown
  Bacterial polypetide isolated from the Sargasso Sea
MKFDVKLLLENGISFEGIGFGYQKIGVGEVVFNTAITGYQEILTDPSYDGQIITFTYPHIGNTGINFEDNESKQVSARGMIVKNFCDFPSNWRSKQSLEEFLIEQKVICISDIDTRQLTKILRDEGCKVGAIYPTKNFTDEEAQFEIDNFGNIEDKDFTENVSVKEPYNFGKPKNKKTFKIVAIDFGIKENILRILQRMGGDIEVVPPSISAEEIQKKNPDGIFLSNGPGDPQVLAEPIKEVKKMMQLDIPIFGICLGHQIMSLAYGLEIEKMPFGHHGANHPVHDLKNNIVFITSQNHNFAVAEPNNRDDINITHRSLFDNSIQGIEHKEKPFYSIQCHPEASPGPKEFETL

SEQ ID NO: 198812 - protein, 298 aa, Unknown
  Bacterial polypetide isolated from the Sargasso Sea
MPLPSSRQAHLVLADGTVLTGEAFGHRGSVVGEVVFNTGMTGYQEVLTDPSYAGQLVTFTYPELGNTGVNGDDQEADLPHARGVIARQLAPQASNWRSAESLDGWMDRHGLVGICGVDTRALVRRLRDGGAINGVISSDGRSPAELLAEVRRAPSMEGLNLASQVSTPEPYQWSSPCRVGFDQRLKQRPDHPYRVVAIDFGIKRAILDRLVAHGCAVTVLPSDADLEMVLSHQPEGVFLSNGPGDPAAVDSGIDLARSLLDLPNLPLFGICLGHQILGLALGGRTFKLGYGHRGLNHP

SEQ ID NO: 198813 - protein, 379 aa, Unknown
  Bacterial polypetide isolated from the Sargasso Sea
MINPYKKNAKLVLSNGIVFPGFFFGASGTAIGEIVFNTGMTGYQEVITDPSYYGQLLTFTYPEIGNTGINFEDSESNINVKGIIVRNFSSNSSNWRSQKNFNQWLVEKNIIGLHGIDTRALVKILRSNGAMNGVITSLDKTDESCLKIISDTPKMEGLNLSKVVSTKQQYLWKSHTQTIFDLRKRYDESSKKLKIVAIDFGIKNSILNRLVSHGCEVLVLPSRSSLNDVLSNKPDGVFFSNGPGDPSSVSEGIDLAKSLIEYGEIPMFGICLGHQIFGLALGGSTYKLPFGHRGLNHPCGENNKIEITSQNHGFAIDPNSLSKDIVRITHYNLNDNTVAGLEVYNKPIFSVQYHPEAGPGPHDSDYLFEKFVSLMLERC

SEQ ID NO: 198814 - protein, 398 aa, Unknown
  Bacterial polypetide isolated from the Sargasso Sea
MRQVKNRKNKSHNFSTGILIFEDGTKFFGTGIGYEGNAVGEVCFNTSITGYQEIITDPSYSDQIINFTFPHIGNVGTNLEDNEADKVWAKGVILNSNVTEPSNYRSIKKLDRWLKKRKVIGIVGLDTRVITNYIRDKGAPKGSIQFLRKGNHNLKKLLKNARSWNGLLGLDLAKKVTCKKIYKWKSLKSWNKKNGYVKNNKNKYQIIAIDYGMKKNQLRCFSDINCGVTVVPANFPADEILKLKPHGVFLSNGPGDPAATGSYAIPIVKKLIEKKIPIFGICLGHQILSLALGAKTKKMSRGHRGANHPVKDLTTNKVEITSQNHGFEVDSKSIPKNVKVTHKSLFDGSIEGIEVKNKKLFSVQYHPEANPGPQDSKYLFEKFLKNIKSNKNGKKKRY

SEQ ID NO: 198815 - protein, 302 aa, Unknown
  Bacterial polypetide isolated from the Sargasso Sea
MNKKAKKINSNTKSQINTGVLVLENKKVFKGIGIGYQGEATGEVCFNTSLTGYQEIISDPSYAGQIINFTFPHIGNVGTNKEDHESDKIWAKGVIINSEITTPSNYRSFLHLDSWLKKNKIVGITGLDTRSLTSFIRDKGAPKGTISYSKKGKFNINKLTNSTIKWSGLKNLDLAEVVSTQKNYIWKGLKTWKKELGYKKNNKNSFHVVAIDYGIKKNILRYFSEFNCKVTVVSCKTSAHKILALKPSGIFLSNGPGDPAATGKYAIEIINDLIKNNLPIFGICLGHQILALALGGKTKKRN

SEQ ID NO: 198816 - protein, 132 aa, Unknown
  Bacterial polypetide isolated from the Sargasso Sea
YSNYKKFYKTQPSLFGICLGHQLLGLALGAKTKKMSLGHRGANHPVKNLIRGNVEITSQNHGFEIVKKNLPKNIQITHQSLFDKSIEGIKLKSKPIFSVQYHPESNPGPQDSVYLFDEFIKSMKKNAKKKRY

SEQ ID NO: 198817 - protein, 101 aa, Unknown
  Bacterial polypetide isolated from the Sargasso Sea
MQKAYLILEDGSIFEGNSIGFSSTKYGEVVFNTSMTGYQEILTDPSYSGQIVVATYPLIGNYGINSSDSQSKQIQVKGYVIREYCEFPSHYDSELDLDTYL

SEQ ID NO: 198818 - protein, 163 aa, Unknown
  Bacterial polypetide isolated from the Sargasso Sea
MINPYKKNAKLVLSNGIIFPGFSFGASGTAVGEIVFNTGMTGYQEVITDPSYYGQILTFTYPEIGNTGINLEDSESINSVKGIIVRNYSSNNSNWRSLNNFDQWLVEKNIIGLYGIDTRALVKILRSNGSMNGVLTSEDIPLESCLKIIEETPKMEGLNLSKL

SEQ ID NO: 198819 - protein, 371 aa, Unknown
  Bacterial polypetide isolated from the Sargasso Sea
MSNLKAILALEDGTIFEGRSIGASGKTNGEIVFNTSMTGYQEILTDPSYAKQIVTLTYPHIGNTGINHEDVESDAVWCAGLVIRSNSFLQSSWRSENSLTDYLKANSILGISDIDTRKLTRLIRTKGAQAASILVSEDINKDEAIDEARKFKGLAGMDLAQEVTTPESYTWDKGVWRQPIQDSQLKVVALDFGIKQNILRILASRGFDLKIVPAKTTADEILKLKPNGVFLSNGPGDPEPCDYAIQTIKELALREIPLFGICLGHQLLALSFGGKTSKMKFGHHGANHPVQDLKTMKVAVTSQNHGFTVEEDSLPSELKITHKSLFDGTVQGIEHKTLPAFSFQGHPEASPGPHDLKNLFQKFEDNMKNNA

SEQ ID NO: 198820 - protein, 370 aa, Unknown
  Bacterial polypetide isolated from the Sargasso Sea
MLEDGSTFSGHSIGSNGVSVGEVVFNTSMTGYQEIITDPSYNKQIITFTNPHIGNTGTNNDDLESRQAYASGIIIRDEEILSNNWRQTGNLKDFLKKQNIIGISGIDTRKLTKILRTKGSQNGCIVTGKYSLDDAKQKLCEFQGLEGTDLAIQVTTKKEYDWDKRSIDIYRNTNSKNSDIKYDVIAYDYGIKHNILRILSDKSCKIKVVPADYPVKKVLESKPDGVFLSNGPGDPKACIYAIKNIKEILKHKIPMFGICLGFQLLALASDASTTKMKFGHHGANHPVMDLSTKKVFITSQNHGFMVDDENLPENIIKTHVSLFDGSLQGFEIKDSLAFGFQGHPEASPGPNDIKEIFGKFIEMMDRRKNA

SEQ ID NO: 198821 - protein, 78 aa, Unknown
  Bacterial polypetide isolated from the Sargasso Sea
MKKNSAILLLDDGRKFIGKSFGFIGETIGEVCFNTGMTGYQEILTDPSYCKQIVTMTSPHIGNYGINEEDVESKKIQV

SEQ ID NO: 198822 - protein, 264 aa, Unknown
  Bacterial polypetide isolated from the Sargasso Sea
LFKKRKNCWDSNIDTRALTRHIRDCGAMNGIISSIEKDVNILKRKLDLVPSMNGQDLVKEVTCNEPYTWANKSEGSFRVAAIDYGIKHNILRLLTERDCTINVFPANISPEEIMETDPDGIFLSNGPGDPSAVSYGIETVKALLGKKPIFGICLGHQILALALGATTSKLKFGHRGINHPVKRIATGSVEITSQNHGFVVGLESLPKNVVPTHVNLNDNTSAGISCDELSAFSVQYHPESSPGPHDSRYLFNHFIDLMKNAKEK

SEQ ID NO: 198823 - protein, 434 aa, Unknown
  Bacterial polypetide isolated from the Sargasso Sea
MPGDAAKPRAPRAGFASRQRRPRPASDRARPRSAALARQGKQVGSRVFPKEPPVLPSFTPALLALADGTVFRGYSIGAEGHTIGEVVFNTAITGYQEILTDPSYSRQIVTLTYPHIGNVGVNAEDVEATKVHAAGLIIRDLPSLASNFRMDRTLGDYLRDEGVVAIAGIDTRKLTRILRDKGAQNGCILTGSDDEAKAIELARSFPGLAGMDLAKVVSTTKPFEWKQTEWRLEGGYGMQEAPKYRVVAYDFGVKYNILRMLAERGCHVTVLPAQASAEDALALNPDGVFLSNGPGDPEPCDYAIAATKQFIERGVPTFGICLGHQIMGLAVGAKTLKMKTGHHGANHPVKDLGDGRVVITSQNHGFAVDADSLPANARVTHVSLFDGTLQGFELTDKPAFCFQGHPEASPGPHDIGYLFDRFTALMDAAKRRNA

SEQ ID NO: 198824 - protein, 82 aa, Unknown
  Bacterial polypetide isolated from the Sargasso Sea
VKNLINNTVEITSQNHGFEVDRASLPNEVEETHVSLFDGSNEGIRHKTLPVFSVQYHPEASPGPHDSNYLFREFYKLIKLHA

SEQ ID NO: 198825 - protein, 285 aa, Unknown
  Bacterial polypetide isolated from the Sargasso Sea
NCDISDPSNFRSIQHLDKWLKKKGIPGLCNIDTRSITNRIRSKGAPKGGIVKKLINKRHEKKFLSEVKKWQGLNNLDLAIEVTRKKIQKFKSKSKSKLNIVAIDYGMKQNILNCLLELNINVIVVPANTTSDEILEYNPNGIFLSNGPGDPKATGKYAIQTIKDLIHQKIPIFGICLGHQLISLALGAKTKKMFQGHRGANHPVQNLENKKVEITSQNHGFVVTEKSIPKDVKITHKSLFDGSVEGIEHKNKEIFAVQYHPEASPGPHDSQYLFQKFKRMININA

SEQ ID NO: 198826 - protein, 105 aa, Unknown
  Bacterial polypetide isolated from the Sargasso Sea
MGGKTKKMKLGHRGANHPVKNLISENVEITSQNHGFEVVKESLPKNIQITHKSLFDNSIEGIRLKNNPVFSVQYHPESNPGPQDSVYLFQEFITNMKKNAKKKRS

SEQ ID NO: 198827 - protein, 398 aa, Unknown
  Bacterial polypetide isolated from the Sargasso Sea
MRQVRNKKNKSQNFSTGILVFEDGTKFFGTGIGHEGSAVGEVCFNTSITGYQEIITDPSYSDQIINFTFPHIGNVGTNIEDNEADKTWTKGVILNSNITDPSNYRSIKKLDKWLKKRKIIGIVGLDTRVITNYIRDKGAPKGAIQFLRKGNHNLKKLLKITKSWNGLLGLDLAKKVTCKNIYKWKSLKSWDKKNGYVKNKKNIYQIIAIDYGMKKNQLRCFSDINCGVTVVPANFPADKILKLKPHGVFLSNGPGDPAATGRYAIPIVKKLIDNKIPIFGICLGHQILSLALGAKTKKMSLGHRGANHPVKDLTTNKVEITSQNHGFEVDAKSIPKNVKVTHKSLFDGSIEGIEVKDKKLFSVQYHPEANPGPQDSKYLFEKFLNNIKSNKNGKKKRY

SEQ ID NO: 198828 - protein, 366 aa, Unknown
  Bacterial polypetide isolated from the Sargasso Sea
MSTNQPAVLLLEDGRVFNGESFGYIGQTIGEVCFNTGMSGYQEILTDPSYCKQIVTMTAPHIGNYGVNPEDIESKHIQVSGFAIKEETTIPSNWRSVQSIGDYLKEQKIAGIKSIDTRALTRHIRNQGAMNGIISSTIVDVDTLKKELSKAPSMNGLDLAKAVTTKEKFRWTKKKKMNYKVAAIDYGIKQNILRLLEENSCDITVFPAETDSQEIINFNPDGVFLSNGPGDPSAVTYGIAMVKDLLGKKPIFGICLGHQILALALGAKTFKLKFGHRGINHPVKNLQTGVVEITSQNHGFAVDLDTLPSNVIPTHVNLNDNTSAGLMCKDFPAFSVQYHPESSPGPHDSRYLFQNFIKMMKDAKKN

SEQ ID NO: 198829 - protein, 373 aa, Unknown
  Bacterial polypetide isolated from the Sargasso Sea
MTEKKVYLYLDSERFFEGFSVGKNADTCGEVVFNTSMSGYQEIISDPSYTDQIINFTYPHIGNVGTNDDDLESDSNGCNGVIIRDPSTITSNWRKQDDLSNFLKTKNISGIYGIDTRKVTRIIRNEGAKVGAIVSGKDHKKKALKLIEEFVPLGGKDLASVVSTKKVYEWKEPSWRKDFDDNNLKIVAIDFGVKHNILRMLKDRGFQVIVVPAKTTAAEIMAMKPDGVFLSNGPGDPEPCKYAIKCIKELRTKRIPMFGICLGHQLLGLALGMKTIKMKFGHHGANHPVKELDSNRVFITSQNHGFTIDSKSIPEDVKITHLSLFDETIQGIETSDKRCFSFQGHPEASPGPQEIQELFDKFLTVIKSNAKKK

SEQ ID NO: 198830 - protein, 165 aa, Unknown
  Bacterial polypetide isolated from the Sargasso Sea
FLQTSANDILKLKPNGIFLSNGPGDPAATGKYAIPIIKEFIRNNLPVFGICLGHQLLGLALGAKTKKMNLGHRGANHPVKNLIKGNVEITSQNHGFEIVKKNLPKNIQVTHQSLFDNSIEGIKLKSKPVFSVQYHPESNPGPQDSVYLFEEFINSMKKNAKKKRY

SEQ ID NO: 198831 - protein, 298 aa, Unknown
  Bacterial polypetide isolated from the Sargasso Sea
MTTKQKKKNSIKPQFSPAILVLENKSIFRGIGLGYQGNATGEICFNTSLTGYQEIISDPSYAGQIINFTFPHIGNVGANNEDLESDIIWTRGVIFNSEITSPSNYRSLKNLDEWLKKNKIVGITGLDTRSLTNFIRDKGAPKGTISNKKNGNFNIKKLINISTKWPGLNGLDLAKDVTTKKTYTWKGLKTWQKGKGFKKNRKKSIRIVAIDYGIKKNILRYFSNFNCEVKVVSCKQTAEEILKLKPNGIFLSNGPGDPAATGKYAIQTVKKLINNNLPVFGICLGHQILALALNGKTK

SEQ ID NO: 198832 - protein, 313 aa, Unknown
  Bacterial polypetide isolated from the Sargasso Sea
MRQVKNRKNKSNNFSTGILVFEDGTKFFGTGIGYEGNAVGEVCFNTSITGYQEIITDPSYSDQIINFTFPHIGNVGTNLEDNEADKVWAKGVILNSNVTEPSNYRSIKKLDKWLKKRKIIGIVGLDTRVITNYIRDKGAPKGSIQFLRRGNHNLKKLLKNARSWNGLLGLDLAKKVTCKKVYKWKSFKSWTKKNGYVKNNKNKYQIIAIDYGMKKNQLRCFSDINCGVTVVPANFPADEILKFKPHGVFLSNGPGDPAATGSYAIPIVKKLIKNKIPIFGICLGHQILSLALGAKTKKMSLGHRGANHPVKDL

SEQ ID NO: 198833 - protein, 53 aa, Unknown
  Bacterial polypetide isolated from the Sargasso Sea
MDKNCILYLENGEVFTGSSFGFEGEVLGEIVFNTSMTGYQEILTDPILIILKS

SEQ ID NO: 198834 - protein, 378 aa, Unknown
  Bacterial polypetide isolated from the Sargasso Sea
MKESNAILLFENGTKFHGQSIGIDGIKSGEVVFNTSMTGYQEILTDPSYHSQIINFTNPHIGNTGINEEDIESNQIHVSGMIIRDLEIRASSWRKTSTLSEYLVKNNVIGMSGVDTREITRLLRDKGSLNACMMCNKNLSSHDMAAELSKFPGLVGQDLAKLVSTKKIYDWNEGSIHLNGEKIKKPRHELKVIAYDFGIKQNILRILKDLGCTVKVVPATFSAEEALEYNPDGIFLSNGPGDPEACHYAVKNIKELLKHKIPIFGICLGFQLLGISVGGKAIKMKFGHHGANHPVIDLDTKKVLITSQNHGFMIDEKSLPSNIRLTHRSLFDDSLQGIELSDCYAYGFQGHPEASPGPHDIHHIFNKFINFMKESKNA

SEQ ID NO: 198835 - protein, 349 aa, Unknown
  Bacterial polypetide isolated from the Sargasso Sea
FDVGELVFNTSMTGYQEIITDPSYKKQIITFTHPHIGNTGINIEDSESNSIHASGIVVKNYCSKPSNWRSKFNLEEFLVKNEIIGISDIDTREITSLLREKGAMGCCIASLSLISENDAVSAAKNFDGLEGMDLAKVVSTDSDYEWNKGVWPENNSSEKSYSVVAYDYGIKENILRLLTEYVGKVKVVNAKTTFEEIIELNPQGIFLSNGPGDPEPCDYAIKNIRKFISQKIPIFGICLGHQLLALAGGANTYKMKFGHHGANHPVQDILTKEVFITSQNHGFAVDEKTLPKNISATHLSLFDQSLQGIEFKDVPAFSFQGHPEASPGPQEIQTLFKKFSLMVKEYAKT

SEQ ID NO: 198836 - protein, 371 aa, Unknown
  Bacterial polypetide isolated from the Sargasso Sea
MTKEKAILALADGTIFEGTSIGASGQVNGEIVFNTSMTGYQEILTDPSYAKQIVTLTYPHIGNTGTNSEDTESDKIWCSGLVIRSLSQAESSWRNTEALSDYLIRNNIQGISDIDTRKLTRIIREKGAQSASIFTGNSVDSNNAVDLAKDFEGLAGLDLAKEVTTESSYDWKEGTWRVCNGESDFRVAVLDFGIKKNILRILVDQGYELKIFPAKTSCQEILDFKPNGVFLSNGPGDPEPCIYAIDTIKELIQISMPIFGICLGHQLLAIALGGKTSKMKFGHHGANHPVQDLKTSKVSVSSQNHGFTVEENSLPTNVEITHKSLFDGTIQGIQHSSKPFFSFQGHPEASPGPHDLAYLFSTFDKNMTKNA

SEQ ID NO: 198837 - protein, 359 aa, Unknown
  Bacterial polypetide isolated from the Sargasso Sea
ATGEVCFNTSLTGYQEIISDPSYAGQIINFTFPHIGNVGTNKEDHESDKIWARGVIFNSEITTPSNYRSFLHLDSWLKKNKIIGITGLDTRSLTNFIRDKGAPKGTIAYSKKGKFNINKLTNSTIKWSGLKNLDLAEVVSTQKNYIWKGLKTWKKEFGYKKNNKNSFHVVAIDYGIKKNILRYFSDFSCKVTVVSCKTSAQKILALKPNGIFLSNGPGDPAATGKYAIEIIKELIKKNLPIFGICLGHQILALALGGKTKKMKLGHRGANHPVKNLIHDNVEITSQNHGFEVVKETLPKNIEVTHKSLFDNSIEGIRLKNKPVFSVQYHPESNPGPQDSVYLFQEFINNMKKNAKKKRS

SEQ ID NO: 198838 - protein, 282 aa, Unknown
  Bacterial polypetide isolated from the Sargasso Sea
MIFENGEVLWGYGLGVKKYVIGELCFNTSQTGYQEALTDPSYTKQIITFTFPHIGIVGTNSEDQESKKIFADGCIINQPSDFYSSWRAEDDLNSYFIKNNIPCLYGVDTRYLTKKLVNEGPQKIALIYFGEEDNSLKVLKSEIQKWSGLENLDLAKIVSTNVQYKWNEGTWSKYHNKKNIYKYRVTCLDFGIKRNILRNLHEFNLNSTILNLSASFDDIIATKPDGIFLSNGPGDPYATGEKILDTLKKLIQTKIPIFGICLGHQILSIALGAKTKKMFQGH

SEQ ID NO: 198839 - protein, 397 aa, Unknown
  Bacterial polypetide isolated from the Sargasso Sea
MIKKQKNKIAIKHQFPTGILVLDNKLVFRGIGLGYQGTSTGEVCFNTSLTGYQEIISDPSYAGQIINFTFPHIGNVGTNNEDLESDKIWTKGVIFNSEITSPSNYRALHTLDEWLKRNQIVGLTGLDTRSLTNLIRDKGAPKGTITNNKKGKFNIKKLTNMSVKWPGLNGLDLAKEVSTKKTYLWKGFKTWKKDVGYKKNTKKKFKIIAVDYGIKKNILRYFSDYNCEVKVVSCKMTADEIVKLKPDGIFLSNGPGDPAATGKYAIDTVQKLIKLNYPIFGICLGHQILALALNAKTKKMKLGHRGANHPVKNLINSSVEITSQNHGFVVIEKSLSKNIQITHKSLFDNTIEGIKLKNKPVFSVQYHPEANPGPQDSQYLFKNFIQDVKKHAKKKRH

SEQ ID NO: 198840 - protein, 100 aa, Unknown
  Bacterial polypetide isolated from the Sargasso Sea
MPLGHRGANHPVKNLITNKVEITSQNHGFEVDLKSIPKEVKVTHKSLFDGSIEGVEVKEKKLFSVQYHPEANPGPQDSKYLFEKFLNNIRRRKNGKKKRY

SEQ ID NO: 198841 - protein, 399 aa, Unknown
  Bacterial polypetide isolated from the Sargasso Sea
MGKNKLHQSYIEILKKNNHSALLILETGEVFHGSGYGKPGIKMGEVCFNTSLTGYQEIITDPSYNGQIINFTFPHIGNIGTNQEDNEAKKSYASGMITRELPTGSSNWRSNKDLNDWLFEKNITGISGLDTRQLTKIIKDKNAPMGLISYNLNKKFNVDALKQKLLSHPKIKGSNLVPSVSSIKSFNWDKSTSWPKNINSNKNKIFHILAYDFGIKHNILRCLKDLNFKITVVPYNFDFEELKSLNPDGIFLSNGPGDPFETYKSIKKNFDKLLNLNLPIFGICIGHQLLALAFGAQTEKMKQGHRGANHPVYRLKDKTVEITSQNHGFKVVEETLPSFLKITHKSLFDGTIEGLEHKSKPIFSVQYHPEASPGPHDSRYLFQRFYNLISDRSKNAQKK

SEQ ID NO: 198842 - protein, 45 aa, Unknown
  Bacterial polypetide isolated from the Sargasso Sea
MANSALLVLEDGSVFKGTAIGATGSAVGEVVFNTSMTGYQEILTD

SEQ ID NO: 198843 - protein, 366 aa, Unknown
  Bacterial polypetide isolated from the Sargasso Sea
MYKKALLLNQNGDEFLGWTTELFQPATGELIFNTAMTGFVEILSDPSYINQIVTFTSSHVGNYGMSQRDFESNMPKIEAAIGNSFTDFPSSWRSEKSITSWLKEYDIPYSGGFDVRNITKYLRDNGSSMFALGVDIDIKDLKDILYKAKDILGDNSAMTAGNQEDRDTSTDGKIGIMDLGAKKSIVNVLEDHDYEVVMISPTTMTDEILKMNLRGLLISNGPGDPRSLLTVINTIKELIGKLPIFGICLGHQILGLACGLKVKKMQFGHHGSNHPVVIDGVKKALITAQNHGFSIEEFGDSYKHKNFGNINVFAKNLNDGSNEGISLWDSMAYSVQFHPESGPGTTDGLQIFNPFFEMIENNYAKK

SEQ ID NO: 198844 - protein, 276 aa, Unknown
  Bacterial polypetide isolated from the Sargasso Sea
KGIVAIAGVDTRRLTRILRAKGSLSGCIIAGSAATDSDIENKALKEAKGFEGLQGMDLAKIVTQPARDWTQSRWSISDGYAQQTETKFKVVAYDFGIKNNILRLLAEKGCDLSVVPAQTSADEALKLKPDGIFLSNGPGDPEPCDYAISAIRKFFEVEIPVFGICLGHQLLSLASGAKSLKMEHGHHGANHPVKDLETEAVVITSQNHGFAIDESSLPENLECTHRSLFDESVQGVRRLDLPVFGFQGHPEASPGPQDCEYLFDRFIDLMNENRNA

SEQ ID NO: 198845 - protein, 250 aa, Unknown
  Bacterial polypetide isolated from the Sargasso Sea
NKKGNFNIKKLINTSTKWPGLNGLDLAKEVTTKKTYTWKGLKTWEKGKGFKKNKKKSLRIVAIDYGIKKNILRYFSNYNCEVKVVSCKQTAEEILKLKPNGIFLSNGPGDPAATGTYAIQTVQKLISSNLPVFGICLGHQILALALNGKTKKMKLGHRGANHPVKNLDNKKVEITSQNHGFEVIKESLSKNIRITHKSLFDNSIEGIKLKNKPVFSVQYHPESNPGPQDSHYLFNDFIKDVKKYAKKKRH

SEQ ID NO: 198846 - protein, 134 aa, Unknown
  Bacterial polypetide isolated from the Sargasso Sea
GSKIVDVIKKLIDDNIPIFGICLGHQILGLALNAKTKKMFQGHRGSNHPVKNLATGIVEITSQNHGFEVDRDSFGKDIIETHVSLFDGTNEGLRHKHLPVFSVQYHPEASPGPHDSHYLFEEFYKLIEKNAKKN

SEQ ID NO: 198847 - protein, 113 aa, Unknown
  Bacterial polypetide isolated from the Sargasso Sea
FGICLGHQILSLALGAKTKKMFQGHRGANHPVKNIQTSQVEITSQNHGFEVDKNSFPSNIIETHISLFDGTNEGIEHKELPIFSVQYHPEASPGPHDSHYLFKKFYKEVEKYA

SEQ ID NO: 198848 - protein, 71 aa, Unknown
  Bacterial polypetide isolated from the Sargasso Sea
MKEAILLLQDGSLFSGKSLGHIGETVGEVCFNTGMTGYQEILTDPSYCKQIVTMTSPHVGNYGINANDLES

SEQ ID NO: 198849 - protein, 384 aa, Unknown
  Bacterial polypetide isolated from the Sargasso Sea
IRHRRIAEGELVFTTGMCGYQESLTDPSFAGQVLTFTYPLLGNYGVHPGVSESSSVHPRGVVCKQHMTFPDHRDSVGSVHDLLVAHNIPGIEGIDTRALTRRVREHGTLLCVFGPAERADEMATILREMTPPDADDLVAEVTCDEPRLLNPGATDEKGESLPRLAAIDCGVKHNILRELCRRFEVVWCPASMTLEEMNRDWSPDALFASNGPGDPAHPGAATDARKTLATAVRQGMPVMGICLGHQLMGLAAGLRTYKLRYGHRGSNQPVMDLETRRVHITSQNHGFAVEDPIQGMLAPHPSGACSEVTDNVLGAEFKVRHVNSNDGTVEGLDLLDKPAFTIQFHPEACPGPHDASPLFDRFQNMVAEHLSRAGAEIVTKDGGA

SEQ ID NO: 198850 - protein, 366 aa, Unknown
  Bacterial polypetide isolated from the Sargasso Sea
MQKLKKAILFLEDGLFFTGKSLGSNGETFGEVCFNTGMTGYQEILTDPSYSNQMIVMSSPHIGNYGTNNNDTESEKVYATGFIIKSESLQPSNWRSEESLSSFLKKHNIVGIQDIDTRALTIHIRKNGAMRGIISTEDFNLDSLVSKIENIPKMEGQDLAIKVARKKKVILSNTDNPVYKIAAIDFGMKSNIYDIMLDHKAEVEIFPANVSHDEILASNPDGVFLSNGPGDPAAVTYAIETVKNLLGKKPIFGICLGHQILALALGANTFKMKFGHRGINQPVKNLITNKVEITSQNHGFAVDKDSLPSNVTVTHKHLNDDTVAGISCNDISAYSVQYHPEASPGPHDSRYVFKEFFNMMKSNAKT

SEQ ID NO: 198851 - protein, 342 aa, Unknown
  Bacterial polypetide isolated from the Sargasso Sea
YQTHPMSGQIINFTFPHIGNVGTNKEDFESDKIWTKGVIFNSEITSPSNYRSFQHLNAWLKKNKIVGITGLDTRSLTNFIRDKGAPKGTIAYSKKGKFNISKLTNLTIKWSGLKNLDLAETVTTPKNYIWKGLKTWKKKIGYKKNTKNSFHVVAIDYGIKKNILRYFSDFKCKVTVVSCKTSAKNILSLKPNGIFLSNGPGDPAATGKYAIKIIKSLIEKKLPLFGICLGHQILALALGGKTKKMKLGHRGANHPVKNLINDNVEITSQNHGFEVVEENLPKNIEVTHKSLFDNSIEGIKLKNKPVFSVQYHPESNPGPQDSVYLFQEFINNMKKNAKKKRS

SEQ ID NO: 198852 - protein, 365 aa, Unknown
  Bacterial polypetide isolated from the Sargasso Sea
MYKKALLVNENGDEFIGWSTEEFKPATGELIFNTAMTGFVEILSDPSYINQIITFTSSHVGNYGMSKTDFESSEPKIEAAIANSFTYNPSSWRSEKSITDWLNEYNIPFSGGFDVRAITTHLRDVGSDMYAFGTDIDAKDLKKLLKKAKSIIGDDSALKAGSGNSEFKKTKGKIGILDLGAKTSIANVLKEKNFDTVLINPETKPDEILSLELSGLLISNGPGDPRSLTQVIENVKNLIGKLPIFGICLGHQILGLACGLNVEKLDFGHHGSNHPVKIDGIKKALITSQNHGFSVESLNEPIKHEKYGNIKAYATNLNDGSNEGISLWDSNAYSVQFHPESGPGTTDGLQIFNPFIEMIEEKHAS

SEQ ID NO: 198853 - protein, 397 aa, Unknown
  Bacterial polypetide isolated from the Sargasso Sea
MTIKRKKKVQIKSQFSPAILVLENKSFFKGMGIGYEGDATGEICFNTSLTGYQEIISDPSYAGQIINFTFPHIGNVGTNNEDIESEKIWTRGVIFNSEITDPSNYRSLQSLDQWLKKNKIVGITGLDTRSLTNFIRDKGAPKGTISNKKSGNFNINKLIKISNKWPGLSGMDLAKIVTTSKTYTWKGVKTWKKGKGYEKNKNKKIRIVAIDYGIKKNILRYFSNYDCDVKVVSCKKTAEDILKLKPQGIFLSNGPGDPAATGTYAIKTVQSLIKSNIPIFGICLGHQILALSLNAKTKKMKLGHRGANHPVKNLVNNKVEITSQNHGFEVIENSLSKNIQITHKSLFDGSIEGIKLKRKPIFSVQYHPEANPGPQDSKYLFSDFIKEVKKYAKKKRH

SEQ ID NO: 198854 - protein, 144 aa, Unknown
  Bacterial polypetide isolated from the Sargasso Sea
GPGDPAATGKYAINIIQKIIKTNIPIFGICLGHQLLALALKAKTKKMKLGHRGANHPVKNLINSKVEITSQNHGFEVIKNSLPKNVEMTHKSLFDNSVEGIKLKNKPVFSVQYHPESNPGPQDSHYLFNQFINEVKKNAKKKRY

SEQ ID NO: 198855 - protein, 290 aa, Unknown
  Bacterial polypetide isolated from the Sargasso Sea
VYATGFIIKSESLQPSNWRSEESLSSFLKKHSIVGIQDIDTRALTIHIRKNGAMRGIISTEDFNLDSLASKIENIPKMEGQDLAIKVARNKKVILSNTDNPVYKIAAIDFGMKSNIYDIMLDHKAEVEIFPANVSHDEILLSNPDGIFLSNGPGDPAAVTYGIETVKNLLGKKPIFGICLGHQILALALGANTFKMKFGHRGINQPVKNLITNKVEITSQNHGFAVDEDTLPSNVTVTHKHLNDDTVAGISCNDISAYSVQYHPEASPGPHDSRYVFKEFFNMMKSNAKT

SEQ ID NO: 198856 - protein, 397 aa, Unknown
  Bacterial polypetide isolated from the Sargasso Sea
MIKKLKKAHLKNSQKNTAILVLENKKIFKGIGIGFQGEATGEVCFNTSLTGYQEIISDPSYAGQIINFTFPHIGNVGTNKEDFESDKIWTKGVIFNSEITSPSNYRSFQHLDAWLKKNKIVGITGLDTRSLTNFIRDKGAPKGTIAYSKKSKFHINKLINSTIKWSGLKNLDLAEKVTTQKNYIWKGLKTWRKEHGYRKNNQNSFHVVAIDYGIKKNILRYFSDFKCKVTVVSCKTTAEKILSLKPNGVFLSNGPGDPAATGKYAIQIIQNLIKKKMPLFGICLGHQILALALGGKTKKMKLGHRGANHPVKNLIKDNVEITSQNHGFEVVRENLPKNIQITHKSLFDNSIEGIRLKNNPVFSVQYHPESNPGPQDSVYLFQEFINNMKKNAKKKRS

SEQ ID NO: 198857 - protein, 398 aa, Unknown
  Bacterial polypetide isolated from the Sargasso Sea
MKKKAKKTNSKTKSQINTGVLVLENKKVFKGIGIGYQGEATGEVCFNTSLTGYQEIISDPSYAGQIINFTFPHIGNVGTNKEDHESDKIWAKGVIINSEITSPSNYRSFLHLDSWLKKNKIVGITGLDTRSLTSFIRDKGAPKGTISYSKKGKFNINKLTNSTIKWSGLKNLDLAEVVSTQKNYIWKGLKTWKKEVGYKKNKENSFHVVAIDYGIKKNILRYFSDFNCKVTVVSCKTSAHKILALKPSGIFLSNGPGDPAATGKYAIEIINDLIKNNLPIFGICLGHQILALALGGKTKKMKLGHRGANHPVKNLVHDKVEITSQNHGFVVVEETLPKKIEVTHKSLFDNTIEGIKLKNKPIFSVQYHPESNPGPQDSVYLFQEFINNMKKNAKKKRY

SEQ ID NO: 198858 - protein, 298 aa, Unknown
  Bacterial polypetide isolated from the Sargasso Sea
MPQPSSRQAHLVLADGTVLTGDAFGHRGSVVGEVVFNTGMTGYQEVLTDPSYAGQLVTFTYPELGNTGVNGDDQEADHPHARGVIARQLAPCASNWRCSESLDDWMERHGLVGICGVDTRALVRRLRDGGAINGVISSDGRSPADLLAEVRRAPSMEGLNLASQVSTTEPYEWSSPCRVGFDQRLKQHPDLPYRVVAIDFGIKRAILDRLVAHGCAVTVLPSDADLDTVLSHQPEGVFLSNGPGDPAAVDSGIDLARSLLELANLPLFGICLGHQILGLALGGKTFKLGYGHRGLNHP

SEQ ID NO: 198859 - protein, 190 aa, Unknown
  Bacterial polypetide isolated from the Sargasso Sea
SFSVVAYDYGIKENILRLLTEHVGKVHVVNAKTPFEEIIKLNPKGIFLSNGPGDPEPCDYAIENIKKCLMQKLPIFGICLGHQLLALAGGAKTYKMKFGHHGANHPVQDIITKDVFITSQNHGFAVDEKTLPPNIKVTHLSLFDQSLQGIEFNDAPAFSFQGHPEASPGPQEIQILFKKFSLMVREYAKT

SEQ ID NO: 198860 - protein, 391 aa, Unknown
  Bacterial polypetide isolated from the Sargasso Sea
MEVALTKSALLVLEDGTVFTGTAIGADGLSVGEVVFNTSMTGYQEILTDPSYSRQIVTLTYPHIGNTGTNNEDVESNGVHACGLIIRDLPLIASSFRNQQTLSDYLKANNVVGIADIDTRKLTRILREKGAQAGCIMAGADLDEAKALAAAKAFPGLKGMDLAKEVTTEKAYPWRKGSWRLVGGLPEDTPAEALKYKVVAYDYGVKQNILRMLVDRGCDVTVVPAKTPAADVLAMNPDGVFLSNGPGDPEPCDYAIEAIQQILKTDTPIFGICLGHQLLALASGAKTLKMKFGHHGANHPVSNIEKGNVMITSQNHGFAADEATLPANIKVTHKSLFDGSLQGIHLTDKPAFSFQGHPEASPGPNDAAPLFDHFIELIEHYRLVTKSQNAK

SEQ ID NO: 198861 - protein, 245 aa, Unknown
  Bacterial polypetide isolated from the Sargasso Sea
HIRNQGAMNGIISSTSVNIDNLKSKLLKAPSMNGLDLAKEVTTTKKFRWAKENNSSNYRVAAIDYGIKHNILRLLESHSCDVTVFPAKTTSQDIIDFNPDGVFLSNGPGDPSAVTYGISMVKDLLGKKPIFGICLGHQILALALGAKTFKLKFGHRGINHPVKNLQTGAVEITSQNHGFAVDLESLPSNVIPTHVNLNDNTSEGIRCNDIPAFSVQYHPESNPGPHDSRYLFNDFINMMKNAKKN

SEQ ID NO: 198862 - protein, 205 aa, Unknown
  Bacterial polypetide isolated from the Sargasso Sea
SWQLGKGHVTPAADQLKYLLVAYDFGVKRNILRMLVDRGCRLTVVPAKTPAAEVLALNPDGIFLSNGPGDPEPCDYAIEAIEAFLKTNIPVFGICLGHQLLGLASGAKTIKMKFGHHGANHPVKSLDDNTVMITAQNHGFAVDEQTLPDCLRATHVSLFDGSLQGIHRTDRPAFSFQGHPEASPGPHDCAGLFDHFIELIKQYRA

SEQ ID NO: 198863 - protein, 397 aa, Unknown
  Bacterial polypetide isolated from the Sargasso Sea
MTSKQKNKKSNFSNLRSAILVLENKSIFKGIGLGYQGEVTGEVCFNTSLTGYQEIISDPSYAGQIINFTFPHIGNVGTNNEDIESDKIWTRGVIFNSEITSPSNYRSLQNLDNWLKKNRIVGITGLDTRSLTNFIRDKGAPKGTIANFKDGKFNISKLIKKSINWPGLKGMDLAKEVTTPKTYTWKGLKTWKKIKGFEKNKKRKFKIVAIDFGIKKNILRYFSNYDCEVKVVSCKKKSDEIFKLKPHGVFLSNGPGDPAATGKYAINVVKNLIQAGLPLFGICLGHQILALALNAKTRKMKLGHRGANHPVKNLITDRVEITSQNHGFEVIKESLKKNTEITHLSLFDNSIEGIRLKNKPVFSVQYHPEANPGPQDSKYLFSHFMEYVKKYAKKKRY

SEQ ID NO: 198864 - protein, 397 aa, Unknown
  Bacterial polypetide isolated from the Sargasso Sea
MIKKQKDNSNKSSNFYSGILVLENKKIFKGIGIGYQGTATGEVCFNTSLTGYQEIISDPSYAGQIINFTFPHIGNVGTNKEDHESDKIWTKGVIFNSEITNPSNYRALKNLDIWLKKNKIVGLTGLDTRSLTNFIRDTGAPKGTISNNKKGNFNIKKLINRSIHWQGLNNLDLAEKVTTNKKYIWKGFKTWEKGVGFKKNKKKNYKIVAIDYGIKKNILRYFSNFNCEVIVVPCYLEAEEIIKLNPDGIFLSNGPGDPAATGKYAIKIIQVLIKKNIPIFGICLGHQLLALALKAKTKKMKLGHRGANHPVKNLINNKVEITSQNHGFEVVKESLPKNVEVTHKSLFDNCIEGIKLKNKPIFSVQYHPESNPGPQDSHYLFNQFINEVKKNAKKKRY

SEQ ID NO: 198865 - protein, 140 aa, Unknown
  Bacterial polypetide isolated from the Sargasso Sea
LSNGPGDPKATGKYIIPVLKEIIEKTELPIFGICLGHQILALALGGKTIKMKTGHHGANHPVQDLKTGKVEITSMNHGFTVDSLTLPKNVNETHISLFDKSNCGIALKNKKVFSVQYHPEASPGPTDSLYLFKEFIDNLL

SEQ ID NO: 198866 - protein, 375 aa, Unknown
  Bacterial polypetide isolated from the Sargasso Sea
DNKLVFKGYGLGYEGISTGEVCFNTSLTGYQEIISDPSYAGQIINFTFPHIGNVGTNNEDLESDKIWTKGVIFNSEITSPSNYRALQTLDKWLKKNQIVGLTGLDTRSLTNFIRDKGAPKGTITNNKKGKFNIKKLTNMSVKWPGLNGLDLAKEVSTKKTYIWKGFKTWKKNVGYKKNSIKKFKIIAVDYGIKKNILRYFSDYNCEVKVVSCKLTADEIVKLKPDGIFLSNGPGDPAATGKYAIDTVQKLIKLNYPIFGICLGHQILALALNAKTKKMKLGHRGANHPVKNFMNNSVEITSQNHGFVVIEKSLSKNIQITHKSLFDDTIEGIKLKNKPVFSVQYHPEANPGPQDSQYLFKNFIEDVKKYAKKKRH

SEQ ID NO: 198867 - protein, 122 aa, Unknown
  Bacterial polypetide isolated from the Sargasso Sea
IQHLLKNTNLPIFGICLGHQMLALALGAKTIKMNHGHHGANHPVKEHSSGKVEITSMNHGFAVDAQTLPDGVEETHVSLFDGSNCGIKMSDRPVFSVQHHPEASPGPQDSFYLFNQFVATME

SEQ ID NO: 198868 - protein, 320 aa, Unknown
  Bacterial polypetide isolated from the Sargasso Sea
TDPSYCKQIITFTHPHIGNTGINSEDNESDNIYAEGVVIRNYISQPSNYRSEENLDNFLARNNSIGIFGIDTRQLTIILREKGSLKACISPIDENNEESAISLAKSFDGLEGMDLAKEVTTKNFYSWNEGVWPDYKESKSKLHIVAYDYGIKKNILRLLSEHVGKVTVVNARSSFDEVLNMNPDGIFLSNGPGDPEPCDYAIENIKRALNENIPIFGICLGHQLLALAGGAKTEKMKFGHHGANHPVQSLKSKEVFITSQNHGFAVNENSLPNNIEISHVSLFDQSIQGISFKDKPAFSFQGHPEASPGPQDIVSLFKQF

SEQ ID NO: 198869 - protein, 344 aa, Unknown
  Bacterial polypetide isolated from the Sargasso Sea
EIISDPSYAGQIINFTFPHMENVGTNKEDHESDKIWTKGVIFNTEITNPSNYRSLKKLDTWLKKNKIVGITGLDTRSLTNFIRDKGAPKGTICNNNKGIFNLKKLTNSSIKWPGLNGLDLAKIVTTKKQYIWKGFKTWKKEKGFEKNKKKKYKIIAIDYGIKKNILRYFSNFNCEVIVVPCKLEAEDIIKLKPDGIFLSNGPGDPAATGKYAINIIQKLIKKNIPTFGICLGHQLLALALKAKTKKMKLGHRGANHPVKNLINSKVEITSQNHGFEVVKESLPKNVEMTHKSLFDNSVEGIKLKNKPVFSVQYHPESNPGPQDSHYLFNQFINEVKKNAKKKRY

SEQ ID NO: 198870 - protein, 285 aa, Unknown
  Bacterial polypetide isolated from the Sargasso Sea
QVIGRSKSTLGEFLKKNEVIGISDVDTREITTILREKGAMNCCIASLSVISDKEAVAKAKAFEGLKGMDLAKVVSTDKEYKWNEGVWPENNKFNDEYPVIAYDYGTKENILRLLCEHVGSVKVVNAKTPFEEIIKYNPKGIFLSNGPGDPEPCDYAIENIKKFLENKIPIFGICLGHQLLALAGGANTYKMKFGHHGANHPVQDMASKDVFITSQNHGFAVDENTLPKNIKVTHVSLFDKSLQGIEFIDRPAFSFQGHPEASPGPQEIQILFEKFSSMVKEYAKT

SEQ ID NO: 198871 - protein, 295 aa, Unknown
  Bacterial polypetide isolated from the Sargasso Sea
PLSEYSNWRAENDLNSYFLKNNIPCIFGIDTRYLTKKLSVEGAKKAAIIHFGEGENKIEKLKTQINEWKGLQNLDLAGIVSTEQNYNWKKGIWKSNKSIKNQFKYNVTCLDFGIKNNILRNLNEFNLNPTVLNLFSSYEEIIETNPSGIFLSNGPGDPYATGSKIVDVIKKLIDDNIPIFGICLGHQILGLALNAKTKKMFQGHRGSNHPVKNLTTGIVEITSQNHGFEVDRNSFGKDIIETHVSLFDGTNEGLRHKHLPVFSVQYHPEASPGPHDSHYLFEEFYKLIEQNAKKN

SEQ ID NO: 198872 - protein, 185 aa, Unknown
  Bacterial polypetide isolated from the Sargasso Sea
MSIQFLDFEQPIAELEAKIEELRLVNQGGEFDVGIEEEINKLRGKSAELTKKIFSDLGAWQVSQLARHPMRPYTLDYIPRIFTEFDELAGDRAFADDKAIVGGPAMLDDQPVMVIGHQKGRDTNEKIKRNFGMPKPEGYRKALRLMKMAERFNMPIITFIDTPGAYPGVGAEERGQSEAIAKNLS

SEQ ID NO: 198873 - protein, 140 aa, Unknown
  Bacterial polypetide isolated from the Sargasso Sea
MSIQFLDFEQPIAELEAKIEELRLVNQGGEFDVGIEEEINKLRGKSAELTKKIFSDLGAWQVSQLARHPMRPYTLDYIPRIFTEFDELAGDRAFADDKAIVGGPAMLDDQPVMIIGHQKGRDTNEKIKRNFGMPKPESYP

SEQ ID NO: 198874 - protein, 237 aa, Unknown
  Bacterial polypetide isolated from the Sargasso Sea
MPRRYLLDFEKPLVELEKQIEQIRELARDSEVDVSQQLLQLETLATRRREEIFRSLTPAQKIQVARHPQRPSTLDFIQMFCDDWIELHGDRNGGDDMALIGGLGSVNNQPVLLLGHQKGRDTKENVVRNFGMAKPGGYRKALRLMQHADRFSLPILTFIDTPGAYAGLSAEEQGQGEAIARNLREMFGFKVPIIATIIGEGGSGGALGIGVADRLLMFEHSVYTVASPEACASILGE

SEQ ID NO: 198875 - protein, 242 aa, Unknown
  Bacterial polypetide isolated from the Sargasso Sea
MDFVQMFCDDWIELHGDRNGGDDMALIGGIGSINNRPVLMLGHQKGRDTKENVVRNFGMAKPGGYRKALRLMQHANRFSLPILTFIDTPGAYAGLKAEEQGQGEAIARNLREMFGLKVPIVATVIGEGGSGGALGIGVADRILMFEHSVYTVASPEACASILWRDAAKASEAASALKITGKDLLKLGIIDEVLPEPSGGNNWAPLDAGNTLKEAIVKHLNALLQMPEDELIEERYKKFRVLG

SEQ ID NO: 198876 - protein, 214 aa, Unknown
  Bacterial polypetide isolated from the Sargasso Sea
DSEVDVSQQLLQLETLAARRREEIFKSLTPAQKIQVARHPQRPSTLDFVQMFCDEWIELHGDRNGGDDMALIGGIGLINNRPVLILGHQKGRDTKENVVRNFGMAKPGGYRKALRLMQHADRFSLPILTFIDTPGAYAGLTAEEQGQGEAIARNLREMFGLKVPIVATVIGEGGSGGALGIGVADRLLMFEHSVYTVASPEACASILGEMLQRR

SEQ ID NO: 198877 - protein, 224 aa, Unknown
  Bacterial polypetide isolated from the Sargasso Sea
MSLNYLDFELPIAELEAKIEELQSISRAGELDLELEEEVSKLKEKSAKQKEEIFSNLGAWQVSQLARHPLRPYTRDYIERIFTEFDEFAGDRTFANDPAILGGVARLDGEPVMVIGQQKGRDTAEKIKRNFGMPKPEGYRKALRLMEMAERFKMPIMTFIDTPGAYPGVGAEERGQSEAIARNLKVMAALKVPTICTVIGEGGSGGALAIGVGDRVNMLQYSTY

SEQ ID NO: 198878 - protein, 149 aa, Unknown
  Bacterial polypetide isolated from the Sargasso Sea
MSIQFLDFEQPIAELEAKIEELRLVNQGGEFDVGIEEEINKLRGKSAELTKKIFSDLGAWQVSQLARHPMRPYTLDYIPRIFTEFDELAGDRAFADDKAIVGGPAMLDDQPVMIIGHQKGRDTNEKIKRNFGMPKPEGYRKALRLMKMA

SEQ ID NO: 198879 - protein, 233 aa, Unknown
  Bacterial polypetide isolated from the Sargasso Sea
AARRREEIFKSLTPAQKIQVARHPQRPSTLDFVQMFCDDWIELHGDRNGGDDMALIGGIGAINNRPVLMLGHQKGRDTKENVVRNFGMAKPGGYRKALRLMQHANRFSLPILTFIDTPGAYAGLKAEEQGQGEAIARNLREMFGLKVPIVATVIGEGGSGGALGIGVADRLLMFEHSVYTVASPEACASILWRDAAKAPEAASALKITGKDLLKLGIIDEVLPEPSGGNNWAP

SEQ ID NO: 198880 - protein, 157 aa, Unknown
  Bacterial polypetide isolated from the Sargasso Sea
GGSMGSVVGEKITRIIERATLENFPILIVCASGGARMQEGMLSLMQMAKISGALKKHKEKNLLYMPLLTHPTTGGVTASFAMLGDLILAEPKALIGFAGRRVIEQTLREKLPDNFQTAEYLLEHGFVDVIVKRKDLKDTLTKILKIHGVKELAEANI

SEQ ID NO: 198881 - protein, 247 aa, Unknown
  Bacterial polypetide isolated from the Sargasso Sea
SQQLLQLETLAARRREEIFKSLTPAQKIQVARHPQRPSTLDFVQMFCDDWIELHGDRNGGDDMALIGGIGSINNRPVLMLGHQKGRDTKENVVRNFGMAKPGGYRKALRLMQHANRFSLPILTFIDTPGAYAGLKAEEQGQGEAIARNLREMFGLKVPIVATVIGEGGSGGALGIGVADRLLMFEHSVYTVASPEACASILWRDAAKAPEAASALKITGKDLLKLGIIDEVLPEPSGGNNWAPLDAG

SEQ ID NO: 198882 - protein, 233 aa, Unknown
  Bacterial polypetide isolated from the Sargasso Sea
MAKRYLLDFEKPLVELEKQIEQIKELARDSEVDVSQQLLQLETLAARRREEIFKSLTPAQKIQVARHPQRPSTLDFVQMFCDDWIELHGDRNGGDDMALIGGIGSINNRPVLMLGHQKGRDTKENVVRNFGMAKPGGYRKALRLMQHANRFSLPILTFIDTPGAYAGLKAEEQGQGEAIARNLREMFGLKVPIVATVIGEGGSGGALGIGVADRLLMFEHSVYTVASPEACAS

SEQ ID NO: 198883 - protein, 187 aa, Unknown
  Bacterial polypetide isolated from the Sargasso Sea
ATGLRDGVVTGLCRVDGLAMALAVMDFRFMGGSMGSVVGEKITRLVEEATARRLPLLIVCASGGARMQEGMLSLMQMAKISGALERHREAELLYMPLLTHPTTGGVTASFAMLGDLILAEPKALIGFAGRRVIEQTLREKLPDNFQTAEYLQDHGFVDTIVPRTQLRSSLASLLRLHGCRPMEITSA

SEQ ID NO: 198884 - protein, 140 aa, Unknown
  Bacterial polypetide isolated from the Sargasso Sea
QATERGLPLLIVCASGGARMQEGMLSLMQMAKISGALERHREAELLYLPLLTHPTTGGVTASFAMLGDLILAEPKALIGFAGRRVIEQTLREKLPDNFQTAEYLQDHGFVDAIVPRVQLRSTLARLLRLHGCRALELTSA

SEQ ID NO: 198885 - protein, 266 aa, Unknown
  Bacterial polypetide isolated from the Sargasso Sea
MSLFLDFEQPIAELQAQIDELRHVSEGNHAVDLKEEIRRLEKKNEELTKKIFGDLGAWQVSQMARHPQRPYTLDYIEHIFTDFDELAGDRAYADDKAIVGGSARLDGEPVMVIGHQKGRETKEKIKRNFGMPRPEGYRKALRLMEMAERFKMPIITFIDTPGAYPGVGAEERGQSEAIARNLKVMAGLTVPVVCTVIGEGGSGGALAIGVGDRVNMLQYSTYSVISPEGCASILWKSADKAPVAADAMGITAQRLKELKLIDNIVE

SEQ ID NO: 198886 - protein, 139 aa, Unknown
  Bacterial polypetide isolated from the Sargasso Sea
ATLENFPILIVCASGGARMQEGMLSLMQMAKISGALKKHKEKNLLYMPLLTHPTTGGVTASFAMLGDLILAEPKALIGFAGRRVIEQTLREKLPDNFQTAEYLLEHGFVDVIVKRKDLKDTLTKILKIHGVKELAEANI

SEQ ID NO: 198887 - protein, 231 aa, Unknown
  Bacterial polypetide isolated from the Sargasso Sea
MPKRYLLDFEKPLVELEKQIEQIKELARDSEVDVSQQLLQLETLAARRREEIFKSLTPAQKIQVARHPQRPSTLDFVQMFCDDWIELHGDRNGGDDMALIGGIGSINNRPVLMLGHQKGRDTKENVVRNFGMAKPGGYRKALRLMKHANRFSLPILTFIDTPGAYAGLKAEEQGQGEAIARNLREMFGLKVPIVATVIGEGGSGGALGIGVADRLLMFEHSVYTVASPEAC

SEQ ID NO: 198888 - protein, 289 aa, Unknown
  Bacterial polypetide isolated from the Sargasso Sea
MLDWFADRRKTAPALRPTPEPDEGDGLWSKCPECGEVVYRKDLVANASVCASCGYHHRIHSEERLRILLDPGSFIPIDGELSPTDPLAFKDRRAYADRIRDSQQQTGLRDAVVCGTGTIEGQGIALAVMDFRFMGGSMGSVVGEKITRLIETATERKLPVLVVCASGGARMQEGMLSLMQMAKISGALERHRAKKLLYIPLLTHPTTGGVTASFAMLGDLILAEPKALIGFAGRRVIEQTLREKLPDNFQTAEYLQDHGFVDAIIPRTQMRSRLASLLVMHQQTAKIPA

SEQ ID NO: 198889 - protein, 335 aa, Unknown
  Bacterial polypetide isolated from the Sargasso Sea
MAKRYLLDFEKPLVELEKQIEQIKELARDSEVDVSQQLLQLETLAARRREEIFKSLTPAQKIQVARHPQRPSTLDFVQMFCDDWIELHGDRNGGDDMALIGGIGSINNRPVLMLGHQKGRDTKENVVRNFGMAKPGGYRKALRLMQHANRFSLPILTFIDTPGAYAGLKAEEQGQGEAIARNLREMFGLKVPIVATVIGEGGSGGALGIGVADRLLMFEHSVYTVASPEACASILWRDAAKAPEAASALKITGKDLLKLGIIDEVLSEPSGGNNWAPLDAGNTLKEAIEKHLNALLQMSEDELIDERYKKFRVLGKFIEANNIEEIYSEIPQKTE

SEQ ID NO: 198890 - protein, 335 aa, Unknown
  Bacterial polypetide isolated from the Sargasso Sea
MAKRYLLDFEKPLVELEKQIEQIKELARDSEVDVSQQLLQLETLAARRREEIFKSLTPAQKIQVARHPQRPSTLDFVQMFCDDWIELHGDRNGGDDMALIGGIGSINNRPVMMLGHQKGRDTKENVVRNFGMAKPGGYRKALRLMQHANRFSLPILTFIDTPGAYAGLKAEEQGQGEAIARNLREMFGFKVPIVATVIGEGGSGGALGIGVADRLLMFEHSVYTVASPEACASILWRDAAKAPEAASALKITGKDLLKLGIIDEVLPEPSGGNNWAPLDAGNTLKESIEKHLNALLQMSEDELIEERYKKFRVLGKFIEANNIEEIYSEIPQKTE

SEQ ID NO: 198891 - protein, 152 aa, Unknown
  Bacterial polypetide isolated from the Sargasso Sea
MLNYLEFEQPIAELEAKIEELRKVSRNGEFDLGLEEEVNKLKEKSLTLTKKIFAELGAWQVAQLARHPLRPYTLDYIKHIFTDFDEFAGDRTFANDPAIVCGTARLGDKTVMVIGHQKGRDTSEKIKRNFGMPKPEGYRKALRMMEMAERFN

SEQ ID NO: 198892 - protein, 290 aa, Unknown
  Bacterial polypetide isolated from the Sargasso Sea
MSWLDKLLPPKIKQTDPKSRKGIPEGLWVKCPSCEAVLYRNDVDANLHVCPKCDHHMRIGARERLDGLLDPEGRYEIGQEIVPVDTLKFKDSRKYPDRLKEAMDDTGETDAMVVMGGAIHTLPVVAACFEFSFMGGSMGSVVGERFVRGAQNALEQQVPFICFTASGGARMQESLLSLMQMAKTTAMLTKLAEAKLPFISVLTDPTMGGVSASFAFLGDVVIAEPKALIGFAGPRVIEQTVREKLPEGFQRAEFLLKTGAIDMIVDRRKMRDEIAQLLALLQRQPADALA

SEQ ID NO: 198893 - protein, 291 aa, Unknown
  Bacterial polypetide isolated from the Sargasso Sea
MFDWFADRRKGQSTGKIIQEPEEGDGLWSKCPECSLVVYVKDLKANASVCAGCGHHHRIDSEERIALIADPGSFHALNEALEPTDPLTFKDRRAYADRLRESQAATGLRDGVVTGLCRVEGLDLALAVMDFRFMGGSMGSVVGEKITRLVEEATSRRLPLLIVCASGGARMQEGMLSLMQMAKISGALERHREAELLYLPLLTHPTTGGVTASFAMLGDLILAEPKALIGFAGRRVIEQTLREKLPDNFQTAEYLQDHGFVDTIVPRTQLRSTLASLLRLHGCKPKELTTA

SEQ ID NO: 198894 - protein, 170 aa, Unknown
  Bacterial polypetide isolated from the Sargasso Sea
MPLALAVMDFRFMGGSMGSVVGEKITRIIERATLENFPILIVCASGGARMQEGMLSLMQMAKISGALKKHKEKNLLYMPLLTHPTTGGVTASFAMLGDLILAEPKALIGFAGRRVIEQTLREKLPDNFQTAEYLLEHGFVDVIVKRKDLKDTLTKILKIHGVKELAEANI

SEQ ID NO: 198895 - protein, 335 aa, Unknown
  Bacterial polypetide isolated from the Sargasso Sea
MAKRYLLDFEKPLVELEKQIEQIKELARDSEVDVSQQLLQLETLAARRREEIFKSLTPAQKIQVARHPQRPSTLDFVQMFCDDWIELHGDRNGGDDMALIGGIGSINNRPVLMLGHQKGRDTKENVVRNFGMAKPGGYRKALRLMQHANRFALPILTFIDTPGAYAGLKAEEQGQGEAIARNLREMFGLKVPIVATVIGEGGSGGALGIGVADRLLMFEHSVYTVASPEACASILWRDAAKAPEAASALKITGKDLLKLGIIDEVLPEPSGGNNWAPLDAGNTLKEAIEKHLNALLQMPEGQLIEERYKKFRVLGKFIEANNIEEIYSEIPQKTE

SEQ ID NO: 198896 - protein, 335 aa, Unknown
  Bacterial polypetide isolated from the Sargasso Sea
MAKRYLLDFEKPLVELEKQIEQIKELARDSEVDVSQQLLQLETLAARRREEIFKSLTPAQKIQVARHPQRPSTLDFVQMFCDDWIELHGDRNGGDDMALIGGIGSINNRPVLMLGHQKGRDTKENVVRNFGMAKPGGYRKALRLMQHANRFSLPILTFIDTPGAYAGLKAEEQGQGEAIARNLREMFGLKVPIVATVIGEGGSGGALGIGVADRLLMFEHSVYTVASPEACASILWRDAAKAPEAASALKITGKDLLKLGIIDEVLPEPSGGNNWAPLDAGNTLKEAIEKHLNALLQMPEDELIEERYKKFRVLGKFIEANNIEEIYSEIPQKTE

SEQ ID NO: 198897 - protein, 242 aa, Unknown
  Bacterial polypetide isolated from the Sargasso Sea
MGWAEAYFERDAPVVPDADYDQAMKQLEALEREFPDLVTPDSPTQRVGSAPLSEFESVEHRLPMLSLDNAFSSDDMDDFHRRVTERLGTVEVSYCCEPKLDGVAVSVVYENGALVLAATRGDGTRGENITANVRTIRNVPLTLSGESVPPYLEVRGEVVIPRDAFERMNAQARGANEKVFVNPRNAAAGSLRQLDPRITARRPLAFTAYSVGVVESDLPATHDAILRRLSDWGLPISEYTQT

SEQ ID NO: 198898 - protein, 296 aa, Unknown
  Bacterial polypetide isolated from the Sargasso Sea
KLDGLAVSIIYRDGVLVQAATRGDGFTGENITQNVKTIRNVPLKLRGDYPKELEVRGEVFMDSAGFEKLNNEAQKRGEKVFVNPRNAAAGSLRQLDSKITAKRPLMFYAYSTGLVADGSIPEDHFQQLEKLTDWGLPLCPETKLVEGPQAALDYYDDILTRRSELKYEIDGVVIKVNKKALQERLGFVARAPRWAIAYKFPAQEEVTQLLDVEFQVGRTGAITPVARLEPVFVGGVTVSNATLHNGDEIARLGVKVGDTVIIRRAGDVIPQITQVVLERRPTDARDIVFPSACPIC

SEQ ID NO: 198899 - protein, 464 aa, Unknown
  Bacterial polypetide isolated from the Sargasso Sea
RVGEVSFCCDPKLDGLAVSILYRNGVLERAATRGDGTVGEDITENVKTIKSIPLKLRGDNYPELVEVRGEAFMPKAAFEALNERARLKDEKLFVNPRNAAAGSLRQLDSKITASRALSFYAYALGVVEPTSHELAKTHYEQLQQLKSWGLPVSSEIKVCDELSQVFAYYQDILTRRADLPFEIDGVVMKVNDIAQQQTLGFVAKSPRWAIAYKFPAQEEMTLLEGVDFQVGRTGAVTPVARLKPVFVGGVTVSNATLHNADEIARLGVMVGDTVIIRRAGDVIPQIVAIVPERRPEDAKAIAFPQHCPVCGSLVERLEGEAVARCSGGLFCEAQRKEAIKHFASRKALDIDGMGDKIVEQLIDKELVQSPADLFKLTASMMTMLDRMGMKSATNLALAIEAAKTTTLPRFLYALGIREVGEATAANLATHFGSLEALRVATIEQLIQVEDIGEVVAQHVAHFFA

SEQ ID NO: 198900 - protein, 502 aa, Unknown
  Bacterial polypetide isolated from the Sargasso Sea
MADPHERAAELRHLLNRAGHAYYVLDAPLMEDAVYDRLYRELLELEQNHPDLQRPDSPTQRVGGAPAEGFTSVEHRVGMLSLDNAFNRDDLQAWHERLLKVLDRPSDTHLPLVGELKIDGNALALSYRNGVLERAATRGDGSRGEKITANVRTISSIPLRLQIENPPEWVEVRGEAFIPDATFAAINAEREQRGEALFANPRNACAGTLRQLDPKVVAARRLDFFAYTLHLPGDAQPPGQWAALEWLNRAGFRVNPNRERCEDLAAIQRFCDHWEQGRHDLPYATDGVVVKLDDLQLQDEAGFTQKAPRWAIALKYPAEEAPTRLLRVGAQVGRTGAITPVAEFEAVALAGTSVSRATLHNADRIAELDLHLGDTIVVRKAGEIIPEVVRVLPELRPSDATPVQLPQHCPECGSNLVREGDEAATRCVNSSCPAILRGGLRHWVSKGALDVDGLGSKLIEQLVDRGLVGSLADLYRLDEALLASLDRMGDKSATNLVEALEA

SEQ ID NO: 198901 - protein, 689 aa, Unknown
  Bacterial polypetide isolated from the Sargasso Sea
MQDIQLDKRLSELLSQAVTPHNAQPLMQALCQSLNEHNIRYYVDDAPSITDSEYDRLMQQLKQLEAEYPQFVAADSPTQRVGGMALAKFEQITHLKPMLSLDNAFDEADFSAFHKRVSDRVGEVSFCCEPKLDGLAVSILYRNGVLERAATRGDGTVGEDITENVKTIKSIPLKLRGDNYPELVEVRGEAFMPKAAFEALNERARLKDEKLFVNPRNAAAGSLRQLDSKITASRALSFYAYALGVVEPTSHELAKTHYEQLQQLKSWGLPVSSEIKVCDELSQVFAYYQDILTRRADLPFEIDGVVMKVNDIAQQQTLGFVAKSPRWAIAYKFPAQEEMTLLEGVDFQVGRTGAVTPVARLKPVFVGGVTVSNATLHNADEIARLGVMVGDTVIIRRAGDVIPQIVAIVPERRPEDAKAIAFPQHCPVCGSLVERLEGEAVARCSGGLFCEAQRKEAIKHFASRKALDIDGMGDKIVEQLIDKELVQSPADLFKLTASMMTMLDRMGMKSATNLAQAIEAAKTTTLPRFLYALGIREVGEATAANLATHFGSLEALRVATIEQLIQVEDIGEVVAQHVAHFFAQPHNLEVIDALIAAGVNWPAIAAPSADEQPLKGQTWVLTGTLNQLNRNDAKAQLQALGAKVAGSVSKNTDCLVAGEAAGSKLAKAQELGVKVIGEDELLALLAANS

SEQ ID NO: 198902 - protein, 673 aa, Unknown
  Bacterial polypetide isolated from the Sargasso Sea
MKDLLKKYEQLKEEIQLHNYNYHALDDPKISDSEYDKLFRSLLDLEEENPQLVTPDSPTQRVGFSPIDEFETFEHSVPMLSLANVFSEKEFSDFHDRILKRLVNINDFEYFCEPKMDGAAVSLIYKNGILERALTRGDGRVGEDISQNVKTIRSIPQKLSSSEANIPSLLVIRGEIFISKDAFEKMNEKAKENNEKVFANPRNAASGSLRQLDSKITSSRPLSFIAHGLGECEGIQFSSISEFYDHLKAWKIPTSDLCKKVETKDDCLKFHDKILKERESIPYEIDGVVFKVNDYDLQKRLGFISRAPRWAIAHKFPAEEATTILEDIEFQVGRTGILTPVARLQPVIVGGVTVKNATLHNIDEIRRLGIDVGDRVILRRAGDVIPKIVKVAEKGISNKKLEIPKKCPSCDADVILVNTSDLKCSGGFNCDEIQKGQIVHFVSRKAFDIEGLGIEIINTFFKQGFLKDPSDIFKLENRKDEIVSLEGFGEKSFDNLITSIKASRDISLHRFIYSLGIPEVGESTARNLESHFEKFKGIFEATYDDLIEVKDIGPKVAENIIQFFQNPLIVEMVPKLLEEIALQELSKEDFKDMPLRGKQIVLTGKLENYSRDELKEILISMGANVTSSVSSKTSLLIAGEKAGSKLKKAESLGIDIINSDQCEEFLNDTKKFL

SEQ ID NO: 198903 - protein, 274 aa, Unknown
  Bacterial polypetide isolated from the Sargasso Sea
MAEPQQRTAELRSLLNRAAHAYYVLDAPVMEDTVYDRLYRELQQLEHDDPSLLSADSPTQRVGGAPAAGFHSVEHRIPLQSLDNAFDQGELRAWHERLLKVLDRADDSPLPLVGELKIDGNALALSYRHGVLEQAATRGDGSSGEEITANVRTISSIPLRLQIDDPPEWVEVRGEAFIPDDTFTAINNERAARGEALFANPRNACAGTLRQLDPRVVAARRLDFFAYTLHLPSYASNRPECQWDVLAWLEQAGFRVNPNGELCDGLNGIEHFCD

SEQ ID NO: 198904 - protein, 583 aa, Unknown
  Bacterial polypetide isolated from the Sargasso Sea
MESIEQQLTELRTTLRHHEYLYHVMDAPEIPDAEYDRLLRELRELEAQHPDLITPDSPTQRVGAAPLTAFSQIRHEVPMLSLDNVFDEESFLAFNKRVQDRLKSTDKLTWCCELKLDGLAVSILYENGVLVSAATRGDGTTGEDITSNVRTIRAIPLKLRGDNIPTRLEVRGEVFLPQAGFEKINEEARRTGNKVFANPRNAAAGSLRQLDPRITAKRPLTFFCYGVGVLEGGVLPDTHLGRLLQFKEWGLPVSDRVALCDSPEEVLAYYHKVEEDRPTLGFDIDGVVIKVNSMALQEQLGFVARAPRWAVAFKFPAQEQMTFVRDVEFQVGRTGAITPVARLEPVQVAGVLVSNATLHNADEIERLGLRIGDKVVIRRAGDVIPQVVNVVLSERPDNTREIEFPTHCPVCNSDVERVEGEAVTRCTGGLICGAQRKESLKHFVSRRALDVDGMGDKIIDQLVEKEYVHTPADLFTLTAGKLTGLDRMGPKSAQNVVNALEKAKETTFARFLYALGIREVGEATAAGLAAYFGTLEALEAASVEELQKVPDVGIVVATHVFNFFAEESNREVIVQLLEQGIHW

SEQ ID NO: 198905 - protein, 689 aa, Unknown
  Bacterial polypetide isolated from the Sargasso Sea
MQDIQLDKRLSELLSQAVTSENAQPLMQALCQSLNEHNIRYYVDDAPSITDSEYDRLMQRLKQLEAEYPQFVAADSPTQRVGGMALAKFEQITHLKPMLSLDNAFDEADFSAFHKRVSDRVGQVSFCCEPKLDGLAVSILYRNGVLERAATRGDGTVGEDITENVKTIKSIPLKLRGDNYPELVEVRGEAFMPKAAFEALNERARLKDEKLFVNPRNAAAGSLRQLDSKITASRALSFYAYALGVVEPTSHELAKTHYEQLQQLKSWGLPVSSEIKVCDELSQVFAYYQDILTRRSDLPFEIDGVVMKVNDIAQQQTLGFVAKSPRWAIAYKFPAQEEMTLLEGVDFQVGRTGAVTPVARLKPVFVGGVTVSNATLHNADEIERLGVMVGDTVIIRRAGDVIPQIVAIVPERRPEDAKAITFPQHCPVCGSLVERLEGEAVARCSGGLFCEAQRKEAIKHFASRKALDIDGMGDKIVEQLIDKELVQSPADLFKLTASMMTMLDRMGMKSATNLALAIEAAKTTTLPRFLYALGIREVGEATAANLATHFGSLEALRVATIEQLIQVEDIGEVVAQHVAHFFAQPHNLEVIDALIAAGVNWPAIAAPSADEQPLKGQTWVLTGTLNQLNRNDAKAQLQALGAKVAGSVSKNTDCLVAGEAAGSKLAKAQELGVKVIGEDELLALLAANT

SEQ ID NO: 198906 - protein, 380 aa, Unknown
  Bacterial polypetide isolated from the Sargasso Sea
MKDLLKKYEQLKEEIQLHNYNYHALDDPKISDSEYDNLFRSLLDLEEENPHLVTSDSPTQRVGFSPIDEFETFEHSVPMLSLANVFSEKEFLDFHDRILKRLVNIDDFEYFCEPKMDGAAVSLIYKDGILQRAVTRGDGRVGEDISQNVKTIRSIPQKLSSSKANVPSLLVIRGEIFISKDAFEKMNEKAMQNNEKVFANPRNAASGSLRQLDPKITSSRPLSFIAHGLGECEGIQFSSISEFYDHLKAWKIPTSGLSKKVKTKDDCLTFHDKILEERESIPYEIDGVVFKINDYDLQKRLGFISRAPRWAIAHKFPAEEATTILEDIEFQVGRTGILTPVARLQPVIVGGVTVKNATLHNIDEIKRLGIEISDRVILRR

SEQ ID NO: 198907 - protein, 459 aa, Unknown
  Bacterial polypetide isolated from the Sargasso Sea
SLEQAKQQIATLRNTLNEYNYQYYVMDDPSVPDSVYDRDMQALIALEKQYPTLQSPNSPSQKVGGAALSAFEQVTHDVPMLSLDNAFDEESLLAFEKRLKDRLKDSATLDFSCEPKLDGLAVSILYENGELVRAATRGDGQVGENITANVRTISNVPLTLRGEHYPERVEVRGEVFMPREGFAKLNEHQKETGGKVFANPRNAAAGSLRQLDSKITAKRPLMFYAYSLGVVQPESFELPTTHSERLKQLGNWGLPLCPDIDTAEGGKGCLAYYNHILEKRDSLPYDIDGVVFKVNRIDLQNALGFVARAPRWAIAQKFPAQEEVTKLLDVEFQVGRTGAITPVARLEPVFVGGVTVSNATLHNQDEISRLGVKVGDTVVIRRAGDVIPQVVSVVEANRTGSETDISFPSQCPVCDSQVEKLEDEAVARCTGGLICAAQRKQALKHFASRKAFDIDGLGD

SEQ ID NO: 198908 - protein, 249 aa, Unknown
  Bacterial polypetide isolated from the Sargasso Sea
MCGTIDIEKALSEGVKAFEPGLLAKANRGLLYVDEVNLLDDHLVDVLLDSAASGWNTVEREGVSVRHPARFVLIGSGNPEEGELRPQLLDRFGMSVEVKTVRDAELRVKVVDQRTSFDDNPDEFSISVEKQQDDLQQKVIKAQEILNSVQLDDDLRLNISAICGELDVDGLRGDIVTNRSARAIAAFEGRTEVQEEDIARVITCSLRHRLRKDPLEQVDSGERVIQAFCKVFDLNEKEDLSKFLLSSEE

SEQ ID NO: 198909 - protein, 296 aa, Unknown
  Bacterial polypetide isolated from the Sargasso Sea
RAIADLLPEIAIVRDDAFNSHPTNPELMSSEILTQFQNNGTIETELIKIPMVDLPLGATEDRVCGTIDIEKALTEGVKAFEPGLLAKANRGILYVDEVNLLDDHLVDILLDSAASGWNTVEREGISVRHPARFVLVGSGNPEEGELRPQLLDRFGMHAEIRTVKNPDLRVRIVEERTAFDQEPQIWVDKYQEEQNALRTQLVSAQDLLPSVEMDYDFRLKISQICSELDVDGLRGDIVVNRAAKAYAALDGRTVVTVDDISNIIVLCLRHRLRKDPLESIDSGAKVRKIFNEVFEI

SEQ ID NO: 198910 - protein, 246 aa, Unknown
  Bacterial polypetide isolated from the Sargasso Sea
MIIRKLSKTKVVNTTKKRRVFPFTAVIGQEEMKLALLLNVIDPRIGGVMIMGDRGTGKSTTIRALADLLPAIDVVKDDPYNSSLIDPDLQSKEVLEKIIQGENLEKDKKQVPMVDLPLGATEDRLCGTIDIEKALSEGIKAFEPGLLAKANRGLLYVDEVNLLDDHLVDVLLDSAASGWNTVEREGVSVRHPARFVLIGSGNPEEGELRPQLLDRFGMSVEVKTVRDAELRVKVVDQRTSFDDNPR

SEQ ID NO: 198911 - protein, 218 aa, Unknown
  Bacterial polypetide isolated from the Sargasso Sea
YVDEVNLLDDHLVDVLLDSAASGWNTVEREGISVRHPARFVLIGSGNPEEGELRPQLLDRFGMSVEVRTVREAKLRVQVVDQRTAFDDDPESFSDSAQGRQDSLQQKVVAAQNLLNEVSIDEDLRLRISAVCGELDVDGLRGDIVTNRAARALAAFEGRKEVTEEDIARVVSTALRHRLRKDPLEQVDSGDRVIKAFCKVFERNESNDVSEFELASTN

SEQ ID NO: 198912 - protein, 248 aa, Unknown
  Bacterial polypetide isolated from the Sargasso Sea
CGTIDIEKALSEGIKAFEPGLLAKANRGLLYVDEVNLLDDHLVDVLLDSAASGWNTVEREGVSVRHPARFVLIGSGNPEEGELRPQLLDRFGMSVEVKTVRDAELRVQVVDQRTSFDDNPDEFSLSVENQQNELQQKVIKAQEILNSVQMDEDLRLNISAICGELDVDGLRGDIVTNRSARAIAAFEGRTEVQEDDIARVISCSLRHRLRKDPLEQVDSGERVIQAFCKVFDLDEKENLSKFQLSTEA

SEQ ID NO: 198913 - protein, 279 aa, Unknown
  Bacterial polypetide isolated from the Sargasso Sea
ADLLPDIEVVAGDPYNSSSTDPDLQSSEVRERMERGDSISTEPRQVPMVDLPLGATEDRLCGTIDIEKALSEGVRAFEPGLLAKANRGLLYVDEVNLLDDHLVDVLLDSAASGWNTVEREGVSVRHPARFVLIGSGNPEEGELRPQLLDRFGMSVEVRTVRDPELRVQVVDQRTAFDTDPDGFSTAVEANQDALQQRVVEAQQRLSAVTIDDDLRLRISAVCGELDVDGLRGDIVTNRAARALAAFEGRTEVSEEDVARVASCCLRHRLRKDPLEQVDS

SEQ ID NO: 198914 - protein, 221 aa, Unknown
  Bacterial polypetide isolated from the Sargasso Sea
GLLYVDEVNLLDDHLVDVLLDSAASGWNTVEREGVSVRHPARFVLIGSGNPEEGELRPQLLDRFGMSVEVKTVRDAELRVQVVDQRTSFDDNPDEFSLSVEKQQDALQQKVIKAQEILNSVQMDDDLRLNISAICGELDVDGLRGDIVTNRSARAIAAFEGRTEVQEDDIARVISCSLRHRLRKDPLEQVDSGERVIQAFCKVFDLDEKENLSKFQLSAEA

SEQ ID NO: 198915 - protein, 296 aa, Unknown
  Bacterial polypetide isolated from the Sargasso Sea
LNVIDPKIGGVIIMGDRGTGKSTTIRAIADLLPEIQIVKEDPFNSHPTNFELMSADVATKVTNNEEVELEDIKIPMIDLPLGATEDRVCGTIDIEKALTEGVKAFEPGLLAKANRGLLYVDEVNLLDDHLVDILLDSAASGWNTVEREGISIRHPARFVLIGSGNPEEGELRPQLLDRFGLFAEIRTVKDPVLRVRIVEERTSFDLNPEEWLKRYKDEQLALTESIVKAQNLLSQVTIEYDLRVKISQICSILDVDGLRGDIVTNRAAKAYCAFNGRTDVTVEDIQTVVSLALRHR

SEQ ID NO: 198916 - protein, 253 aa, Unknown
  Bacterial polypetide isolated from the Sargasso Sea
RYVRPIIPRGPVRRIAVDATLRAAAPYQRSRREREPHRKVIVQDGDLRAKQLQRKAGALVIFLVDASGSMALNRMQSAKGAVLRLLTEAYENRDEVSLIPFRGEQAEVLLPPTRSITAAKRRLETMACGGGSPLAHGLAQAARVGANALQTGELSQVVVVAITDGRGNVPLGRSLGQPQLEGDEPVDLKQELKDVASRYQQLGLQLLVIDTERKFIGSGMGKDLAQAAAGRYVQLPKANDQAIAAIALEALNR

SEQ ID NO: 198917 - protein, 210 aa, Unknown
  Bacterial polypetide isolated from the Sargasso Sea
MITTGDSAVTAPRKRRVFPFTAVIGQEEMKLALLLNVIDPRIGGVMIMGDRGTGKSTTIRALADLLPDIDVVTGDPYNSSSTDPDLQSSELRERMERGESITTEPRQVPMVDLPLGATEDRLCGTIDIEKALSEGVRAFEPGLLAKANRGLLYVDEVNLLDDHLVDVLLDSAASGWNTVEREGVSVRHPARFVLIGSGNPEEGELRPQLL

SEQ ID NO: 198918 - protein, 220 aa, Unknown
  Bacterial polypetide isolated from the Sargasso Sea
MLYVDEVNLLDDHLVDVLLDSAASGWNTVEREGISVRHPARFVLIGSGNPEEGELRPQLLDRFGMSVEVRTVREAKLRVQVVDQRTAFDENPDSFSDSVQGRQDTLQQKVVDAQNLLHEVSIDEDLRLRISAVCGELDVDGLRGDIVTNRAARALAAFEGRKEVTEEDIARVVSTALRHRLRKDPLETVDSGDRVIKAFCKVFEKNESDDVSEFELATKN

SEQ ID NO: 198919 - protein, 318 aa, Unknown
  Bacterial polypetide isolated from the Sargasso Sea
MKLALLLNVIDPRIGGVMIMGDRGTGKSTTIRALADLLPAIDVVKDDPYNSSLVDPDLQSKEVLEKITQGENLESIQKQVPMVDLPLGATEDRLCGTIDIEKALSEGVKAFEPGLLAKANRGLLYVDEVNLLDDHLVDVLLDSAASGWNTVEREGVSVRHPARFVLIGSGNPEEGELRPQLLDRFGMSVEVKTVRDAELRVQVVDQRTSFDDNPDEFSLSVEKQQDELQQKVIKAQEILNSVQMDDDLRLNISAICGELDVDGLRGDIVTNRSARAIAAFEGRTEVQEDDIARVISCSLRHRLRKDPLEQVDSGERVI

SEQ ID NO: 198920 - protein, 197 aa, Unknown
  Bacterial polypetide isolated from the Sargasso Sea
MPVSQAFQSRVFPFTAIVGQAEMKLALLLNVIDPRIGGVMIMGDRGTGKSTTIRALADLLPEIPVVAGDPYNSSPNDPDLQSSEVRERLQRGESISEGRCQVPMVDLPLGATEDRLCGTIDIEKALSEGIRAFEPGLLAKANRGLLYVDEVNLLDDHLVDVLLDSAASGWNTVEREGVSVRHPARFVLIGSGNPEEG

SEQ ID NO: 198921 - protein, 619 aa, Unknown
  Bacterial polypetide isolated from the Sargasso Sea
FLLPPIEVLDNESVLEKLAKRNSNTSLRPIGRNLDPYKPEEWDISTNKLLEESIGSDYLNQIEEIPKKVREAPFIQVPIGITEDRLVGSIDVAASLSTGEQVFQPGILADAHRGVLYVDDINLLDDGIVNLILEATGREQNNIERDGLSLSHPCKSLLIATYNPEEGALRDHVLDRFAIVLSADQSIDKAQRVEITKSVLSHAENNIKFSEKWSEETDNLSTQLILARQWLKDVKITKEQITYLVNEALRGGVEGHRSELFAVKVAKANAALRGDENVNSEDLKAAVRLVILPRAMQMPPEDDEIEPPPPEDQSPPPPPQSNNDESEPEANENEDNQAQEQEEDNSNGEEESNSEIPEEFILDPESCMVDPDLLLFSSTKAKAGNSGSRSVILSDSRGRYVKPIIPRGKVKRIAVDATLRAAAPYQKSRRLRNPNKSIIIEENDFRAKLLQKKAGALVIFLVDASGSMALNRMQSAKGAVIRLLTEAYENRDEVALIPFRGNQAEVLLPPTRSITAAKRRLETMPCGGGSPLAHGLTQSAKVAKNALSTGDIGQVIVVGITDGRGNVPLGLSLGQNEVEEKDNDNVNLKQEVLDIAAKYPMLGIKLLVIDTERKFIASG

SEQ ID NO: 198922 - protein, 506 aa, Unknown
  Bacterial polypetide isolated from the Sargasso Sea
MRQTFPLAAVIGQEKIKSALLLGGIDPTLGGIAISGRRGTAKSIMARGLHALLPPIECVKDSYCNADPTNPEEWEEGLEDKVTRDEEGNVQTIIRDAPFVQLPLGVTEDRLIGTVDIEESMKQGKTVFQPGLLAQAHRGILYVDEINLLDDGVANLLLSVLAEGENVVEREGITLRHPCKPLLIATFNPEEGTLREHLLDRIAVTLSADQMLTFEDRVEAVNQAMSFQNAAEMSVKNVEEATEAIKTNIVLAREWLKDCVISQEQVEYLVRESIRGQIQGHRAELFAVKAAKALAALDGRSKVNADDLKEAVRLVIVPRSDILQDAPPPEDDDDEQPPPPPPPPEDNMEDDDQDEEQEEDNEEEEEEEDDIPDVPEEFIFDAETVDLDKDVTQFASQSNKQGGRSGRSKNVIFSTDRGRYIKPILPKGNTIRLAVDATLRAAAPYQRARRERDPNPEKKKVYVEKGDMRAKKLARKAGALVVFLVDASGSMALNRMQGAKGAALSI

SEQ ID NO: 198923 - protein, 565 aa, Unknown
  Bacterial polypetide isolated from the Sargasso Sea
QAIGSDYLNQIEEIPKKVKEAPFIQVPIGITEDRLVGSIDVAASLSTGEQVFQPGILAEAHRGVLYVDDINLLDDGIVNLILEAIGREQNNIERDGLSLSHPCKSLLIATYNPEEGALRDHVLDRFAIVLSADQSIDNSQRVEITKSVLSHAENNIKFSEKWSEESDNLSTQLILARQWLKDVKITKEQITYLVNEALRGGVEGHRSELFAVKVAKANAALRGDENVNSDDLKVAVRLVILPRAMQIPPDDDDIQPPPPEDQSPPPPPQSNNEESEPDTSENDNEQDQEQEEDNSDGEEESTPEIPEEFILDPESCMVDPDLLLFSSAKAKAGNSGSRSVIFSDSRGRYVKPIIPRGKVKRIAVDATLRAAAPYQKSRRLRNPNKSIVIEENDFRAKLLQKKAGALVIFLVDASGSMALNRMQSAKGAVIRLLTEAYENRDEVALIPFRGNQAEVLLPPTRSITAAKRRLETMPCGGGSPLAHGLTQSAKVAKNALSTGDIGQVIVVGITDGRGNVPLGLSLGQNEVEGKDNQNENVNLKQEVLDIAAKYPMLGIKLLVIDTERK

SEQ ID NO: 198924 - DNA, 771 bp, Unknown
  Bacterial polypeptide expressing nucleotide sequence isolated from the Sargasso Sea
tcaactccaatagctaaatatatttatgaaaattgtgctaaaaatgaaaaaagagttcaagcgttgggtggagctaaaaatcattgcgtagtaatgcctgattgtgacttagatcaggctgtcaatggattgatgggtgctgcttatggctctgcaggtgagagatgtatggctcagtctgttgctgtagcagtaggtaatattggagataaattagttgatttactggcaaaaaaagttgaagcattaaaagtaggtcctggtatggataaacaatctgaaatgggacccttggtaaccaaagaacatttagaaaaagtaaaaaattatatcgatataggcgaagaagaaggcgctaagcttattgttgatggaaggggatttaaaattcaggggtatgaaaatggatactttattggaggaagtttatttgatcatgtcaaaaaagatatgaaaatttataaagaagaaatatttggaccagttctatctgttgtgagagcaaaagactttaatgaggcgttacaattagtaaatgaccatgaatatgggaatggtgtaagtatatttactcgagatggagatacaggtagaacattttctaataaagctaaaattggaatggttggtatcaatatacctattccagtgccaatggcttttcacagttttggaggatggaaaagatctttattcggagatcaacatatgcatggtcctgaaggagtaagattttacactaaacttaaaactataacatcaagatggcca

SEQ ID NO: 198925 - DNA, 1018 bp, Unknown
  Bacterial polypeptide expressing nucleotide sequence isolated from the Sargasso Sea
agaaccaatcggtgtggttgttgccgtaagcgcatttaatcatcctctcaacctcatcgttcaccaagtgggtcctgctattgcaagcggatgtcctgttattgttaaaccagctgaggatacccctctatcttgttttcgttttgtacaaattttacatgaagctggtctaccaactgactattgtcagtccttagtcgttaatgatctctcagttgctgaacaacttgttagcgataaacgagttggtttttttacgtttataggtagcggtaaagttggatggatgcttagatctaaattggcaccgggtgcgaggtgcgcacttgaacatggtggagtggcccctgtaatcatagacgatacagcagacttgaatgacactttaccactcattgcgaaaggtggtttttatcatgctggacaagtatgtgtatcagtccaacgtgtatttgcaccccgggaaattgccgaagatgttgcatgcaaaatagctgaattaggtaaagcaatgaaaattggcgatccaacattggaaaaaactatggttggtccactaattcgtctaaaagaagttaaaagagttggagaatgggtagatgaggcaaaaaaagccggagcaacttgtataattggaggtaatcaaatttcagatactacctattcttgtactgtgcttcttgacccgcctcaaaatatacgtataagcgaacaggaaatattcggaccagttatttgtgtatacagttatgataatgttgacgatgctataaaaatagcaaactctttgccttatgcattccaggcatcaatcttgtctcgtgatttagattttattatgaaatgtaatagaagaatcgatgcagctgcaattatggtaaacgatcataccgcctatcgtgtcgactggatgcctttcgcaggactaaaagaatcaggttatggtgttggtggtattccttatacattcgaagacatgcaaatagaaaaacttaccgtgatccgttcgctagaactt

SEQ ID NO: 198926 - DNA, 843 bp, Unknown
  Bacterial polypeptide expressing nucleotide sequence isolated from the Sargasso Sea
tagtagaaaattttaaaaaacttaataataaaaatcttatatggaagaaaccatctaaggtttcagatgatattctattaaccacacatgaaaataattatttaaatttagtaaaaagttctttcccaaaaaaaggtttttcttcacttgatggtgatacaatcatttcacctggaagcaaagatgcaactttcgatgcagttggatcaataattgctgcaattgatggagtagaaaaaaaagattttagaaatgcattttgtggtgttcgacctcctggacatcatagttcacaaaataaagcagctggtttttgcattttaaattcagtgagtattggtgcaaattatttgttaaaaaaatataaatataaaaaagttgcaataatagattttgatgtacatcacggtaatggaacacaggatattttttatgaaaatgaaaatgttctttttatatctactcaccaatatccctactacccaggaactggctctgaacaagaaagaggtaaatttaacaatatctttaatatacctttgccagctggcataaattcagaggaatatttaaacgtatttgaccgtgtattaaaaaaattagaggagtttagaccagagtttatattgattagcgctggttttgacgcccatgaagatgaccccctcgctcaatttaatttaaaaacagaggattattttactattactaaaagagtattagagggttctaaaaagttttgtaatggaaaagttgtttcaattttagagggcggttatgacctaaacgcacttcgagacagcactaaaagacatgttgatgctcttttagaatttaattgat

SEQ ID NO: 198927 - DNA, 474 bp, Unknown
  Bacterial polypeptide expressing nucleotide sequence isolated from the Sargasso Sea
aaacgcaaaaatgtattgatagatttgataaaataagaaatgcagaaggaaatattggaacagctgaactgagactttctatgcaaaaaacgatgcaatcaaaatgtgcagtttttagaacagagaagactttgaaagagggcgttgaagagataagaaaaacatttgatggtctagactctctgtctgttaaagacaagtcattaatatttaatacagatcttgtagagactttggaattcgataatctaattagacaagctgtagctacagttgactctgcttatcacagaaaggaaagtagaggtgctcatgcaagagaagattatccaaagagagatgatcaaaaattcatgcaacatacacttgcttggtgtgatggaaaaaatacaaagataacatatagggatgtccataaaacgaccttaacaaatgatgttcaatattttccacctcaagaaagagtttattaat

SEQ ID NO: 198928 - DNA, 906 bp, Unknown
  Bacterial polypeptide expressing nucleotide sequence isolated from the Sargasso Sea
gtggcacgacgatcacatcaaagatcaggcattgatgactcaagcggtacatgaccatggcgccctagcaggggtggagctttggtttggcggtgctcggtcagcaaatcattacacccgtgagactgccgttgatgtggccagtattccgaatcttgcgggtcatccatatcagccaaggtcaatggacaagtcggatatccgcgagttccggcgttggcaccgagaagcagcgcttcgggcaaaggaagcggacttcgatattgtgtatgtgtatgccacccacggctacctcttgtctcacttcctctcggcccagaccaatacccggaccgatgagtacggcggatccgtggagaatcggacccgactgctccgggaactcattgaagataccaaggaggccgtgggagaccgctgcgctgttgccgtacgttattcggttggcggcgacgatggtgaggcgccggaactgaccgcagagcgccgtgatcgccttgagatgctggccgaactgccggatttgtgggacatcaacatcaacaactattaccaggagatgggtgtctcacgtttcttcaaggaaggatcacttgaggaatacatgtcgtttgtgaagtccgtcacgaccaagccggtggtgactgtcggtcggttcacgtcgcccgagaccatgacatcccaggtacggcggggcatcgtggacttcatcggcgcggcgcgcccctcaatcgctgatccgtttttacccaacaagatcctggagggccgcgctgaggatattcgcgaatgtatcggctgcaatatctgttacaccggagacggactgggcacaccgatccgctgcacccagaatccgacgatgggagaagagtatcggcgcaactggcatcccgaagtcgttgc

SEQ ID NO: 198929 - DNA, 676 bp, Unknown
  Bacterial polypeptide expressing nucleotide sequence isolated from the Sargasso Sea
tgtggatgttcctgtgctatccaggagaactagagatgataaaaatggtttttcctaccctttcaagatcggtccaaaacaattttttgattttgcaactcaccctacttggtctctttctaccttgctgagcggcattcctaaaccaatgaactatgtaacatcaaaaagcggagatggtatttttaaaagaaaagaaagtagaggctctacagattggaatactcttaaaagagtgagagataaatggaaaggtaaacttataattaaaggagtaatgtctcctgacgatgcagtaaaaattaaggaagctggtgctgatgcaatacaagtttcaaatcatggaggcagacaattagatagcgctacggcagcaataaatatacttccagtaatcagaaaatcagtaggaaatgattttcctttaatctttgatagtggaataagaagtggaagtgatatcgtgagagcgcttgcatttggcgcggattatgcaatgattggtagaccagtaatgtacgcaatgggagctgatggaagaaaaggattaaggagaattgtggaaataattaaagaagaggccagcacgacactcgggttagtaggattaaatgatattaatgatgtaacttctaatatagtaatagatagtactgtaaataaggtagattactaa

SEQ ID NO: 198930 - DNA, 258 bp, Unknown
  Bacterial polypeptide expressing nucleotide sequence isolated from the Sargasso Sea
ctgatttagttgaaaccttagaatttgataacttaataagacaggcaatagttacactcgattctgcatacgaaagaaaagaaagcagaggagctcatgcacgagaagatcatccaacaagagatgataataattttatgaaacatactttatcttggtgtaaaggtagcgaaacaaaaatttcttatagagatgtacatagatcaactttaacaaatgatgtacaatattttccgcctcaagaaagagtttactaat

SEQ ID NO: 198931 - DNA, 622 bp, Unknown
  Bacterial polypeptide expressing nucleotide sequence isolated from the Sargasso Sea
gacacaggcgataagataaaagagatagttaaacctaaaattgaaaatttaaaaataggtcctggacttgaccctgattcagaaatgggtccattggttacttttgatcatttacaaaaagttaaaagatatatcgaccagggtgttgatgagggggctgacttggttgttgatggaagaaatttgaaacttcaaggttatgaaaatggtttttttatcggcggttccttttttgataatgttacaacggatatgtctatttataaggaagaaatttttggtcctgtcttatcaatggtaagagcagacacgttcgattacgctcttgatatagtaaataagcatgaatacggaaatggaacagccattttcacttcaaatggtggggttgcaagacaatttgcaaatgaatgtcaaattggaatggtaggcgttaatgtacctattcctgttcctgttgcttatcattcgtttggaggttggaaaagatctgcttttggtgggcatggagtatatggtatggaagcagtaaggttctacacaaggctgaagactgtgactggaaggtggccttcaggtcaacatacaggagcacaatatacctttccaagtaatagttagc

SEQ ID NO: 198932 - DNA, 727 bp, Unknown
  Bacterial polypeptide expressing nucleotide sequence isolated from the Sargasso Sea
tatgccagactgtgatttagatggtgcagtaaatggtttaatgggtgccgcttatggttcagctggagaaagatgtatggctcaatcagttgcggttgcagttggagacatcggtgatgaacttgtatcaagattatcaaaaaaagctgaagctttaaaagttggtcctggaatggataaaacatcagaaatgggacctttagttacaaaagaacatttagaaaaagttacaagctacgttgatttaggtgtcgaggaaggcgcaaaactagtggttgatggtagaggtttaaaactccaaggctatgaaaatggtttctatataggtggatgcttatttgatcatgtaaatgaagatatgagaatttacaaagaagaaatatttggtccagtcttatcagttgttcgagtaaaaacttttgaagaagcagcaaaattaattaacgaccatgagtacggaaatggagttagtatttatacaagagacggtgatgcaggtagaacttttgcaagtaaaattcaagtaggtatggttggtattaacgtgccgatcccagttccaatggcatttcatagttttggtggttggaaaagatcattatttggagatagcggaatgcatggtatggaaggaataaaattttatactaaacttaaaactgtaacatctagatggccttcaggtgtccgatcaaatgcggaatttgttatgcctacaatgaaataa

SEQ ID NO: 198933 - DNA, 896 bp, Unknown
  Bacterial polypeptide expressing nucleotide sequence isolated from the Sargasso Sea
tatgaaaataaaaaaacaaagcggaccaccggaagatttaatttattttgatgatgatcttcctctctcacaatcacaagtagaggatgtagttgaaatattcaaaactcctttaactggatcatataactgggactacacagttgcagataacagaataaaaaagctttatgagcttggtaaagagttaaactggaatggatcgattgatcttaattgggactacacgcatcccgcagatgaaagaattcttgagactgatgaggaactaccgcatgagacactaaaagcctatgaaaatctatcagatgaagaaaaaatccttttcgatagacatgatgttgctgaattaatgagtcaattcttgcatggtgagcaaggtgccctgcttgttgcttctcaattagctagttgtgcgcctacctataatgctaagctctatgcagcatctcaaacatttgatgaagcaagacatgttgaagttttcaatagatatcttcaagaaaagataggtattcactaccctataaatcctgcattaaagtcactactagataagatccttactgatgaaagatgggacctcaaatttatagggatgcaaattattattgaaggtcttgctcttgcagctttctcaatgctgaaatctacatcaaaagatcctcttttaaagcagctacttcactacgttattagagatgaagctaggcatgtaacttttggcattaattacttggaagattttattaaaaccttaagtccagaagaaataaatgaaagagccgagtttgcatatgaggcttgtgtgatttcaagagaaagacttatcaataccaaatctcagcaacgctttttaggtatgtcagaggaagaagctagagagtttcaattaa

SEQ ID NO: 198934 - DNA, 781 bp, Unknown
  Bacterial polypeptide expressing nucleotide sequence isolated from the Sargasso Sea
gtgatgggtcgcggttcagacgtgggcgctgtgctgctcgaagacgagcgcattgcgggcgtgagctttaccggctccgtcggcacgggccagcgcgtggccgccgcctgcgtgccacgcggcgccaaggtgcagctggagatgggcggcaagaacccgtttgtggtgctggacgacgccgacctgaacgtggccgtgggcgctgcgattaacagcggcttcttctccaccggccagcgctgcacggccagcagccgcgtgatcgtgaccgaaggcatccacgaccgcttcgtggccgccatggtcgagaagatgaagacgttgaaggtggatgacgcccgcaaggccggcaccgacatcggccccgtggtggacgaccgccagctcgcgcaggacctggaatacatcggcatcggccagcaggaaggcgccaagctcgcctacggcggcgaagcgctggaaaagaacgctgacggcgcgcccggcttctatctgcgccctgccctgttcaccgagaccacgcccggcatgcgcatcaaccgcgaagagatctttggccccgtggtgagcgtgttgcgcgccaagaactacgaagaggcgctggccctggccaacgacacgctgtttggcctggccagcggcatcgccaccaccagcctcaagcacgccacgcacttcaagcgccacgcgcaagccggcatggtgatggtgaacctgcccacagcgggcgtggactaccacgtgcccttcggcggccgcaagggcagcagctacggcccgc

SEQ ID NO: 198935 - DNA, 811 bp, Unknown
  Bacterial polypeptide expressing nucleotide sequence isolated from the Sargasso Sea
atgagtaatcaaaatagaactttttcaggaggtagaattgatagaaataaacctatcaactttatgtttaatggtcaaaaatatcaaggatttgaaggtgatacattggcttcagcattattagccaatgatgttcatcttgttggaagaagttttaaataccaccgacctagaggaattcttactgctggatcagaggagcccaatgcactaattcagttaggtataggtgcaaggactgaacctaatattcgtgcaacagagatagaaatttacgagggtttagaagcagccagtcaaaattgttggccgtcagtaaattttgatattggaggagcaaataatattttatctcgactatttcctgcaggattttactacaaaacttttaagtggcctcctagtctttggttattttatgagcattttatacgtaaagcagcaggcttaggagaatctccgaaaactaaaaatccagatcgatatgaacaacgttttcactattgtgatgtaatggttgttggaggaggtattagcggattatcagcagctttagccgcagctcgagcaaaatgtgatgtcttgttagttgatgaaaattcatattttggcgggtatttaagtaattctgaagcatccgtaaacggcaaaaaaatagacgattggatcagaattgtttgcgaagaacttgagtcatatgagcacgttaagcttttaaatagaacctccgcaatgggatattatgactataattatgtgacagcattagaaaaagtaactaaccatcatcaagagctatcaaaaacttgcc

SEQ ID NO: 198936 - DNA, 709 bp, Unknown
  Bacterial polypeptide expressing nucleotide sequence isolated from the Sargasso Sea
atggctatcgccccaaccgaaatagaaacgccaccagaggctagaagtgaagactacctttggacgctgaacttcggtccgcagcatcctgcgacccatacaacgttgcgattggttctgaagcttgagggtgagcgggttgttgatgcagttcctgaaatgggctacctccattcaggctttgaaaaaataggtgaacatctcacctttaaccaatatgtcactgtgaccgatcggatgaattacatctcaccgatggccaacaatgtagcgtggcaccattcggttgagacacttcttggcatcgacctcacgccgcgttgtacttatattcgcaccattgtcgccgaactggcaagaatcagtgatcacctgctgtcgaacggtgcagttggtcttgatacaggggcatttacttacttcctttatgccttctatcagcgtgaagtgatctacgacattttcgagacgctttgtggagctcgtttcacaaacagctacacacgtgttggaggcgtatcgcaggacttcaccccacttgtcattgagaaaattcgggccttcctcaagacgttccccaaaacgctgaatgatatggagcgattgctgaatcgtaatcgtatttttgtcgaccgaaccaaaggcgtcggcctgctcacaaaggaggaggcaatcaatcgaggggcgacggggcctgttgctcgagcga

SEQ ID NO: 198937 - DNA, 787 bp, Unknown
  Bacterial polypeptide expressing nucleotide sequence isolated from the Sargasso Sea
agaaactgcaagacgtattattaaaaattcagcagaaaatctctctgaagtaagtttagagcttggtggaaaaagtccagtcgctgtatttgacgatgcggagcaagaaaatgcaattaatggaataactgctggaatttttggagcaactggacaaagctgtattgcaggttcaagactttacattcaaaaaggaatttataacgaatttttagataagttatctagtagagcttccaaaataaaaataggagctccaatggatctggatacagagatgggtcctttaagtagttttaaacaattagagacaattgaaaaaaatataaaagatacggttgatcaaggtggaaaaattaagtgtggtggtaaaagagactccttttcaaacaaaggatactacttcccaccaacaattatagaatgtgataatcacaatctgccaactgcagaaaatgagttatttgggcctatattatcagtaatgaaatttgatacagaggaggaagtaattaataaaatgaatgataatcaatatggattatcctcaggtgtttatacaagcaatctatcaagaggaatgcgagtatctaaggcaataagagctggaattacttttgttaatacttacagattaatttcaccttcagctccatttggaggtataaaggacagtgggtacggcaaagaagctggcatagattctattaaagattatacaagagtaaaaacaacttggttctatacatctgatgaaccttcattagatccattctcaattagataa

SEQ ID NO: 198938 - DNA, 886 bp, Unknown
  Bacterial polypeptide expressing nucleotide sequence isolated from the Sargasso Sea
atgggagtagtaaatgttattacaggttttgctgatccgtgtggaaaaactttaacaactcataaagatgttgaaagaattgcttttacaggcggaccagaaactgccagacatattattagaaactcagcggaaaatttatcacaagttagtttagaattaggaggcaaaagtcctgttgctgtatttgaagatgctgatcaggaaaacgcattaaatggtataactgcaggaatatttggagcaagcggacaaagctgtatagccggatcaagattatatttacaaaaaagtatttatgacatttttttagataaattagtaaatcgtgctaaaaaaataaaattaggaaacccaatgtctaccgatacacaaatgggtcctcttagtagtttaaaacagttggaaataatagaaaaaaatataaaacttacagtagatcaaggtggaaaaataagatgtggaggaaaaagacataatctgtcaaataagggttattattttccagctacaataatagaatgtgaaaatcataaccttccatcagctgaaaatgaattattcggtcctgtcttatcagtaatgaaatttgaaaccgaagcagaggtcattaataaaatgaatgataatcaatatggtttatcctctggagtttatacaaaagatttaggaagaggcctgagagtttctaaagcaatacgcgctggaataacttttgtaaatacctatagattaatatcaccttctgccccttttggtggaatgaaagatagtgggtacggtaaagaagcaggaatcgaatcaataaaagattacactagaattaaaaccacttggttcaacacttccgacaaaccaatgtcagacccgtttacaatgggataag

SEQ ID NO: 198939 - DNA, 361 bp, Unknown
  Bacterial polypeptide expressing nucleotide sequence isolated from the Sargasso Sea
ttttagaactgaaaaaactttaaaagaaggagtagaagaaataagaaagccatttgaagggatggagtctatttcagtaaaagataaatcattagtttttaatactgatttagttgaaactttagaatttgataaccttataagacaagctatagttacaatagattctgcatatgaaagaaaagaaagtagaggagcgcatgcaagagaagaccatccaaaaagagatgataacaattttatgaaacatacattatcttggtgcaaaggtagcgaaacaacaatttcttatagagatgtacatagatcaactttaacaaatgatgtgcaatattttccaccacaagaaagagtttactaa

SEQ ID NO: 198940 - DNA, 913 bp, Unknown
  Bacterial polypeptide expressing nucleotide sequence isolated from the Sargasso Sea
aatttcatgtgctaaaaagaacgaagtagaccttgcggtatctgctgcaaaagcagcctttcagtcaagagtcctggttgacatgccattacttgaaagagctaaactaatgcaccgcattgcggatgaaacaagaaaaatagctgatgaaggcggcaagatgctttgctatgaaaatggtaaaatgcttggttcagctattaaggaattcaatgatgttgctgatatgtttgattactatgccggcctgacagataaactagagggaaaaacaattcctgtttcaccaacagtttttgattatactgttttagaaccttttggtgtttctgcgcatatagttccatggaactttcctatatcaatggttggtagatctcttgcatgttctttcgcaacaggaaattctacaattgtaaaaacagcagaactaactcctctatctgctactttttttgccaaagctatagaaaatgcaggtgtcccaaatggtatagttaatataatttgtggttatggaaatgaagcaggttcttatttggtatcacatcctgatgtaaatcacgttgtctttactggttctgtagctacagggaaaaaaatattacattcttgtgctgataaagcaattcccgcagttattgaacttggtggaaagtcagctggtatagtttatgaagatgcagatcttgatcaagttatagaaagtgcacgtcacggtatatttggagttgctggtcaaatttgtacagctatgtcgcgattagttgttcataaatcagtaaagaatgaattaattgataagcttgtcgatttgagtaaatctcttaaagttggtcctggttatgaagaaggaactggattaacaccaattatttctgaaaaacaactagaaaaagtagaaggttatgcg

SEQ ID NO: 198941 - DNA, 982 bp, Unknown
  Bacterial polypeptide expressing nucleotide sequence isolated from the Sargasso Sea
ttggtacacggcggatattcaaatgctaatcactacagccgcattccgccaattgcacccagcgtgacctcagttaattcatatgatcccgtacaggcaagggcaatgacaaagtcggacattcgcgacttccgcaagtggcatcgtcaggcagcagtccgttcaaggcaggcaggattcgacctagtttatgtttatgcaggacacaacctgacgcttctcatgcacttcctctcacgtcgcttcaaccaacgcactgatgaatatggaggctcacttgaaaaccgtgttcgccttttcagggaaatactggaagacacaaaagatgcagtaggagacagttgtgcagtcgcagtacgttttgccgtggatgaactgttgggatcagagggtatcacatgtgaaagcgagggacgtgaagtggtggagatgttggctgaactgcctgacctttgggacgtgaacataagtgaatgggaaaacgattcagccacctcccgctttgagaaggagggctatcaggaaccgtatattagttttgtcaaatcccttacttccaagcccgtagttggtgttggacgttacacctcccccgacaaaatggtttccctgattcaggatggtgttatggacatgatcggagctgctcggccatcaattgccgatccatttttacctaagaaaatagaggagggacgacttgatgaaatacgggagtgcatcggctgcaacatctgcgtagctggagattggctttcagtacctatgcgttgcacacagaaccctacgatgggagaagaatggcgacgtggctggcatccagagcggatcgaacgcagtaagagcgacgatggtattttggtagtcggtgggggaccagcaggacttgaatgcgccttgtctctcggcaaacgcggttatcgagtgattctggcggaagcttcagaagatttaggtggtcgagtgtacaaggaaagcaaac

SEQ ID NO: 198942 - DNA, 562 bp, Unknown
  Bacterial polypeptide expressing nucleotide sequence isolated from the Sargasso Sea
tgatttagttgtttttggtagagcagctgcaaaaagagcatctgaattagtaaaacctggtcagccacatgaagatatttcagagtcagagactgataaatgtttagcaagatttgataaacttagaaattctagtggttctaataatacagcagatttaagactttcgatgcaaaaaacaatgcagtcgaaatgtgcagtttttagaactgaaaaaacattaaaagaaggtgttgaccaaataagaaaaccctttgaaggtatggatgatctatcagttaaagataaatctttaatttttaatacagatttggttgaaacattagaatttgacaatttaattaggcaggctatcacaacaatggactctgcttaccatagaaaagaaagtagaggagctcatgctagagaggattatccaaaaagaaatgatgagaaatatatgcaacacacattatcatggtgtgagggcaaaaagactaaaatagattatagaccagtccacaggtcaactctaactaacgatgtacagtattttccaccacaggaaagaatttactga

SEQ ID NO: 198943 - DNA, 961 bp, Unknown
  Bacterial polypeptide expressing nucleotide sequence isolated from the Sargasso Sea
tatttttaaaagtattccaattagaatttttggaattatgaataatgtaacattgcttgcagttcctctatttatttttatgggaactattcttgaaaaatctggtattgctgcaaagatgcttgaaaatatggcgaaggcttttagaggtataaaaggtggattgtctatatcgataattattgttggcgctttacttgcagcaagtacagggattgtaggtgcgactgtagtaactatgggtctaatgtccctcccaattctaataaatcaaggatacgataaaagcttctcagctgggttggttgcatccactgggactcttggacaaataattccaccatccatagccttggttttgcttggtgatgttatgtcaaatgcatatcaaagagctcaaaatgacatgggtatattttcccaacaaaccgtaactgttggagatttgtttataggtgctattattcctggaattctgatatgtattgggtatcttatttatacactttataaaaatagcaacaatttagatttaaaagatacttcaacagaatttgctatagataaagttgaattatttaagacgctagcgctcccaataatcttaatttttttagttttaggctctatatttgcaggtattgcaacgcctacagaggcggctgcaattggagcatttggtgctttattgattgcattaataaatagaaaagtcaatttacatttcttaaaagagacttctgagaaaactgcaattgtttcaacaatgatttttacaattcttattggtgcatcaattttttcactaatatttagaggagtcggaggtgatgagttaattgacctaatttttaattctctccctggaggaacatttactgctctaatatttgtcttagttattattttttttcttggttttattttagattttattgagatttgttacgtaatagtgcca

SEQ ID NO: 198944 - DNA, 313 bp, Unknown
  Bacterial polypeptide expressing nucleotide sequence isolated from the Sargasso Sea
aatgtatttacagcaaacacaagtaaaaaataaaacagctttagttacaggagctggcaagggtattggtaaagcttgtgctatagctttggcagaggcgggtgctaatcttattattcttagtaggactaaaagcgatttagataaagttgaaaaacaaatcactaaacttaagagaaaatgtaaatcgtatatatgtgatgtttcaaactatgatgatttaaaaagtgtattcaataaaatttcttcattggatatattggtaaataatgcaggaacaaatagaccagatcattttacaaaaattaaaaaa

SEQ ID NO: 198945 - DNA, 938 bp, Unknown
  Bacterial polypeptide expressing nucleotide sequence isolated from the Sargasso Sea
attatccgcaactaaattattagttgttgcaggtggtggaggtggaggttttgatggtgccggcggaggaggagctggtggtttaatttataacgcctcatactctttatctgataatagttacagcattacagttggagctggtggttcaaaagcaacaagtgttcctggacaagcatcgaatggtcaaaacagtacattcggaaatcaaacagcaattggtggtggaggcggtggaagtaaggcatctaacggtagaactggaggctctggaggtggatacggtcataaaaaaaattcaccatcaccaggagctggaacacttggccaaggacatagtggtggtaatagtggtcaaaatgcatatggaggctctggcggtggtggagctggaggtgccggaaatggaccttctggaagaaatggtggagctggcggagctggacttcaatatgacatttctggaagtaatcagtggtatgcagccggaggaggtggaggaacttgggcaggaacaggtggtgccggtggttcaggtattggtggacaaggtggatcaaatagtggacagcgaagtggtggcaatggtacagcgcatacaggttccggaggaggcgctaatggatgggctggtggatcttcagcaggaaatggtggttcaggtattgtaattttaaattacagcgctaacaatgacgtttctgcaggtttaactttaaatactggttcaggacaggtaaatctacaaagtacagtatctgatctaacttccttaactgttaataccacaaacagttcttcagtagttactggtgtgatttctggtagtacagatttaactaaagctggatcaggtttattaacggtttcaggcaacaatacttattcaggagatacagctgttaatgctggaactttatttggtggaacagaatagt

SEQ ID NO: 198946 - DNA, 463 bp, Unknown
  Bacterial polypeptide expressing nucleotide sequence isolated from the Sargasso Sea
tttggaattcccgaagcctatttctaaaatattgaattgggcaagagcatatgatatgtggtattttcaatttggtttggcatgctgtgccattgaagttatggcagcaagtggaccgagacacgattttatgagattaggtataattccacttcctgcatcgccaaggcaagctgacctaatggtagttgcaggtaccgtgaccgacaaaatggcgccagcagttaaaagattatatgatcaaatgccggaaccaaagtatgtaatttcaatgggttcatgttcaaacagtgggggaccgtattgggattcttactctgtcacaaaaggagtagatcaattaattccagtagacgtttatgttcccggatgcccaccaagaccggaagctttgcaagaaggaatagttttattacagaaaaaaataaaaggtgaagatagaaagaaaagtgagagagaaaga

SEQ ID NO: 198947 - DNA, 929 bp, Unknown
  Bacterial polypeptide expressing nucleotide sequence isolated from the Sargasso Sea
tatgaaaataaaaaaacaaagcggaccaccggatgatttaatttattttgatgatgatcttcctctctcacagtcacaagtagaggatgtagttgaaatattcaaaactcctttaactggatcatataactgggactacacagttgcagataacagaattaaaaagctttatgagcttggtaaagaattaaactggaatggatcgattgatcttaactgggattatacgcatcccgcagatgaaagaatccttgagactgatgatgagctgcctcatgaaacactagaagcatatgaaaatctatcggatgaagaaaaaatcctttttgatagacatgatgttgctgaattaatgagtcaattcttgcatggtgagcaaggtgccctccttgttgcttctcaattagcaagttgtgcacctacctacaatgctaagctctatgcagcatcacaaacatttgatgaagcaagacatgttgaagttttcaatagatatcttcaagaaaagataggtattcactaccctattaatcctgcattaaagtcactgcttgataaaattcttactgatgaaagatgggaccttaaatttatagggatgcaaataattattgaaggtcttgctcttgcagctttctctatgctgaaatctacatcaaaagatcctcttttaaagcagctacttcactacgttattagagacgaagctaggcatgtaactttcggtattaattatttagaagattttattaaaaccttgagtccagaagaaataaatgaaagagccgagtttgcatatgaagcttgtgtgatttcacgagaaagacttatcaatacaaagtctcaacaacgctttttaaatatgacagaggaagaagctagagagtttcaattaaatactggaagttttgagatgttcagaaactcct

SEQ ID NO: 198948 - DNA, 499 bp, Unknown
  Bacterial polypeptide expressing nucleotide sequence isolated from the Sargasso Sea
aaggctacttattcaaaaaaagggtctgaagaatttgcaatagatatatttgataagttattaaactctaagggagatattcctccttctgaacttagactagatatgcaaaaaactatgcaaagtcactgtgctgtttttagaacaggtgaaggtttgaaacaaggatctaagaaaatggatgagatattagataaatttgcacaagtcaaaatatcagataagtcacttatatggaatactgacttgcttgaaacaatagaactagaaaacttaatacagcaagcagttgttactgtgaagtcagcagaaaatagaaaagaaagcagaggggctcatgcaagagatgattttagagatagaaatgatgaagattggttatttcactcattagcatggttgaaaaataaaaaaacaaaattaggaacaaggcctgttactttacgagccatgtcaaatgaagttcagtcatttcctcctaaagcaagagtctattgag

SEQ ID NO: 198949 - DNA, 949 bp, Unknown
  Bacterial polypeptide expressing nucleotide sequence isolated from the Sargasso Sea
tttgagggagaatggccaaagttacttccacgagaaagaggaaaatatttaagagcaatagcggataaacttagaaagaatgctgagttacttggagaaattgaaactattgatactggaaaattatttagagaaacaaaaaagcaagcaaactatattgcagaatattatgactattatgctggtatggcggataaagttgagggaacagttttgcccatagataaaccgaacattcaagcaataactacgagagtaccaataggtgttatagcagcaattattccttggaattcacagatgctgttaacagtaactaaactagcgcctgctttagcaatgggaaatactgttgttataaagtcgtcagagctagcgcctgcagttttatttgagtttgcaaaattagttgaagaaacaggaataccaaaaggtgttgtaaatgttattacaggttatggtgatccatgcggaaaggctctaacaacacacaatttagttgaaaaaattgcttttacaggcggaccagaaactgcaagacacataattagaaattcagctgaaaatttatctgaagtaagtctggagcttggaggaaaaagtcctgtagcagtatttgaagatgctcatcaagaaaatgcaattaatggaattactgcaggaatttttggtgctagtggtcaaagttgtattgctggttcaagactttatttacaaaaaggaatttataatgaatttttagataagcttgctgaaagggctgaaaaaataaaaattggtgcaccaatggatccggatagtgaaatggggccaattagtaattttaagcaattagagataatagaaaaaaatattaaattaactgtagagcaaggaggaaaagttaaatgtggaggtaaaagacattcattttcaaatgaaggatattatttccctccgactattattg

SEQ ID NO: 198950 - DNA, 926 bp, Unknown
  Bacterial polypeptide expressing nucleotide sequence isolated from the Sargasso Sea
tatgaaattaaacgtaaatgtaaaagaattattaagtgccgtagatgttcccgctcagtgggtaggtattagagaagtatttgaagcgcacacaccccgaatgattcgcgatggtgtgcctgtagctaatgcaagatcatccactcacggtattatggttgaagtattggtcaatgggcaatttggatattatggtacaccagatatgacaacagaaggcgtagctcgtgccgcaaagaaagcttataaacaagcgcagattgcctcagagcacgctctatacacttttgacgagacagcaaggccagccttccagggtgaatactgttcaccattcacaaaagatagagaatcattatctgcagggagtcttaatgatttgctattagatgcatacaaaacccttaaggtctctgaaaagatagtcagtgcatcttctctctgccaagtgatagagacatcatccagatttgcaagctcgaatggaagtgatataaaccaggaatttctaatgcttgagtttgaccttagtgccacagcagcagatggtacaaaccagcagacaagaacttttggtggtatgcgtggtacctgtaggcagatggggcttgagtattttgataagtatgagatcatggcaaatgcgaaccgcatcggagaacaagcccttgaattattaaatgctgatgaatgtccaaatggggagatggatgttgtaattgcccctgatcagatgatgctacagattcacgagagtattggacatgccctagaggtggatcgtattctaggtgatgaaagaaattatgcaggatggagtttcgtaaagctagaagattttggaaagcttcaatatggatctaagcttatgaacatcaccttcgatccaaccctcgaatcagagtttgcatcttatgcgttcgatg

SEQ ID NO: 198951 - DNA, 869 bp, Unknown
  Bacterial polypeptide expressing nucleotide sequence isolated from the Sargasso Sea
aatgaagaagaagctttcaataacaagaagggatttcataaacggtgtcagctatggtttagcagcatcagttgcaccgattgattttttgaaagcaaagaatattgatccttttaagtatccacctgcgttaacaggaatcagaggcaatcaccctggttcttttgatcatgctcataggcttgcattggccggaggaaattttcttgaagagatcatagatcttggggagagcaatgatttaattgttgtaggaggaggaatatcgggtttgtcagcagcatatttttatcaagagcgcaccgctttaaatcaaaacatacttatactcgacaatcatgatgactttggcgggcatgcaaagcgcaatgaatttcaagtcgatggaagagaaatcttaacttatggcggcagccagtccatagagtcaccaagttattatgaagaggtatcaaagaagttgatggcggatctcgggattgattttcagaaattttatactgcctatgattttgattattttaaaaatagaggacttacttcctcgttcttttttaataaagaaacctatggtgagaataaaatcgtccgcaatgttcccaactataggtatgacataaatcataagaacaacacaaaaccagaaaatataaaaaaagttgtgaaagagatgccgatctcagacaagtccaaggatgagttcataagactatttttagacaagacagattttttccctgagatgactctggaggaaaagttttatcatttagaaaatatgagctatgaagagtacctaagaaagtatcacaaagttggcgatgaagtcgtgggtctttttcaccatgttatggtcactttggggcgtt

SEQ ID NO: 198952 - DNA, 769 bp, Unknown
  Bacterial polypeptide expressing nucleotide sequence isolated from the Sargasso Sea
aatgtatttaaaaaaatataatctaaaaaataaatattcactagtaactggagcaggcaaaggtctgggtagagcttgtgcaatagctctagcagaagcaggatctaatttaattataattagtcgaacaaaaaaagaccttgatagtgtttcaaaaattataaaaaaattaaaggtaaagtgtaaatcttacacatgtgatgttacaaattataatgaagtcaaaactataataaataagcaaccaagaattgatgttctggttaataacgccgggaataatattcctgaacactttacaaaagttaaaacaaaaaatatggagtatcttgttaaggttaatactatagcaacatttaatattgctcaattatgtgcaataaaaatgatgaaattaaaaaatcgtaaaaaagttggaggttctattattaatatgtcttctcaaatgggacatgttgggggccctataagaagtgtctataatatgaataaatggggcttagaaggtttaacaaaaggtatggctgtagacctggcaaagtataatataagagtaaatgcagtggcaccaacatttgtcgttaccccaatgacaaaaaaatttttgaaaaataaaaagtttaaaaaagaaactttaaataacattccactcggtagatttgcagaaatgtcagaaatagcatcaactgttgtttttttagcatctgacgctgcttcaatgatccatggaacttctatattagtggatggtggatggactgcaaaataa

SEQ ID NO: 198953 - DNA, 289 bp, Unknown
  Bacterial polypeptide expressing nucleotide sequence isolated from the Sargasso Sea
aagcttatagaaaatcaaggtgcaggagaaatactaatcacttcaattgatcgagatggaacaatgaagggttatgataaagatttaataaaaattgctgttgaaaacacaactgttcctatcattggtgctggtggagcaggcacttttgaccacttgaaggaagcctttcttgaaaccgatgttagtgcacttgcatgtggaagcctgtttaattttggagataataatccaataagagccaaggcttttttaactaattattcaatcccatttaagataatttagc

SEQ ID NO: 198954 - DNA, 748 bp, Unknown
  Bacterial polypeptide expressing nucleotide sequence isolated from the Sargasso Sea
atgaaaataaaaaaacaaagcgggccaccggaagatcttctctattttgatgatgatcttcctctctcacaatcacaagtagaggatgtagttgaaatattcaaaactcctttaactggatcatataactgggactacacagttgcagataacagaattaaaaagctttatgagcttggcaaagaattaaactggaatgggtcaattgatcttaactgggattatacgcatcccgcagatgaaagaatccttgagacagatgatgagctacctcatgagatactagaagcatataaaaatctatcggatgaagaaaaaatcctttttgatagacatgatgttgctgaattaatgagtcaattcttgcatggcgagcaaggtgccctccttgttgcttctcaattagcaagttgtgcacctacctataatgctaagctatatgcagcatcacaaacatttgatgaagcaagacatgttgaagttttcaatagatatcttcaagaaaagattggtattcactaccctattaatcctgcattaaagtcactgcttgataagatcctcactgatgaaagatgggaccttaaatttatagggatgcaaataattattgaaggtcttgctcttgctgctttctctatgctgaaatccacatcaaaagatcctttgttaaagcagctacttcactacgttattagagatgaagctagacatgtaacttttggcattaattatttagaagatttta

SEQ ID NO: 198955 - DNA, 586 bp, Unknown
  Bacterial polypeptide expressing nucleotide sequence isolated from the Sargasso Sea
aatgaagaagaagctttcaataacaagaagggatttcataaacggtgtcagctatggtttagcagcatcagttgcaccgattgattttttgaaagcaaagaatattgatccttttaagtatccacctgcgttaacaggaatcagaggcaatcaccctggttcttttgatcatgctcataggcttgcattggccggaggaaattttcttgaagagatcatagatcttggggagagcaatgatttaattgttgtaggaggaggaatatcgggtttgtcagcagcatatttttatcaagagcgcaccgctttaaatcaaaacatacttatactcgacaatcatgatgactttggcgggcatgcaaagcgcaatgaatttcaagtcgatggaagagaaatcttaacttatggcggcagccagtccatagagtcaccaagttattatgaagaggtatcaaagaagttgatggcggatctcgggattgattttcagaaattttatactgcctatgattttgattatttaaaaatagaggacttacttcctcgttcttttttaataaagaaacctatggtgagaataaaatcg

SEQ ID NO: 198956 - DNA, 952 bp, Unknown
  Bacterial polypeptide expressing nucleotide sequence isolated from the Sargasso Sea
aatgactaaattaaaagaatataaaatgtatatcaatggcgtatgggtagatgccgaaaataaaaaaactttcaaaagtttgaatccagaaaataatgagccgtgggctattatcccagaagcaagtgaaaaagatgtgaacaaggccgtagaagcagcacaaaaagcatttgaaggaaaatggccaaaactaatgccgagagaaagagctaactatttaaaagccatcgcaaatcaattaagagaaaacgctgaaatgctgggaaaaattgaaacaatcgatactggaaaactttttagagaaactaaaactcaagctaattacatcgctgaatattatgattattttgcaggactggcagataaggttgaaggcacagtcttgccaatcgataaaccaaatatgcaagtcattacaacaagggaaccaattggtgttatcgctgcgattattccatggaattctcaaatgttattaactgcggttaaacttgcgccagccttggcaatgggaaatacggttgtaattaaatcttctgagttagcttctgctactatgtttgagttcgcgaaactaatagaaaaaactggaatacctaaaggggtcgtgaatgttataagtgggtatggtgaaccgtgcggaaaggctttaactactcacaaatatgttgaaagaattgcttttaccggaggacctgaaacagcaaaacatattattagaaactctgcggaaaacttgtcgcaagtaagtttagaattaggaggaaagagtcctgttgctgtattcgaagatgcagatcaagaaaacgcattaaatggcattacagcaggaatttttggagctagcgggcaaagctgcatagctggatctagattatatttacaaaaaaatatttataagaattttttagataaattgattaatcgcgcaaaaaaaataaaacttgaaacc

SEQ ID NO: 198957 - DNA, 231 bp, Unknown
  Bacterial polypeptide expressing nucleotide sequence isolated from the Sargasso Sea
acaatctaattcgacaagcaatgacgactatggattcagcttaccacagaaaggaaagtagaggcgctcacgctagagaggatttttctaagagagatgataaaaaatttatgaaacataccttagcatggcaagatggaaaaaaagtcaaagttgaatatagagatgtgcacgctagaaccttgactaatgatgttcagtactttccaccaaaggagagagtgtattaat

SEQ ID NO: 198958 - DNA, 805 bp, Unknown
  Bacterial polypeptide expressing nucleotide sequence isolated from the Sargasso Sea
agcttttacaggaggtcctgaaactgcaagacatataattagaaactctgcagaaaatttatctgaggtaagtttagagttaggtggaaaaagtcctgtagctgtttttgatgatgctagacaagaaaatgcgattaatggaataactgctggaatatttggagcaagtggtcaaagctgtatagcaggttcaaggttgtacttacaaaaaggaatttataacgaatttttagataaattagcatcaagagcgaaaaaaattaaaataggtgctccaatggattctgatactgaaatgggtcccttgagtaactttaaacaattagaagtaatagaaaaaaatattaagttaactgttgaacaaggtggaaaaattaaatgtggtggtaaaagacatcctttttcaaatgaaggttattatttcccaccaacaattattgagtgtgaaaatcataatttaccagctgctgaaaatgaactttttggacctgttttatcagtgatgaaatttgatactgaaaaagaagtaatagaattaatgaacgacaatcaatatggtctttcttcaggtgtttatactagtgatcttgcaagaggcatgagggtatctaacgctatccgagcaggaataacatttgtaaatacttatagattaatttcaccctcagctccatttggcggtatcaaggatagtggatatggaaaagaagcaggaattgactcaattaaagactatacaagagtaaaaacaacttggttctacacatcagacgaaccttctctagaccctttctcaatcagataa

SEQ ID NO: 198959 - DNA, 895 bp, Unknown
  Bacterial polypeptide expressing nucleotide sequence isolated from the Sargasso Sea
tttgagtacacattcgtcaaagcgcgtgaccgtcgatgtcgcgatcatcggtgcaggtccggcaggtgcggtcgccgcggcgctcttgcgccgggcgggacgctcggtgctggtgctggagcgccagcatttcccgcggttctcgatcggcgagagtctgctgccgcaaagcatggcctacctcgaagaagcgggcatgctgcaggcagtggtcgaggccggattccagtacaagaacggcgcgcattttgttcatcgcggccagtcgtcggcgttcgacttccgcgacaagcattcggccggttggggcaccacgtaccaggtcgagcgcgcggtgttcgacgatattctgattcgttgcgcagcccagcagggcgccgacgtgcgcttcggccacacggtccgcgcgatgcatccgggcacggcgggcgagggcggcaagaagccgttgctcgaggtgatcgacgaagcggacaacgcgtacgaagtggaggcgcagttcgtgttcgacgcgagcggcttcggccgtgtgctgccacgcttgctgaacctcgaagcaccgacgcgcatgccgacccgcgccgcgatcttctcgcacgttctggacggcattccggccggcgcgaccgaccgcaacaagatctgcgtggcgacacacccggagcgccgcgacgtgtggttctggatgattccgttggcgggtggccgttcttcagtgggttgcgtggccgaagcgagtttcctcgatgtgccggaagctgaacgcgacgcgaaactgcgtacgttgatccggcaggagccgacactcgggccgctgatcggcaacgcgccgttcctgatgccggtgcgtcatatcggcggctacgcggcgaatgtcgagcgtttgcatgggccc

SEQ ID NO: 198960 - DNA, 236 bp, Unknown
  Bacterial polypeptide expressing nucleotide sequence isolated from the Sargasso Sea
atataaaaacttaatagcgcaagccgtagttacgatgaactcagctctgaatagaaaagaaagcagaggcgctcatgctagagaagattttaaggaaagagatgacaaaaattggatgaaacatacgatgtcatggctaaaagataagaattgtgaagtagattatagatcagtgcacgaatacacattatctaatgaagttaaatatatcgccccaaaggcaagagtttattaat

SEQ ID NO: 198961 - DNA, 868 bp, Unknown
  Bacterial polypeptide expressing nucleotide sequence isolated from the Sargasso Sea
gttctatggaccttaactggggactataatcatcctgctgatgagagaatcatgcaagctgaagaagatttgcctcatgagacacttgaagcatatgaaagcttgagtgaaaaagaaaaaattgaatttgatcgtcatgacgctgcagaactcttaagtcaatttcttcatggagaacaaggggcattactagtagcatcgcaactaactgcgtgtgcgcctacttataacgctaaactttacgcagcttcacaaacctttgacgaggcaaggcacgtagaagtttttaatcgttatcttcaagaaaaaattggaatgcattatccgattaatcaaaatttaaaacttctgctagataaaattctaactgatcctagatgggatctaaaatttattggaatgcaaattattattgaaggtttggcattagcggcctttcaaatgttgaaaagtttatccaaggatccactactaactcagctacttcattacataattcgagacgaagcaaggcatgttaccttcggaataaattacttagaagatttcataaaaaccttgacgcctgaggaaattgaagaaagagcagaatttgcatacgaggcttgtgttatctcaagagaaagacttattaatactaaagcgatgcagaaatatcttaaaatgtctgaagaagaagcaagaaaatttgcattatcaacaacagcaaatactgcttttacaaacttccttttcacaagaattatgccaaatctctcaagaattggcctcctgacagataaagtaaggccaaaattcgaagcattaggtttgctcgagtatgaacatgctcctgacgactttgaatgtgattggaatgaactttgaa

SEQ ID NO: 198962 - DNA, 163 bp, Unknown
  Bacterial polypeptide expressing nucleotide sequence isolated from the Sargasso Sea
tatgaattatacagatcataaattagatgtagttgtactaggtgctggtggagcgggcttgagagcagctttaggttgctctgaacaaggccttaaaactgcatgtgtctcaaaagtttaccctacaagaagtcatactgttgcagctcaaggtggaattgga

SEQ ID NO: 198963 - DNA, 901 bp, Unknown
  Bacterial polypeptide expressing nucleotide sequence isolated from the Sargasso Sea
tatgcgtggagtaaaagccgaaggtggctgggcagttgtctgtactgaggaggtagaaattcacgccaactctgacaacggctctgctgtggagggcagactctgggatgaaggagacattcctgcactggcaaaaatggcagaggaagttcatgaacacggagctctggctggaattgaattggtacacggcggatattcaaatgccaatcactacagccgtattccgccaattgcgcccagcgtgacctcagtgaattcctatgatcccgtacaggcaagggcaatgacaaagtcggacattcgcgacttccgcaattggcatcgtcaggcagcagtccgttcaaggcaggcaggattcgacctagtttatgtttatgcgggacacaacctgacgcttctgatgcacttcctctcacgtcgcttcaaccaacgtactgatgaatatggaggctcacttgaaaaccgtgttcgccttttcagggaagtgctggaagacacaaaagatgcagtaggagacggttgtgcagtcgcagtacgttttgccgtggatgaacttttgggatcagatgggatcacatgtgaaagcgaggggcgtgaagtagtggagatgctggctgaactgcctgacctttgggacgtgaacataagtgaatgggaaaacgattcagccacctcccgctttgagaaggagggctatcaggaaccgtatattagtttcgtcaaatccctgacttccaagcccgtagtcggtgttggacgctacacctcaccagacaaaatggtctccctgattcagcgtggtgttatggacatgatcggagctgctcggccatcaattgccgatccatttttacctaagaaaatagaggagggacgatttgatgaaatccgagagtgc

SEQ ID NO: 198964 - DNA, 1087 bp, Unknown
  Bacterial polypeptide expressing nucleotide sequence isolated from the Sargasso Sea
tatgaaaataaaaaaacaaagcggaccacctgaagatctaatctattttgatgatgatcttcctctttcacagtcacaagttgaggatgttgtcgaaatctttaaaactccattaacaggttcatataactgggactacacagttgcagataacagaataaaaaaactttatgaacttggtaaagaattaaactggaatggatcaattgatctgaattgggattatacacatcctgcagatgaacgaattcttgagaccgatgatgagctgcctcatgaaacactagaagcttatgaaaatctttcagatgaagaaaaaatcctttttgataggcatgatgtcgcagaattaatgagccaattcttgcatggtgagcaaggcgcccttcttgttgcttctcaactagcaagttgtgcacctacctataatgctaagctctatgcagcttctcaaacatttgatgaagcaagacatgttgaggtttttaatagatatcttcaagaaaagataggtattcactaccctattaatcctgcattaaagtcactgcttgataagattcttactgatgaaaggtgggatctcaaatttatagggatgcaaattattattgaaggtcttgctcttgcagctttctctatgttgaaatctacatcaaaagatcctcttttaaagcagctacttcactatgttattagagatgaggctaggcatgtaacctttggtattaattacttagaagattttattaaaaccttaagtccagaagaaattaatgaaagagctgagtttgcatatgaagcttgtgtgatttcaagagaaagacttattaataccaaatctcaacagcgattcttaggaatgtcagaggaggaagctagagagtttcaattaaatactggaagttttgaaatgttcaggaacttccttttctcaagagtgataccaaatctatcaaggattggtctgctcactgatgaagttaggccgaaatttgaagctcttggtcttttagagtatgaaaatgcccctgatgactttgagtgtgattgggcagagatgagaaagccacttgaagcatttgaa

SEQ ID NO: 198965 - DNA, 662 bp, Unknown
  Bacterial polypeptide expressing nucleotide sequence isolated from the Sargasso Sea
tgcaaatccaaaacaagcagcaagttatgcagtaaagggtatgaatatgaaccgacaaggacagtcttgcagttctacttccagagttcttgttcaccaggatttacacgatgcggttttagaagaaatggttcaattagtcgaaaaacttccagtaggtttaccatggctcgaagaaaatgaactaggccctgttgtttctgaaatacagtttaagaaaattatggattttatttcatctgcacaagaagaaggagcacagttgattactggaggaagttcacctgaagatgaagaactaaaaaatggttttttcattcaaccaactatctttgatcgagttacacctgaaatgaggattgggaaagaagaaatttttggacctgtaatgtcagtttttaaatggaatgactatgaacaaatgctatcgattgctaatggaattgaatacggactcactgcaatgattgttacagataatctgaggcaagccatggaaactgcagagcgagttgaggcaggttatgtatggataaattcaacaggtcgttatctgggagcaccctatgggggctggaagtcaagtggaattggtcaagaagaatgctttgaagaactcctgagttatactcaaatcaaaaacgtaaatatgcgctggtaga

SEQ ID NO: 198966 - DNA, 930 bp, Unknown
  Bacterial polypeptide expressing nucleotide sequence isolated from the Sargasso Sea
taatagaataaaaaagctttacgagttagggaaagagcttaactggaattctaatatggatattaactgggatagacctgtggttcatttagatgaaccaccaccaatcttttgggatgattatgagccttatataaagatgtcagataaagaaaaattgagatttcttagacatagacaggcatggagcatgagtcagttcctgcatggtgagcagggagctttgcttgtggcatcccagctaactagctgtgcaccaacttataatgcaaagctttatgcagcttcacaaacttttgatgaagctagacatgtggaaagctttaatagatatgttcaatcgagaatggagctcatgtatccaattggcaatgctcttaaatcaattttagataagatccttacagatccaagatgggatcttaagttcattgggatgcaattaattattgaaggactggcactagcagcttttagaacctcaagggacttaacgccagatcctgtcttaaaagatatgcttgatttaataatccgagatgaagcaagacatgttacttttggcattaattatttagaagagtttgtaacaactttatccgaaaaagagattgaagaaagagctcagtttgcctatgaggcatgctacttaagcaaagaaaggcttgtttccatagaagtctatgaacactttggttggaacgttgaagatgcaagacaatttcaactaagttctgaaataatgcaaacattccaaaaacttctttttcaaagggttatgccaaatcttaagagaattggactactaactgattcaattagaccaaaattcgagaaactcggtattcttgagtatgaagatgatgcaagtgatgctgatattgattgggccgatctatcaagaccattattcaaagaaactgcagagtt

SEQ ID NO: 198967 - DNA, 649 bp, Unknown
  Bacterial polypeptide expressing nucleotide sequence isolated from the Sargasso Sea
ggctcaatcggtagcagttgcagttggaaatattggagataatttagtcaatgaattatcaaaaaaagttgaagcattaaaagttggaccaggtatggataaaaaatctgaaatgggacccctggttacaaaagagcacttagaaaaagttaaaggttatgttgacctaggagttaaagaaggagcaaaattagttgttgatggaagaaacttaaaactgcaaggctatgaaaaaggttactatataggtggatgtttgtttgatcatgttaaaaaaaatatgagaatttataaagaagaaatttttggacctgtactttccgttgtgagagtaaaagattttgatgaagctactcaactaattaacgaacatgagtttggtaatggaacaagtatttatactagagatggagatgttggtagaacttttgccagcaatataaaaattggaatggttggtataaatatacccatacctgtgccagtggcattccatagttttggtggctggaaaagatctttatttggagatcaacatatgcatggagcagaaggtgtaagattttacacaaaacttaaaaccataacttcgagatggccatctggattaagatcagaccctgagtttgttatgccaacaatgaagtaa

SEQ ID NO: 198968 - DNA, 651 bp, Unknown
  Bacterial polypeptide expressing nucleotide sequence isolated from the Sargasso Sea
agacatttgatgaagctaggcatgttgaagttttcaataggtatcttcaagaaaagattggtatccactaccctattaatcctgcactcaagtcactgcttgataagatccttactgatgaaaggtgggacttaaaattcatagggatgcaaattattattgaaggtcttgctcttgctgccttctcaatgttgaaatctacatcaaaagatcctctattaaagcagctacttcactacgttattagagatgaggctaggcatgtaacctttggtattaattacttagaagattttattaaaaccttaagtccagaagaaattaatgagagagctgagtttgcatacgaagcttgtgttatttcaagagaaagacttattaatactaaatctcagcagcgattcttaggaatgtcagaagaggaagctagagagttccaattaaatactgggagttttgaaatgttcaggaacttccttttctcaagagtgatcccaaatctatcaagaattggtctactcactgatgaagttaggccgaaatttgaagctcttggtcttttagagtatgaaaatgcccctgatgactttgagtgtgattgggcagagatgagaaagccacttgaagcatttgaaaaaatccctgtttgat

SEQ ID NO: 198969 - DNA, 898 bp, Unknown
  Bacterial polypeptide expressing nucleotide sequence isolated from the Sargasso Sea
tttaatattatgaatggagataaagaggtagtagatgcaattattaataataaaaatatttcagctgtaagttttgtaggatcgacaccagtcgcaaaatacatttatgaaaattgtgctaaaaatgaaaaaagagttcaagcacttgggggcgcgaaaaatcattgtgttgttatgccggattgtgatcttgatcaagcagtaaatggtctaatgggcgcagcttatggatcagctggtgaaagatgcatggctcaatctgtggcggtagctgttggaaatattggcgataagctcgtaaaaaatcttaaaactaaagtagaaaatttaaaagttggcccaggaatggataaaaattctgaaatgggtcctttagttacaaaagagcacctagaaaaagtcaaaagttatgttgatattggtgtacacgagggagctgaacttgtagtagatggtaggcaattaaaattacaaggttatgaaaaaggttattatatgggcgggtgcttgtttgataaagttaaaaaaaatatgagaatttataaagaggaaatatttggaccagtcttgtcagttatcagagtaaaaaactatgacgaagctcttactcttgtcaatgatcatgaatttggaaatggagtaagtatattcactagagatggtgacgttggtagatctttttcaagtaaagcaaaaattggaatggtaggtatcaatataccgattcctgtacctatggcgtttcatagttttggaggatggaaaagatctttatttggggaccaacacatgcatgggcctgaaggtgtaagattttatacaaaattaaaaacaattacatctcgttggccagatggtttaaagtctgacccagaatttgttatgccaacaatgaaat

SEQ ID NO: 198970 - DNA, 997 bp, Unknown
  Bacterial polypeptide expressing nucleotide sequence isolated from the Sargasso Sea
gaaaagctagctgaaataaatagcagagctttagatcaaattagacttgaacctaaagttttaagaaatgttgaaaagagatctctaaaaaaaaaggtattagggtatgaatttgattttccctttggttttgctccaatgggaatgactaatttatcatggcctggagcagactctatgttagcggctgaaagtgcgaggaataatatacctacatgtgtatctatggcttctactacaactttagaaaaaatgtatgaactttcagaaggtcactcctggatgcagctatatatatttcaggatgaaaattttgttatggaacttttagatagagctaagaatactggatacgaagttgcaatattaaccgtagatgttccagtactatccagacgaactagagatgataaaaatggtttctcttatccttttaaaataggtccaaaacaattttttgattttgcaactcaccctacttggtctctttctactttactcagtggcattcctaaaccaatgaactatgtaacatctaaaagtggagacggtatttttaaaagaaaagaaagtagaggttctactgattgggatactttaaagagagtaagagataaatggaaaggtaaattgataattaaaggagtaatgtctcctgacgatgcaacacaaataaaggaagctggtgctgatgcaattcaagtctcaaatcatggaggcagacaattagatagtgctacagcagcaataaatatgcttccactaatcagaaaatcagtaggaagtgattttcctttaatctttgatagcggaataaggagcggaagtgatatcgtgagagcgcttgcatttggtgccgattatgcaatgattggtaggcctgtaatgtatgcgatgggcgctgatggaagaaaaggattaaggagaattgtggaaataattaaagaagaagctagcactacactcgggttagtaggattaaatgatattaatgatg

SEQ ID NO: 198971 - DNA, 901 bp, Unknown
  Bacterial polypeptide expressing nucleotide sequence isolated from the Sargasso Sea
tttgggtgagatagcgtgtgcaaaaaaaactgaggttgacttagctgttaattctgcaaaagaatcttataatagtagaattcttattgatatgcctctacttgaaagggcaaagctaatgcataaaattgccgatgaaacacgtaaaattgctaaagaaggtggaaaaattctctgctatgaaaatggtaaaactcttgcagcagcaattaaggaatttaatgatgttgcagatatgtttgattactatgctggtttaactgataaacttgaaggaaaaacaatacctgtttcatccaacgtgtttgattatacagtattggaaccttttggagtatcagctcatattattccatggaactatcctttagcaatgttaggaagatcattagcttgttcttttgctacaggaaattcaactgttattaaaactgctgaattaactccattgtctgcaacagtttttgcaaaagctattcaaaatgcagaagtcccaaatggactaataaatataatctgcggttatggaaatgaggctggttcatacttggtttcccatccggacgtaaatcacgttgtttttactggttcagttgctacaggaaaaaaaatacttcattcatgtgctgacaaggctattcctgctatcgttgaattaggtggtaaatctgctggtatagtttttccagatgctaatttagatgatgttgttgaaagtgctaggcatgcaatttttggagttgccggacaaatttgcacagcgatgtctcgacttgttgttcacaaatctgtgaaaaatgaattagttgataaactagtagatttgagtaaatctcttaaggttggacctggttatgaagagggctctgaactcactcctattatttctaaaaatcattag

SEQ ID NO: 198972 - DNA, 784 bp, Unknown
  Bacterial polypeptide expressing nucleotide sequence isolated from the Sargasso Sea
gatggacttaaatttggaaggaaagacagctttagttacaggtgcatcaaaaggcattggttttcagacggcattgcggcttgctcaggaaggatgtcatttgcatctggtcgcaagaacccgcgcagatcttgctgatgcagctaaaagaataaccgaacaagtggtttcgagcgtgcagataaactttcactcgtttgacctcagtcaaagtgaggatatcgatgcaatgatcacagcatgcgaccccatcgacattctcgtcaacaatgcaggtgctattcctgggggtagtctagaagaggttgatgaagaaacgtggcgtgttggctgggagttgaaagtttttggctacatcaacagctgtcgacgggcctataaaagaatgaagcaacggggatcaggggtgatcattaatgtgatcggaactggaggtgaaagacctgtagcagcttatgccgtcggtgccggtggtaacgcagcgttgatgagcctcaccagggccttaggcggtgcgagcctcgaggatggtattcgtgtggttggtataaatcctggcccgattatgacagatagacttgaaggcggatttagaattcaagctgagaaaagatttggtgattcttctcgctgggccgagtgcatggacggtttcccaacctacggtcagccaccgggagaaccacatcacatcgctgatatggtggcttttttagcttccgacctatccgcatacacgacgggcaccatcatcaccattgatggtgggcatatgggccgttaa

SEQ ID NO: 198973 - DNA, 769 bp, Unknown
  Bacterial polypeptide expressing nucleotide sequence isolated from the Sargasso Sea
aatgtttcttaaaaaacaaaacttaaaaaataaaattgcgcttgtaactggagctggaaaaggtataggaaaagcttgtgctattgctcttgctgaagctggggcaagtttaattattgttagtagaacaaaaaaagatttagatcaggtctcaaaaattattaaaaaatttagatctaagtgtaaatcatatgtttgtgatgtaacgaaatattctgagattaaatcagtaatagactctcaaaaaagaattgatattttagttaataatgctggcacaaatattccagaacattttacaaaagtaaaaagaaaagacatggagtatgtagttaagattaatacaatggctacctttaatattgctcaattgtgctcattaaaaatgatcgaattgaaaaatagaagaaaagttggaggtgtaattattaatatgtcctcacaaatgggtcatgtaggcggacctataagaagtgtttataatatgaccaagtttggttttgaggggcttacaaaaggaatgtccatagatcttgctaaatacaatataagagtaaacacagtatgccctacttttgttgttactccaatgacaagtaagtttttaaaagacaaaaaatttatgagggaggttctgggaaatattccactaggaagatttgctgagctctctgatgttgcgagtgctgtggtatttcttgcctctgatcaggcatcaatgattactggtacctctttattggttgatggtggatggacttcaaaataa

SEQ ID NO: 198974 - DNA, 784 bp, Unknown
  Bacterial polypeptide expressing nucleotide sequence isolated from the Sargasso Sea
aatgtctgaattaaaaaaatataaaatgcttataaatggagaatgggttgattctgaaagtaaaaaaacgtttaaatcattaaatccagaaaataatgaaccgtgggctgaggctccagaagctaatgaaaaagatgtggataaggctgtaaaatctgcacaaaaggcatttgaaggaaaatggccaaatttatttccaagagaaagagcaaaatacttaaaagcaattgcggaacaactaagaaagaatgcagagcttcttggaaaaatagaaacaatagatactggaaaattatttaaagaaacaaaaactcaagcaaattatattgcagaatattatgattactatgcaggtttagccgataaagttgaaggaacagttctgccaattgataaagctaacatgcaagtaataactactagagttcctataggagttgtagcagcaatcataccttggaattctcaaatgttattaactgctgtaaaattagcgccagcacttgcaatgggaaatactgtggtaatcaaatcttcggagttagctcccgcaaccttatttgaatttggaaaattaattgaaaaaactggaattcctaaaggagtagtaaatataatttctggttttggtgaaccttgcggtaaagctttaacatcacataatttagtggaaagagtagcttttacaggtggaccagaaacagccagacacataattaaaaactcagcagaaaatttatctcaagtaagtcttgaactaggagggaaaagccctgtagctgtt

SEQ ID NO: 198975 - DNA, 514 bp, Unknown
  Bacterial polypeptide expressing nucleotide sequence isolated from the Sargasso Sea
ggcgggtcgtttgccgaagtaatgttcatgggcgcagcgccattcaatgcggcgcccgtgacggttggtgccggaggtgcgggcggcggtgccggacttacgtcaagtactgcgggcggagcatctacgtttggtagtggtagcttggttgctagctgtcccggcggcccggccatctctcctacgccggcaggttctgcgccattgatctcgggcggtgcgattagcgcggcagcgccgaccacgacgggcggttttctgctcagtgctcgccgcggcagcggaggcggcttcggcatcgtgccggcgcaaggcgcgtcaggcgttggcggccaaggcggtcaggctggcgatggtggcagtggcccaaccggcagcacgaatgcagcgggcacgtccgctacgaatttcggcgcaggcggcgcgggcgcaacgcaatccgtagcaaatgccggcgctttggcgggtggcagtggtcttgacggttacattgaagtttttgaatatacctaaa

SEQ ID NO: 198976 - DNA, 861 bp, Unknown
  Bacterial polypeptide expressing nucleotide sequence isolated from the Sargasso Sea
gcaggaattacaccgtttaattttcctgctatggttcctatgtggatgtatcctgtagcaatagcatgtggaaacacctttatacttaaaccctctgaaaaagatcccagttgccctttaaaacttgcagaacttgctgttgaagctggaattccaccgggagtacttaatgtggtaaatggagataaagaggcagttgatgcattgcttcaagacaaaaatattcaagctataagttttgtgggttctactcctattgcagaatatgtctatcataatggaaccaaaaataataaacgtgttcaagcactaggtggagcaaaaaatcatatggttgtaatgccagacgctgatgttgaaaaaaccacagacgcaattattggatcagcttttggatctgcaggtgaaagatgtatggctatatcagttgcagtatgtgttggagaaaaaactaaggaaaagatgaaaaatagattgctagaaaaaactgaaaaacttcatgttggtccttatactgatgaaaaaagcgattttggacctcttaataataaagcacactacgaaaaagttttaggatacataaatacaggagaaaaagaaggggctaaattacttgcagatgggagaaatcttaaacttcaaggatatgaaaatggttattttgttggtcctactatttttgaagatgtaaaaccaaatatgaaaatttataaagaagaaatatttggaccagttttaagcatgatgacaactaaaacttacgaagatgctttgaaattagtaaatgatcatgaattaggaaatggagcagcggtttttactaaaagtggcaacatagctaaacattttacagaaaatgca

SEQ ID NO: 198977 - DNA, 718 bp, Unknown
  Bacterial polypeptide expressing nucleotide sequence isolated from the Sargasso Sea
aaaaaatcctaatataattatgagtgatgcagatcttgatattgctatacctggtgtgattgatggtatgagatacacaagacaaggacaagcatgcactgccggatctagggtttacatacaggaaaaaatttatgacaaagttttagaaggtgtagtcaataagttaacaaaccttaaaatgggaaatgctttagatgaaaaatcagatattggggcaattatttcagaagaacaattaaatcgaactttacattatatgaaaattgctaaggagaattcatcaaccaaagttttacatggaggcaatcaaaaaaagggtggtgaccataaagaaggtttcttttacgaaccaaccttgctgtctggtgttccagtagaatcacctgtatgccaagaggaaatatttggtccagttgcttgtgccattccatttaagtcatttgatgaagtattaaaaagtgcaaacaatactccctttggattgtcagcagttttatggacacaaaatttatcaagagcccttcaatttgttgaagaaattgaagcaggttttgttcaagtaaatcagtgtgtagctccaagagcaaatgtatcttatggtggattaaaaatgagtggtctgggaaaagaatatgcatttgatagtatgataaatcatttcactcaaagcaaaactgtattaattaatagaggaaattcaaatatagatgagtaa

SEQ ID NO: 198978 - DNA, 415 bp, Unknown
  Bacterial polypeptide expressing nucleotide sequence isolated from the Sargasso Sea
atgaatgagatgaaaaagactccatacatttggttaatttctggctgttcctctggatttggtagagaaattgcactgcaggcactgtctgcaggagattttgtgggagtttcatcaagaaacgttaaagatgtagaggatatctgcaaagagtatccaaaaacagcgttgccaataaaattagacgtcacaaacaaagatgaaattaaagaatcaattcaaacaattaataaagtttatggtggtttagatgtcttagtaaataatgctggatatggttatctagctgccattgaagaaggtgaaaatgaagaagtaagaaaactttttgaaactaatttttttggagctctggagctaacaaaagctgcgctcccaggaatgagggcacaaagatttggcagaataataaata

SEQ ID NO: 198979 - DNA, 856 bp, Unknown
  Bacterial polypeptide expressing nucleotide sequence isolated from the Sargasso Sea
catgacactcaatttaggccctcagcacccagcaactcacggaaccttgcgcatcattgccaaacttgacggagaaaaagttatcgctgccgaaccaattatgggctatatgcatcgtggatatgaaaaacttaccgaggtgcgtacctacccgcaggtaaccacgctagtcaacagaatagattggctcggtagcttcgctaatgaggttccatttatccttgccgctgaacaactaatggacgtcgaagcgccacctagagcccaatggatccgcacagtactatttgagctaagcaggatagccaacatctccctattcctaggagatatggcagtccaagtaggagcaactacccccgtcttctatgccttccgtgaccgagagtttgttctaaatcaaatagaacgagttaccggaggtcgtttccatcctaactttgaccgaattggaggtctaaaagatgaccttcccaaaggttggatcgaagaaacaggaaccgtaataggaaaaatgagagacttctgcgacgaaatggaagagctcgtattaggaaatgaaattttccaagcccgtacgcgaggcatcggagtaataccaccagaagtagcactatcgtacggtttatctggcgcaaaccttcgagcttcaggagttgactgggacatccggcgagatgccaatgtaggtttggtctatgacgaggttgattggaaagtctggactcaccctgacggcgactccttttctcgattctgggtccggcttcaagaaacacgcgaagcctgcaacatcatcgaacagctactcggaggaataccagcaggaccaatcatggctaaggtcccgcgcatc

SEQ ID NO: 198980 - DNA, 817 bp, Unknown
  Bacterial polypeptide expressing nucleotide sequence isolated from the Sargasso Sea
aatgcctgaacttaaaaaatataagatgtttattgatggtgagtgggacgactctgaaagtaaaaaaacatttgagactttaaaccctgaaaacaatgaaccatgggcagttgcacctgaagcaagcgcaaaggatgttgatagagctgttaaagctgcacagaaagcttttgaaggtgaatggccaaaattacttccaagagatagagctaaatttttaagggcaattgctgatcagttaagaaaaaatgcagagatgctgggtgaaatagaaacaattgatactggaaaactttttagggaaacaaaacagcaagcaacttacattgctgaatactatgattattatgcaggattagctgacaaagttgaaggtacagtccttccaatagataaacccaatgtgcaagcgataacaacaagaatacctattggagttgttgctgcaattattccttggaactctcaaatgtttttaacagcaactaaattagcaccagctctagcaatgggaaatactgtagttataaaatcttcagagctagcgcctgcagtcttatttgaatttgcaaagctagttgagaaaaccggaatacctaaaggagtgttcaatgtaattacaggttttggtgatccatgtggtaaaagtttaacaacacataatcttgtagaaaaaattgcatttactggaggaccagaaactgcaagacgtatcattaaaaattcagcagaaaatctctcagaagtaagtttagagcttggaggaaaaagtccagttgctgtatttgatgatgctgaacaagaaaatgcaattaat

SEQ ID NO: 198981 - DNA, 526 bp, Unknown
  Bacterial polypeptide expressing nucleotide sequence isolated from the Sargasso Sea
aaaaagatagatattttagtaaataatgcaggcacaaacattcctgaacatttttcaaaagtgaaaaaaaaaaatatggaacagcttgtaaaatttaataccatatcaacatttaacgtagctcaattatgtactttaaaaatgttggaaacaaaaaatagaaaaaaaataggtggttctataattaatatatcttctcaaatggctcatgtgggaggcccaataagaagtgtttataatatgacaaaatttggcttagaaggattaacaaaaggtatggctattgatttagcaaaaaataatattagagtaaatagtgtttgtccaacttttgtaataactccaatgacaaaaaaatttttaaaaaataaaaaatttagaaaagaaactttaaataaaatacctcttggaaagtttgctgaattaaatgacgttgctacagcagtagcttttttggcttctgattcttcttcaatgattacaggaacttctattttagtagatggaggatggactgctatatagc

SEQ ID NO: 198982 - DNA, 802 bp, Unknown
  Bacterial polypeptide expressing nucleotide sequence isolated from the Sargasso Sea
ggggtttgcgctggtattactccttttaactttccagccatggttccaatgtggatgtttccaatggccatagcttgcggaaatacttttattttaaaaccatcagaaaaagatccctcatgctcaataaggctcgccgaacttttttgtgaagctggtttgcctaatggagttttaaatataattaacggaggtaaagaagtcgtcgattcaataattgaaaataaagatatttccgcagttagttttgtaggctctacccctatcgcaaaatatatttatgaacattgtgcaaaaaatgaaaaaagagttcaggccttgggaggagcaaaaaaccattgtgttataatgcctgattgtgatttagatcaagcggttaatggattaatgggagcagcctttgggtctgcaggagaaagatgtatggcacaatcagttgcagtagcagtcggaaatattgggaatgaccttgttaaaaatcttgctaaaaaagttgaaactttaaaaataggcccaggtatggacaaaaaatctgaaatgggacctttggtaacaaaagaacatttatctaaagtaaaaaattatgtagatcttggggtcaaagagggtgctgatcttatagtggatggtagagatttaaagttacaaggttatgaaaaagggtattatattggcggatgtttgtttgataatgtaaaaaaagatatgagaatatataaagaggaaatttttggtccggttttatcaattgttagagttaaaaatttttcagaagcacttaatttagttaacgatcatgaat

SEQ ID NO: 198983 - DNA, 475 bp, Unknown
  Bacterial polypeptide expressing nucleotide sequence isolated from the Sargasso Sea
gttgacccaatattagatcgttttgataaaatcctatttaacaaaggtgatagctcaactggtgaagtgagaacttcgatgcaaaaagttatgcaagaaaaatgtgcagttttcagaacggatgaacttatctcaaaaggtattgaggaatttagtcatatagaaagctcaatggataacatagatgtgaaagataaatctatgatctttaacacagacttaactgagtctcttgagttacataatttaatggcacaatctaaagttactcttcattctgctctaaacagaacagaaagcaggggagcacatgcaagagaagatcatcaagaaagagatgactctaactggctggcccattctttatcatggcttgataataaaggcggtgttagaatgggaacacgacctgtaaacatgaataccttaaccaatcatgttcaacctattcctccaaagaaaagagtgtattaaa

SEQ ID NO: 198984 - DNA, 413 bp, Unknown
  Bacterial polypeptide expressing nucleotide sequence isolated from the Sargasso Sea
tttttatataggtggttgcttatttgatcatgtaataaaagatatgagaatttataaggaggaaatatttggccctgttctatcagttgtgagagttaaaaaattcgaggatgcagcaaagttaattaatgatcatgaatatggaaatggtgtaagcatctatacaagagatggagatgcaggcagaacttttgcaagtaaaattcaaataggaatggtaggaattaacgttccaattcctgtgccaatggcattccatagctttggtgggtggaaaagatctttatttggggatagtggaatgcacggtatggaaggaataaagttttatactaaacttaaaacagtaacatcaagatggccttcaggtgtccgttcaaatgcggagttcgtaatgccaacaatgaaataag

SEQ ID NO: 198985 - DNA, 676 bp, Unknown
  Bacterial polypeptide expressing nucleotide sequence isolated from the Sargasso Sea
ttgcgtgtgctatcggcttctttgacggaacgacacggagtgaaggtgagcgggattcccgcggaccttgccgacccggccggaccacaacgtctttacgacgaactgaacgaggccggccaaacgatcgaccttctggtcaacaatgcgggattcggcggggtcggccgtttcgaggcacttgatcaggtccgacagcgcgaaatgatcgacgtcaatgtcagcgctctgacccgattggcgggattgatgctgcccggcatgaaggcccgcgcgcgtggcgggatcatcaacgtcgcctccaccgccgcctttcaggcgggaccgttcatggcggtttactacgccagcaaggcctatgtgctgtcgttctccgaggcgttgtccgaggaatgtcgtggtacgggcgtcaccgtgtcgtgcctttgtcccggcgtcaccgccacggagttcttcgagacagcagggttcggggacctgccgctatatcgtctcggcatgatggatgcggtgcgggtggcccgcctgggatatgacggctggcgctcggggcgcgccatcgtcctgccgggattgcgcaatcaggtgctcgtgtgggggtcgagggtgttgccgcgcccggtgacacgacgcgccattcgttttttgcaggagaaatcgggcgctgtgacatgat

SEQ ID NO: 198986 - DNA, 643 bp, Unknown
  Bacterial polypeptide expressing nucleotide sequence isolated from the Sargasso Sea
taatagcgcaggacagagatgctctgcttgtcgaatattatgtgttgaggaaaatgtttatgagaaaactttaactatgttgagaggggcagcagattccttattagtttcaagcccagaattgatttcaactgatgttgggcctgtgattgattcttttgctaaagaaaaaatacaaaatcatataaataattttacaaaaaaatatcaatcaaaagaaattcataatgagggtaattttataaacccgattataatagaaattaaaaatattaatgaagttagagaagaaatttttggtcccgttctgcatatcttatcttttaattcaaaaaacttaattgcattatgtgaccaaattaattctcttaattatgggttaaccttggggattcatagcagaatagatagagttattgaaactgttataaacaattccaatgttggcaatacctatattaatagaaatatcgtgggtgcagttgtaggctcacaaccttttggaggacatcataaatctggcactggtcccaaagcaggaggtccagaatatttaaagaaattttgttacgaatatagtatttctaataatattgttgctatgggcggaaatgttgaattgttatcaaatattgacgattag

SEQ ID NO: 198987 - DNA, 664 bp, Unknown
  Bacterial polypeptide expressing nucleotide sequence isolated from the Sargasso Sea
aatgaactatgatcacgagtatgacgttattgttgtaggttcaggcaatggcgcactaacatctgcactttgctcacatgatgggggagcaaaagttttagttattgagaaatcaaatcaatttggtggcacaagtgctacttctggagggggagtttggattcctaataataggtatgccaaagcagaaaatgtggatgattctattgaagatgctagaaattacatccaaagtgtttcacctaaggggaaaatcaacaatgacctaattgagacatatattgaacaaggaccaagaatggttgactaccttcatgagaactcaagagttaaatacagaaaccttcctcattatccggactactttccagataatcctggtggcaaggagggcaatagatccatggaacctgaaccaattaaggggaccgaattaggagatgattttaaacacttgagagggcaacacccacaaacagcattcaccatggggcctgtaaatatgaactttacccaagtagaaggtcaattattgcttggggcattaccaggatggaaaacactttttgcgaaacttttttaccaatatattttagacattccaatgcgcttcattcatgggtggagggatagacgattaactatggggaatgcaggaatagct

SEQ ID NO: 198988 - DNA, 470 bp, Unknown
  Bacterial polypeptide expressing nucleotide sequence isolated from the Sargasso Sea
aatgcgctacgatatctccgatgaggcctacacaactcacgaacacgatgttgttgtcataggcgcaggaggcgctggtctaagggcggcaatcgccgctagtcaagagggtgcaagcgttgctctagtttgcaagtctatgctaggaaaagcccacacagtgatggctgagggtggtgctgcagcagctcttgccaacaaagatcctagagacaattggaaggttcactttcgagacactatgaagggagggaaatatctcaatgattggcggatggctgtaattcatgctcagcaagcgcccgataggattcgtgagcttgagacatggggggccgtattcgatagaaccccgaagggcttgaccagtcagagaaacttcggtggccacacttatcctagattggcacacattggtgatgccacgggactagaattgattcgaaccctacaagaaaagggagttcaca

SEQ ID NO: 198989 - DNA, 689 bp, Unknown
  Bacterial polypeptide expressing nucleotide sequence isolated from the Sargasso Sea
cttgccatcaagtcctaactcaggagattttgttgcttttaaagattatgcagaatattttgccacaaataaacttattattggaagaaatagttctaacattcaaggagtggcggccaattccgagttaactaccaatcgtgcctctgttgttttagtttatgttgatggcactgagggctggttatacactgttgaaaataatgtaggtatagaacctccaacttatgttactgcgactggaggtacaataactacagatggagattataaagttcacacatttacatctagcggaacatttactgttaccgatgcaggtgatgcttctacatcaaacacagtagattatttagttatagctggagctggtggaggaggttcttctgttaattgtcaaacttctggtggtggaggcggtgcaggaggatatcgaataagttatcctaaccctgcaacaggtggaacacctgtttctgtacaagcttatccaattactattggagctggcggtgctggaggcgcaaatccaaatccatatacagctaatgctggtgctaaggggtctaattctgtttggaatagtattacatctgctggtggtggagctggcggtgcttattcacaaggtggatgcaggccaggaggttctggtggcggcgcacgaactaatccaagtgcgcctaata

SEQ ID NO: 198990 - DNA, 920 bp, Unknown
  Bacterial polypeptide expressing nucleotide sequence isolated from the Sargasso Sea
tggtttaccagataaagtttttaatgtggtaaatggggacaaagaggcagttgatgctctgataaataacaaagatgtaatggcaatgagttttgtaggatcaacaccaattgcaaaatatatttatgaaaattgtgcaaaaaatgaaaaaagagttcaagcactaggaggtgcaaaaaatcattgtgtggtgatgccagactgtgatttagatcaagcagtaaatggtttaatgggcgcagcatacggctcagccggtgaaagatgcatggcacaatcagttgctgtagcagtgggtggcattggagataaactagttagtaatttggctaaaaaagttgaagcattaaaagttggccccggaatggataaaaaatctgaaatgggaccattggttacaaaagagcatttagaaaaagtaaaaggttacattggcataggagagaaagaaggagctaagttaattgtcgatggaagaaatctcaaacttcaaggttatgagaatggttattatatagggggatgtttgtttgatcatgtaaccaaagacatgagaatttataaagaagagatttttgggccagttctttctgttgttagagcaaaaaattttgaagaagcattaaaattagttaatgatcatgaatttggtaatggagtgagtatatttactagagatggggactcaggcagaacattttcaaataaagctaaaataggcatggtaggtatcaatatccctataccggttcctatggcttttcatagttttggtggttggaaaagatcattgttcggagaccagcatatgcatggacctgaaggtgtaagattttatactaaacttaaaacaataacttctagatggccttctggattgagatctgatccagagtttgtcatgcctactatgaaataga

SEQ ID NO: 198991 - DNA, 681 bp, Unknown
  Bacterial polypeptide expressing nucleotide sequence isolated from the Sargasso Sea
gccaaatctataaatgactggcttcaagagattaattcaaaaacacaaattgattatagttctcatttgtacagtgaatcagatttaaacccaataaaaatcagtgaaattaaaccaaactataatgaagagtcagtaaatgaagatggtagaataatattaagagaaaattttgatgctatattaaaaaagaataataatgttttgatttttggacaagattctggtaaaattggtggagtgaatcaagggttagaagggcttcaaaaaaaatatggtgaaataagggtttttgatacaggaattcgtgaggcaactataataggtcaaggaattggattagccttgagaggtttaaggcctatagctgaaatacaatatttagattacctattgtatgcaattcaaataatgagtgatgacttagcaagtttacattatagaactagaggtaaacaaaaagctcctttaattattagaacaagagggcacagactagaaggtatatggcattcaggctctccaatgggtggaatattaaatcttataagaggaatttttttactggttcctagaaatatgactaaagctgcaggtttttacaatacattattagaaggagatcagccagcattagtaattgaatgtcttaataaatatagatcaaaagaaaaactacca

SEQ ID NO: 198992 - DNA, 619 bp, Unknown
  Bacterial polypeptide expressing nucleotide sequence isolated from the Sargasso Sea
tttgcgaagaattgacgtgcttgttaataatgctggtgttgtaaatacttcttatcacgaaacaagtgatggaattgaaaatacatttgcagtcaatcatcttggatattttctttttactaacctactattgcacaaattaaagggagaaaatgagacaagaattattaatgtctcttctgctgctcattcatttgttaaagaaatgcaatggcaggatataaattttaaaaataattttaagcaaggtttaagatgttatggacaatctaagcttgctaacttactttttacaagatacctagcaattaaattatccacagaaaatattacagttaatgcaattcatccgggaggtgtaaacacctcacttgggagtcaaaataaagtttggtatagcaaacctttaagattaattttaaggcccttttttagatcaccattaaaaggtgcagagagcattatttatcttgcttccaagcaagacgatggagtaacaggagaatactttgttgactcaaaaatacataagtcgtcctcttattcaaaaaatcttgaagaagcccacaagctttggagtctttctgaagaaatggttgggcaaacatttgatctttaa

SEQ ID NO: 198993 - DNA, 511 bp, Unknown
  Bacterial polypeptide expressing nucleotide sequence isolated from the Sargasso Sea
ctagaaaaggtaaaagggtatgttgatttaggtgtgaaggagggggcaaaactccttgtagatggtaggaaattaaagcttcaaggatatgaaaaaggattttatataggtggatgtctttttgataatgttaaaaaaaatatgagaatttataaagaagaaatttttggaccagttctgtctgttattagagttaaaaattttgatgaagctttatctttagttaacgaccatgagtttggtaatggcgtcagtatttttacaagagatggagattctggtaggacattttcatcaaaagtaaaaattggaatggttggaataaatattcctatacctgttcctatggccttccatagctttggaggatggaaaagatccctgttcggagatcaacatatgcacggacctgagggagttagattctatacaaaattaaaaactgtaacatcaagatggccatcaggtatgcgctcaaatcctgaatttgttatgccaacgatgaaataat

SEQ ID NO: 198994 - DNA, 992 bp, Unknown
  Bacterial polypeptide expressing nucleotide sequence isolated from the Sargasso Sea
ttatgactattatgctggtatggcggataaagttgagggaacagttttacccatagataaaccgaacattcaagcaataactacgagagtaccaataggtgttatagcagcaattattccttggaactcacagatgttattaacagtaactaaactggctccagctttggcaatgggaaatactgttgttataaagtcgtcagagctagcgcctgcagttttatttgagtttgcaaaattagttgaagaaacaggaataccaaaaggcgttgtaaatgttattacaggttatggtgatccatgcggaaaggctctaacaactcacaatttagttgaaaaaattgcttttacaggaggtcctgaaactgcaagacatataattagaaattcagctgaaaatttatctgaagtaagtctggaacttggaggaaaaagtcctgtagtagtatttgaagatgctcatcaagaaaatgcaataaatggaattaccgcaggaatttttggtgcaagtggccaaagttgtattgctggttcaagactttatttacaaaaaggaatttataatgaatttctagataagcttgctgcaagagcagaaaaaataaaaattggtgcgcctatggatcctgaaagcgaaatgggtccaattggtaattttaaacaattagaaataatagaaaaaaatattaaattaactgtagaacaaggtggaaaaattaaatgtggaggtaaaagacattcattttcaaatgaaggatactattttcctccaactattattgaatgtggcaatcataatcttcccactgcagaaaatgaactttttggtccagtgctatctgtaatgaaatttgaaaatgaagaagaagtaataaataaaatgaatgataaccaatacggtttatcatctggagtttatactagtgacttctccagaggcatgagagtttcaaaagcaattagagctgggattacatttgtaaatacttata

SEQ ID NO: 198995 - DNA, 433 bp, Unknown
  Bacterial polypeptide expressing nucleotide sequence isolated from the Sargasso Sea
aaattgcaaggatatgaaaatggttattttataggcccttctttgtttgataatgtcacagatgaaatgaagatttataaagaagaaatatttggtcctgttctttctgttgtaagagcaaaagactataacgaagctcttagtttagtaaataagcataactttggtaatggaaccagtatttatacctcaagcggtgatacggcaaggcacttcacgacaaattgcaaaattgggatggtaggtgtaaatgtccctatccctgtgcccatggcattccacagttttggaggatggaaacaatcattatttggagatcatgctgttcacggctctgaaggaattcatttttatacaaaattaaaaacaactactagtagatggcctacaagtattaaatcaggaccagaatttataatgccaactaactaat

SEQ ID NO: 198996 - DNA, 395 bp, Unknown
  Bacterial polypeptide expressing nucleotide sequence isolated from the Sargasso Sea
aaaacacgcaggggttttccgaaacgacgaactactattagaaggtgttggcaaaatgcaacatatatataaacgattcgcggatatttcgatcgatgacaaatccgataccttcaattcagaatttattgaattgttggaactgaaaaatctactcgacaactcccttgtaacaatgaaaagtgcaaactttagaaaagaaagcagaggggctcattcacacgaaaactacccaacacgtaatgacgatgattggttatgccatacactagcaaaacttacaaaagcaaatgaagtcgataaaacacgtgtatcactgtccaaacgcaaggttatattttccacattgaacaatgaagttaatactatcccactcgcccaacgcgtctactagg

SEQ ID NO: 198997 - DNA, 526 bp, Unknown
  Bacterial polypeptide expressing nucleotide sequence isolated from the Sargasso Sea
attaatttctttagatcatcttaataaagtaaaagaatatattgaaagcggaattaaagagggggctacactggttgaggatggaagaaaacttaaattacaaggttatgaagaaggttattttattggaccatcattgtttgataaagtgactaaaaatatgaaaatctaccaagaggaaatatttggaccagttttatcagttataagagtttcctcttacgaggaagcgattgatctcataaatgatcataaatttggaaatggaacaagcatttatacatctgatggtgaaatctcaagagactttactacaaatataaaagtaggaatggttggcgttaatgtaccaatacccgttccaatggcatttcatagttttggtggatggaaacagtctttatttggagattattctatgcatggaactgaaggggtacgattttataccaaattaaaaacagttacttctcgttggcctaagagtattaataaaggtccagaatttataatgcctacaaattaa

SEQ ID NO: 198998 - DNA, 646 bp, Unknown
  Bacterial polypeptide expressing nucleotide sequence isolated from the Sargasso Sea
gtagatgcatgtatagctggtagaattttaaatgctggacaaagttgcatagccgctaagcgtttgattgtgacgaaattaaattcaaaaatattcactgaaaaacttataagtaaattatcaatgaagataatgggagatcctttagatgatgttgatataggaccaatggtgtcaatagctgctagagatgaagttgctgatcaagttcaaagatcaatatctggaggtgcaaaactaaatttaggtggtaagatacaacatggtgagggtgcatattatccaataacaatactctctgatgttagacctggaatgcctgcttttgatgaagagatatttggacctgtttttacagttattactgctgatgatgaaaataatgctattgagttagcaaataaatctgaatttggacttggggccgccatatttactcgtgatttagaaaagggggaaaatatagcaaagacaaaattacaatctggagcttgttttgtgaatgattttgttaaatctgatccccggatgccgtttggaggcataaaaatgtctggatatggtagagagctttctgactacggtatgatggagtttgttaatataaaaacaattgttgtaaaatcagtcgggcaagaatcgtgac

SEQ ID NO: 198999 - DNA, 232 bp, Unknown
  Bacterial polypeptide expressing nucleotide sequence isolated from the Sargasso Sea
tgataatcttattcgtcaggcaattacaactatagagtctgcatatcatagaaaagaaagtcgaggtgctcatgctagggaagattttcctaaaagagatgaccaaaattatatgaagcacactttaggttggcataacggcgaagaagttaaaattggttatcgtaaggttaatttatcaacgctaacaaatgaagtgcaaacttttccacctaaagaaagagtttactaa

SEQ ID NO: 199000 - DNA, 748 bp, Unknown
  Bacterial polypeptide expressing nucleotide sequence isolated from the Sargasso Sea
ttgaaaggtaagaaatgtatagttacaggtggatcaagcggtattggtgaagcaactgttagaagatttatcagcgaaggggcagaagttctaattgcagatatcaatcttgaagattcaaaaaaattatcagaagaaattggcgaaggcgttgattatatcaaatgtgatgtaaggcttgaggatgatattatttctgtttcagaaaaagcttatgaaatgtgggatcaggttgatgtattggttaacaatgctggatctgaactcaatcagtcctatgataagatgacagaggcagaatgggataatgttcttaacacagatctaaaaggcccttggttaatgtgtaagcacattgtaccaaagatggtagaggcaggatcaggaagtgttataaacatttcttctttaaatggtttagttggttttcctctttcaactgcttacggaagtgccaaaggcggattagtagtatttactcgcgatatggcgattgagttagcttcgactggtgttagaattaactgtgtttgtccgggtgttatccaaaccggtatgatggaaagatggacagatcttatgcctgataaagctgaggcacaggaaatgctgaggaacacaatgccgattggaagaatgggaactgcagaagaagtggcaggtgcaatcttcttttttgcttcagatgattccagtttatgccaaggatctgttttgagtgtagatggtggatttactgcacagtaag

SEQ ID NO: 199001 - DNA, 757 bp, Unknown
  Bacterial polypeptide expressing nucleotide sequence isolated from the Sargasso Sea
tacgcaggtggtattagtaatgcaggtacattaacttttagttcaagttctgcacaaacattatcaggtgcaatttcaggcagtgggggaattacaaaatcaggtagcggaaatttaacgctcagcggaagtagtaactttactggagcaatagctttatctaatggaactttgattgctggtgcagacaacgccttaggaagttcccctacaattacagctagcaatactcctacgtttaaaacaactaatggcacaacacttccttctatatcagttactggtgatgtaatattagagtcgtctgttaaaacgacaggtgcccaaacatacaacgataatgtaactgtgaaaggaactgggttttctttaattacatccaacaacaatattacaattggtggaaatcttgctgcgtataatatttctggaattttagaattaagatacaacggtaaatatatttttaatggtgcaagtgaagcaacggcatcaggatctagtacaagtattggaaatggatcattaacctattcttcaagtactttcacttggacaaaaccatctacattaacatctgctgacttacttataatcgcaggtggaggaggaggaggaggatcttatgttggtggcggtggaggtgctggaggtttaattcagaaaagttcatattctttaagtgcggatacatatgcaattaatattggtgcaggtggagctgggtctccaggacatggaggcaaaggtacgaatg

SEQ ID NO: 199002 - DNA, 768 bp, Unknown
  Bacterial polypeptide expressing nucleotide sequence isolated from the Sargasso Sea
gctgaagtagataatatgttaaaatttgaaaaagagttcgaaaatgcgaagatcataagattaaaacaaaattatagatcaacaaacaatatcttacagtctgcatcatcacttataagttataacgaaatgagacttggaaaagaattaatatctgaccaaggaactggtgatccaatctacctgcacttagttaactcaagtcgtgacgaagctaaccttgttgcacaagaaattctagattataaaaaagataatcctgatttaaataatgtttccattttggtaagagctgtttttcaatccagagaaatagaagaatctctaattaagtattcaattccatatcgtattataggtggaattagattttatgaaagagctgaaataaaagatgcaatttcatacttacgattagtctatgaaagtcaagacgatgttgcctttgaaagagcactcacagttccaaaaaaaggcataggtgaaaagtcctttaatcatatcctctctctagctaatcgaaatagaatttcgctgtatcaagcatctaaaaatatgattgatactgatgaactaacaaaaaaaatttctgaaagtttgaaatcatttattggggttatagacagaggcaagtcaatgatcgaaaatgttccattctatgatattttgaaggtattattagatgagtctggatatatgaatatgctcaaaaatgacaaaaatgtatctgcacaaacaaaaattgaaaatttaaaggaacttattgta

SEQ ID NO: 199003 - DNA, 850 bp, Unknown
  Bacterial polypeptide expressing nucleotide sequence isolated from the Sargasso Sea
gatgcagatcgtactcactcctgtcgccaaagggaaggtgaaagccaccgcgcacaaatgcgatctgtgccaggggcgtgaacaggggcccgcctgcgtagagaactgcccggcgcaggcgttacagttggtgacggaaaattcgcttaccggtctgtcaaaagcgcgcaggctgcgtaccgcaagtctggaaagccagccatggcacgccagcactaccgattttgttccacatgtcatcaccaaacgtgagcaaatgcaggcgacgcctgcgcgtggtgaaccggataaactggcgattgatgcccggaaaaccagctttgaagagatctatctgccgtttcgtacggcgcaggcggagcgggaagcctctcgctgcctgaaatgcggcgaccacagtatttgcgaatggacctgtccgttgcataaccacattccgcagtggattgagctggtcaaagccggaaacatcgatgccgcggttgagctttcacatcaaaccaactgcttgccggaggtgaccgggcgtgtatgcccgcaggatcgactctgcgaaggggcatgcacggtgcgtaatgagcatggcgcagtcactatcggtaatattgagcgttacatctccgatcgggcgctgagtaaagggtggcgaccggacttaagccatgtgcagaaagtggacaagcgtgttgccattatcggcgcgggtccggcgggtctggcctgcgcggatgtgctggcgcgtagcggtatcagtgccaccgtttacgatcgccatcctgaaattggcggtttgctgacattcggtattcgggccttcaaactggacaaatcgctgctgacgcgtcgccgt

SEQ ID NO: 199004 - DNA, 987 bp, Unknown
  Bacterial polypeptide expressing nucleotide sequence isolated from the Sargasso Sea
atagacgctattgcagcatataaccctgacccagactcggtgttgcatgaagtgcaagatcaagctgatgcaatttttacctgggactatgagaaaggcagccgccctcgtcttgataaactttacgagaaagcgaaagtctcccaatggaacgcccaaacagatcttgactggtcaatcgaagttgacccactgaaagcatttaatatctttactgaaatatctaatgtaaacacaggtcactggaccgaacatccagactctccggcaaaaaattggggtgacaaagaatgggatcaattcagtgttgaatcttttgcctggagattatcgcaatttttgcatggtgaacaaggagcgcttctttgcactgcgaagatagttgaaaccgttccatggattgatgcaaaatattacgctgcaacccaagtcgtggatgaagctcgacatgttgaggtattcaacaaatatatcgatgaaaaaatcggagttagatacccggtaaatcctcacctccagcttcttatagacgacgttattaacgacagtcgctgggatatgacctatctcggaatgcagataatggttgaaggtctagcccttgcagcattcggtatgatgcatcaagtcaccactgagccgcttttaaagaaactattaagatacgtgatggccgatgaagctcgccatgtagcattcggagttttaagcctccaagaggtctatcaagatatgacagctcaagaagtaagagaacgacaagaattcgcttttgaggcaggcattaggatgcgcgataggctacttcagcaggaagtctgggacaggatgggctgcgacgtcaaacaggctgtgaaacatggactcgatatccctgatgaagatcaaatatttagccagctattattctccaaaatcgtgcctaactgccgcaaacttggtctactcgacgctggagacggatggctcagagatcgttttacagaa

SEQ ID NO: 199005 - DNA, 424 bp, Unknown
  Bacterial polypeptide expressing nucleotide sequence isolated from the Sargasso Sea
aggttatgaaaaaggattttttgtagggccgacaatttttgataatgtcactgatgatatgaaaatttatcaagaggaaatatttggtccagttttatccattttgagagtagataactattctgaagctttagagttagttaataatcatatttatggcaatggtacttctatttatacttcagatggagaagtatctagacattttacttcaaattctaaaattggaatggtaggagtaaatgtgcctattcctgttccaatggctttccatagttttggtggttggaaacaatctttatttggcgaccattcaatgcatggaattgagggaataagattttttactaaattaaagactgtaacaagtaggtggcctaaatcaataaaatcaagtccagaatatgtaatgcctactaattaa

SEQ ID NO: 199006 - DNA, 652 bp, Unknown
  Bacterial polypeptide expressing nucleotide sequence isolated from the Sargasso Sea
atggcccaatcagttgctgtagcagtaggaggaataggagataaattggttagttctttgactaaaaaagtagaggcgttaaaagttggtccaggcatggataaggaatcagaaatgggacctttagttactaaagaacatttagcaaaagtaaaaagctatgtagacattggtgtaaaagagggagctaaattgttagtagatggaagaaattttaaaattcaaggttatgaaaatggttattatattggtggatgcctatttgaccacgtaaaaaaagatatgagaatttataaagaagaaatttttggaccagttttatctgttgttcgagctaaagactttaatgaagcactacaattagtgaatgaccatgaatttggtaatggggtaagtatatttactagagacggagactcaggcagaacattttccaataaagctaaaataggaatggttggtataaatattcctataccagttcctatggcttttcacagctttggtggttggaaaagatcattgtttggagaccaacatatgcatggccccgaaggtgtaagattttatactaaacttaaaacaataacatcaaggtggccttcaggattgagatctgatccagaatttataatgccaactatgaaataaa

SEQ ID NO: 199007 - DNA, 772 bp, Unknown
  Bacterial polypeptide expressing nucleotide sequence isolated from the Sargasso Sea
tttgagtttgcaaaattaattgaaaaagttggaataccaagaggagtagtaaatatagtttctggttttggggaaccatgtggaagagctttaacatctcacaaattagtagaaagagtagcttttactggaggacctgaaacagcgagacatataataaaaaattcagctgaaaatttatctcaagtaagtcttgagctaggaggaaagagtcctgttgctgtttttgaagacgctgatcaagaaaatgcgttaaatggaattactgctggaatttttggtgcaagtggacaaagctgtatagctggatcaagactttatatacaaaatagcatttatgataattttttagaaaaaattttaaataaagcaaaaaagataaaattgggttctccgatggacaatgaaactcaaatgggtcctttaagtagcttaaaacaactagagataattgaaaaaaatattaagcttactttggatcaaggaggaaaacttagatgtggaggcaaaagacatactatgtcaaataaaggatattattttcctcctacagtaattgaatgtgataatcataatttaccaacagctgaaaatgaattatttggacctgttctatctgtgatgaagtttaatgatgaaaacgaagtaatcagcaaaatgaatgataatcagtatggattatcatctggagtttatactaaagatataaatagagggttaagagaaacaaatgcaatacgtgcaggaattacatttgtaaatacttatagat

SEQ ID NO: 199008 - DNA, 312 bp, Unknown
  Bacterial polypeptide expressing nucleotide sequence isolated from the Sargasso Sea
cctacaaaggtatgagtgatatttctgttaaagataaatcgttgttatttaacactgatttggttgaaactttagaatttgataacttgataagccaagcattaacaactatggactctgcatataatagaaaagaaagtagaggagcacatgctagagaggactttacaaaaagagatgataaaaactttatgaaacatactttagcttggcaaaacggaaaaaacgttgaaattaaatacagagacgtacactctagaactcttactaacgatgttcaatattttccacctaaggagagagtttattaga

SEQ ID NO: 199009 - DNA, 827 bp, Unknown
  Bacterial polypeptide expressing nucleotide sequence isolated from the Sargasso Sea
aatgtttatagacggtcagtgggtagactctgatacaaaaaaaacttttgaaactttaaatccagaaaataataagccttgggctgtagtacctgaagctagcgcaaatgatgttgatagagctgtaaaagctgcacaaaaagcttttgaaggtgaatggccaaaaatgctagcaagagatagagcaaaatatttaagagccattggaaataagctgagggaaagttctgagttgctgggtaaaattgaaacaattgatacaggaaaactgtatagagaaacttatcaacaagcaaaatacattgcagaatattatgattactacgcaggtttagctgataaagttgaaggaacagttcttccaatagacaaaccaaatattcaagcaatcacatcaagaattccaataggtgttattgcagctatcattccctggaattctcaaatgtttttaactgcaacaaaagttgctcctgctttagctatgggtaatacagttgtaattaaatgttctgaattagcaccagcaactatgtttgagtttgcaaagttagttgaagaaactggaataccaaaaggtgtaataaatgtggtttctggttttggtgatccatgtggtaaagctttaactactcacaacttagttgagaaagtagcttttacaggaggtcctgaaactgcaagacatataattagaaattctgcagaaaatttatctgaagtaagtttagagttaggtggaaaaagtcctgtagctgtttttgatgatgctaaacaagaaaatgcaattaatggaataactgctggaatattcggagcaagtggtc

SEQ ID NO: 199010 - DNA, 812 bp, Unknown
  Bacterial polypeptide expressing nucleotide sequence isolated from the Sargasso Sea
acataaaacaggcgctcctgcgtggcgtggccttttcacgccgcaacgttggtgtccgcagggacgcggcgcgggggttgtgggtgggaaggagcacggacgccgcgttcacccgtcacgtccaggggtctgccctgtacacccccaccaacccgcgtcacgctcgcctcggcttcatcctgcgcgcgcttcgtgccaaaggcatcgacccgatccgcgcgcagttcccggctgccctccaccatctcgcgctcaaaacaaacatcgatgccatcggtgtcgtcggctccacaattgtggccatcgagctcaagaccacccagcacgcacgctcggatcacgcgtccgacctctacacgcgcgcgtgctccaagcagccggtgctccacaacggcctagccaacaccgaacacaaccaccacatgctgcagatcgggtttggcgtcctctgcctccgccagctgctcgggccccgcgtaaaggtggtgggcgctgtcgtggtttcgtacgcttcctccgcggttgtccacgccatgcccgcgatgtttgccacgacctcgtggttcgtcaccagtgcggtgcccgcggcccccctgcggtgcccaccgccgccgcgccgcaagccccgcaccgcacgcgctgccgtggaccgcatggcactgccgtggcccagcggagacccgcgggtggacaccctgctcaggaggctccggtgcagcgttgctcgtggcataccgtcgccggagacccgcgcggtcgttgtcgttctccccggcgccgtcgaggccatggccatatgcgtgcggtcacgc

SEQ ID NO: 199011 - DNA, 466 bp, Unknown
  Bacterial polypeptide expressing nucleotide sequence isolated from the Sargasso Sea
cgcggaattggtagtggatggacgggatgtcagtctacaaggctacgaaaagggcttttttcttggcggctgtttgtttgatggggtttcgccggagatgagtatttacaaagaagaaatttttggcccagtgctttccgtagttcgtgttcccgattatgaatctgctctccaattggttagggaaaatccatttgggaatgggaccgcaatttttacccgtgatggtgatgcagctagggatttctctaatcgttcgaacattggaatggtcggtgtcaatgttccgatcccggtcccagttgcctatcatagttttggtgggtggaaggactcaatgtttggcacatcaaacacccatggtatggacggcgttaggttttacacgcagttgaaaacggtgacgtcccgatggccttcaggcatacgtcaaggggctgacttctcgatcccaacattgaagtga

SEQ ID NO: 199012 - DNA, 595 bp, Unknown
  Bacterial polypeptide expressing nucleotide sequence isolated from the Sargasso Sea
acttgaaaaaaaagttcaagcattaaaagttggaccaggattagataaaagttcagaaatgggaccattggtaacaaaagagcatttagagaaagttaaaggatatgtagatcttggagttaaagaaggtgcaaagctggttgtagatggaagaaatataaaattacaaggatatgaaaaaggtttttattttggaggatgcctttttgataatgtaaataaaaatatgagaatttataaagaggaaatttttggacctgttctgtcagtagtaagagtaaaagattttgactctgccgttaatctagtgaatgaacatgagtttggaaatggtactagtatatatacacgagatggggatgcaggaagaacttttgcaaataaaattaaaattggaatggttggtattaatattcccatacctgttccagttgcctaccattcctttggaggttggaaaagatctttatttggagatcaacatatgcacgggacagaaggtgtaagattttatacaaaattaaaaacaattacttctaaatggcctaagggattggcttctgatcctgaatttgtaatgccaatattaaattaa

SEQ ID NO: 199013 - DNA, 907 bp, Unknown
  Bacterial polypeptide expressing nucleotide sequence isolated from the Sargasso Sea
aggtatgacttatggagctccattattagttaattttcgattaattatttgggatatagatgaaattgcaggaacaaaatcagtaagagatattaaagaacaagaagtttacatgggcgatattccattaatgactaaaaacgcaacttttgttgtgaatggaactgaaagagtagttgtaagtcaaatgcatcgttcaccgggtgtattttttgatcatgattttggtaaaacccatacgagtggaaaatacttatttaatgcaagaataattccgtacaggggttcttggttggattttgaacatgatgctaaaaataatattcatgcacgtatagaccgaaaaagaaaatttcctgtaactacattatttaaatgtctgcttagtcagagatcggaagattatcttgaggaatgtgataaaaataaagtagaacctgatcaaaaaagaattttaggcatgaccgctgaagaaattttatctattttttatgaaaatattctttacaaaaagaatgattttggttggcaatttaaggaggatttaaaattttataaaggtaaaattttaaactatgatcttctagattctaaaaatggaaaaattcttataactaaaggaacaaaagtaaatcaaaagacaataaatgaaataaagaaaaaaaatatcaacagtatatctatagaagataactctcttataggtttgtatttagcctcagatataatagatgaaaaaactggtaaaatttattttgaagcaggtttcgaaatagatgaagaatttttaagttttattaactcaaataagactaataaattggatattttaaaagttgataatatagaaattggttcatatattagaagtacattacagttagataaagctagatcaagagaggaa

SEQ ID NO: 199014 - DNA, 607 bp, Unknown
  Bacterial polypeptide expressing nucleotide sequence isolated from the Sargasso Sea
ttaataaattctttagcaaaaaaagttgaatcactaaaaatcgggccgggaatggacaaattatctgaaatgggaccgctcgtaacaaaagatcatttagaaaaagtaaaaaactatgttgatataggaaaaaaagaaggcgctaaactagttgttgatggaaggaattttaaaattcaaggctatgaaaaaggattttacatcggtggatgtttgttcgaccatgtaactaaagatatgagaatttataaagaggaaatttttggacctgtcttatcggtagtaagagcaaaagatttcgatgaggctttaaaactagttaacgatcatgaatttggaaatggagcaagcatatttacaagagatggagacacaggcagaactttttctaataaagcaaaaattggaatggtaggtattaacattccaatacccgttcctatggctttccatagtttcggtggctggaaaagatctttatttggtgaccaacatatgcacggtcctgaaggggtaagattttatactaaattaaagacaatgacatcaaggtggccgtccggactcaggtcagatcctgaatttataatgccaactatgaaataat

SEQ ID NO: 199015 - DNA, 376 bp, Unknown
  Bacterial polypeptide expressing nucleotide sequence isolated from the Sargasso Sea
gtcaaatgtgcagtatttagaaccgaaaaaactttaagagaaggagtagaagaaataagaaaaccttatgaaggaatggactcaatttcagtaaaagataaatctttaatttttaatactgatttagttgaaactttagaatttgataacttaattagacaagcaatagttacattagactctgcatatgaaagaaaagaaagtagaggggctcacgcaagagaagatcatcctaaaagagatgataataactttatgaaacatacattatcttggtgtaatggtagtaaaacaaagatttcttatagagatgtacatagatcaactttaacaaatgatgtacaatattttccacctcaagaaagagtttattaat

SEQ ID NO: 199016 - DNA, 434 bp, Unknown
  Bacterial polypeptide expressing nucleotide sequence isolated from the Sargasso Sea
ctcagagggttcaaatccaacatctgaactgagactttcaatgcaaaaaacgatgcaatcaaaatgtgctgtatttagaactgagaaaacattaaaggagggcattgatgaaattagaaaaccttatgatgggatggactctctttctgtaaaagataagtcattaatctttaatactgatttagttgaaacactagaatttgacaacttaataagacaagcaataactacaatggactctgcgtatcatagaaaagaaagcagaggagctcatgcaagagaagattttccaaaaagagatgatgagaattatatgcaacatactctttcttggtgtaatggttcaaaaactaaaattaattatagacctgttcatagatcaacacttacaaatgatgtacaatattttcctccacaggaaagagtgtattaat

SEQ ID NO: 199017 - DNA, 826 bp, Unknown
  Bacterial polypeptide expressing nucleotide sequence isolated from the Sargasso Sea
caaagacttatttatgaacctaaaggggtgtgtgcattaattacaccttggaattggccaatgaaccaaacatgtttaaaagttatgcccgctttagcttcaggctgcactatgattttaaaaccatctgaagtagcaccactatcagcaatgatattaacagaactgattgatgaagcaggttttcctccgggagttttcaatttagttaatggagatggcgcaacaacgggagatgctttaacaagccatccagatataaacatgatctcatttacaggatcaacaagagcaggggctttaatatcgcaaaatgcagctaaagatttcaaaagagttagtcttgaacttggtggaaaaggagcaaatataatttttaaagatgcagaccctgaagctatcgagagaggagctttgagatgctttagaaactcaggccaatcttgtaatgcaccaacaagaatgcttgtcgaaaaaagtatgtatgacgaggcggttgaaagagtaaaaaaatttgcaaatactatgaaagttggagatcctaaaaaagaaggggaacacatcggtccagtagtatctgaagtacaatacaaaaaaatacaatcgcttattcaaaaaggtattgatgaaggtgccaaacttgttgcagggggagtaggaaaacctgatggaatagacaaaggttactttgttaaacctacagcctttgccaacgttaataatcaaatggaaattgcaagaactgaaatttttggtccagtgctttcaattatacctttcgaaaacgaggaagaagcaataagtattgcaaatgatactgattacg

SEQ ID NO: 199018 - DNA, 499 bp, Unknown
  Bacterial polypeptide expressing nucleotide sequence isolated from the Sargasso Sea
aaagtctggaggaggagttgaatcagcatctaaaagtgatattgatagctcgctcgagagattaaacaaattaaatgagtcctctgaaggatttgatccagctgaagtcaaaaaagaacttcaagaatgtatgcagaattactttggtgtattcagaagaggcgaatatatgaaaaaaggtctcgataaactaaatgagctgagagaaaaagttgataatttacatctcaaagataagagtgatgcttttaatactaatcgggttgaagctattgaactacaaaacttattcgaagttgctgaatcaactgcaatttctgcatatagaagaactgaaagtagaggtgcccacgctagagacgattacccagatagagatgacgataattggttatgccattctatttatgatccaatatcaaaagaagtgtccaaaagagaagttaattttgaaccacagaaggttgaagctttcccaccaaagataaggacttattaa

SEQ ID NO: 199019 - DNA, 828 bp, Unknown
  Bacterial polypeptide expressing nucleotide sequence isolated from the Sargasso Sea
agttctaagaaatgtagaggaaagaaaactaaaaaaaaatattcttggatttaaatatgactatccttttggatttgccccaatgggtatgacaaatctttcatggccaggtgcagattctatgttagcaaaagagagtgcacgaaataacataccaacctgtgtatcgatggcttctacaacaactttagaaaaaatgtatgagctttctgaaggtcattcatggcttcaactttatatttttcaagatgaggcttttgtaatggaattgctagatagagcagaaaaaactggctatgaggtagctatacttactgttgatgttccggttttatcaagaagaactagagatgataaaaatggattttcatatccatttaaaataggacctaaacaattttttgattttgcaactcatcctgtttggtcaatatctacattacttaatggaataccaaagccaatgaattacgagacttcaaaaagtggaaaaggtatttttaaaagaaaagaaagtagaggaaaaacagattgggaaactttaaaaagagtgaggaacaaatggaaaggtaagttaattgtaaaaggcgtcatgtcatcagatgatgcaatcaaaattaaagaaatgggtgctgatgctatccaagtttcaaatcatggaggtagacaattagatagtgcctcagcagcaataaatattttaccttttattagggaagcagttgggaataattttccaattatattcgatagtggaataagaagtgggagcgatattgtaagatcattagctttgggagcagatttttcaatgattggaaggcctgt

SEQ ID NO: 199020 - DNA, 961 bp, Unknown
  Bacterial polypeptide expressing nucleotide sequence isolated from the Sargasso Sea
acagttgctgaaaacagaataaaaaagctttacgaacttgaaaaagaattaaattggaatggctcaatagatttagattggagttacactcatccagcagatgagcctcttttaggagttgatggaattgaatttcctcatgaacaattagatgcttacaaagccctatctgaagaagaaaaaattgaattcgacagacatgaaactgctgaggttctatgtcaatttctacacggtgagcagggggctctactagtagcttcacaaatagcaagttgtgctccaacttttaacgcaaaaatgtacgctgcttctcaaacttttgatgaagctaggcacgttgaagttttcaatcgttatttacaggaaaaaattggctttcactatcctataaatccgagtttaaaagctttattagataaaatacttactgatgaaagatgggatttaaagttcataggaatgcaaattattattgaaggacttgctcttgcggcctttactaacatgaagctttctgccagagaccctcttttgcaaactcttcttcactacatcatcagagatgaagcgcgtcacgtaacttttggaattaattatttagaggattttgttaaaactctttctcctgaagaaattgaagaaagagccgaattcgcttttgaagcctgcgtagtttcaaaagatagattaataaatactggagcgatgacaaagtttttaaaaatgtctgatgaagaagctagagtatttcaattaaataatggtggtttagaccaattcagaagctttttattttcaagggttatgccaaatctaaaaagaattggtctgcttacagactctgtaagaccgaaatacgaagaacttggtattcttgagtatgaaaatgctgcaagtgattatgaaattgactgggctgaaatttctaagcctttagaatcctcagatcaagtaaaaa

SEQ ID NO: 199021 - DNA, 292 bp, Unknown
  Bacterial polypeptide expressing nucleotide sequence isolated from the Sargasso Sea
atttcagtttcagacaagtctttgctatttaatactgatcttgttgaaactttagaatttgataatctcataagacaggcaatgacaacaatagactcagcctatcatagaaaagaaagtagaggggctcatgcaagagaagactacaagaatagagatgataaaaaatatatgactcatacattagcctggcaaaagggaaatgatgttaaagttgcatatagacctgttcatgcaaaaactttgacaaatgatgtacaatattttccgccaagagaaagagtatattaat

SEQ ID NO: 199022 - DNA, 730 bp, Unknown
  Bacterial polypeptide expressing nucleotide sequence isolated from the Sargasso Sea
ttgccaacggaaatagagcaagccggacaagatgctcaagagcctgaacagggcgaaacctctgaagcagtagaaactccagaaaccgaggagaaagccgcagaagagtcatccggggaagagacacccgaaaaactagcagaagagaagcagaaaaagcgtaactctgttcaggaaagaatctcacaactggcacgacaaaaaaatgatgcgaacactcgtgtacaagaactagaacagcaagttgcttacttacaggctcaaagtcagcctcaagctcaggatgcgccacaagcctatccaagacttgaagattacgactacgacgaagcaagacatcaacaagcagttctacagtacacctcaagcgtaaatgctcagaacgtgcaacaggtcatgcagcaacaacagcaagcccagattgctcaattacaagctcaaaaggcacaaattgcgtctcaagagtttgtggagaaatctaacgcatttgctttggactataaggacttcaacgaaactgttactaatcctaatttccatcaaagtgatcaagtagcaaggacgattgttgaattgccgaatggccctgatgttgcttactaccttggcaagaacttaaagattgccaacgctctgaacaataaaagcgagagggacgccagagatgatttgataagaatctcaacagcgttacaagtgaactctcggaaacgtcgtgctaatacaacca

SEQ ID NO: 199023 - DNA, 661 bp, Unknown
  Bacterial polypeptide expressing nucleotide sequence isolated from the Sargasso Sea
tatgaaactatttgaaaccctatcgctggctggaaaaacgctgaaaaatcgggttgttatgccgccaatgacccgctcccgctcaacacagccgggagatgtgcccaacacccttatggctgaatattacgctcagcgcgcaagtgcagggcttattgtgagtgaaggcacacaaatttcggcactcggtaagggttatgcgtggacgccgggtatttataccaaggcgcaaatcgatggctggaagttggtaacagataaagtccatgaagcgggtggtgtgatgtttgcgcaactttggcacgtgggccgcgtatcccatccttcaaatacagaggggcagcagccaattagcgcatcggcgattcaagcaaaaggcgtaaaagtatttgttgatgaaggcggcaaccctggctttgttgagtcggtcatgccccgagaaatgagcattgaagatataaaagccgtggtggaagagtatcgcgttgcggcgcgcaatgccgtagatgccggatttgatggcattgagttgcattcggctaatggttacttgcttaaccagtttattgattctcaaagtaatacaagaactgatgaatacggcggaagtgtacagaaccgtattcgattcttgaaaagaagtggtgcaggctgtgtctga

SEQ ID NO: 199024 - DNA, 918 bp, Unknown
  Bacterial polypeptide expressing nucleotide sequence isolated from the Sargasso Sea
gaatgggatatgtacgtccaaacagccttgcaaaattgcgagaaataaaagcagaaggaggctggagtgtggtctgcacagaagaagtttggattcatcacagttctgaaatagttcctcatgctgaaggtattttatgggatgacgatgatatacccgccctagcaaaaatgactgaagcagttcataagcatggttcgcttgctggaatagaactgcagcatgggggacataatagttcaaacaattacagcagaatacctccaattgctcctagttcgattgtttccagcagttaccatcctgtgcaggccagagcaatggacaagaaagatattgccaactttagaaaatggcacaaaaaagcagcattgagatctaaaaaagctggatttgaccttatttatgtctatgctgcacacagcggcacgctactgactaattttctttccagaatgattaataaacgtactgacgaatatggagggagtcttgaaaaccgtgtccgcctatttcgtgagttaattgaagatacaaaagacgcagtcggtgatagttgtgctgtagcagttcgatttgcagtagaggaatttctaggcccaatgggaattacttctgaaaatgaagggaaggaaattgtcgagatgcttgcagaattgcctgatctctgggatgtgaatataagtaattggagcaaggattctgctccatcaagatttgaaagtgaaggctatcaggaatcatatatcagttttgtaaaatcactcactacaaagcctgtagtgggagtgggtcgtttcacatcaccggacacaatggtatcacaaattaagcacggagtgatggacatgattggtgcagcacgtccatctattgccgatccattccttccaaaaaaaatgaagaaggcagaataaa

SEQ ID NO: 199025 - DNA, 514 bp, Unknown
  Bacterial polypeptide expressing nucleotide sequence isolated from the Sargasso Sea
ggtaaaccctggaagtcctcatgaagaagtttcgaactcagaaacggaaaaatgtttaaacagatttgatagaattagaaactccaaaggatcaactaaaacttctgaacttagattaaaaatgcaaaagacaatgcagtcaaaatgtgcagtttttaggacagaaaaaactttaaaagaaggagttgaacaaataagattaccttatgagggtatgaatgatatttctgtaaaagataaatcattgttatttaatactgaccttgtggagacattagaatttgataatttaattagtcaagcattaacaacaatggactctgcttacaatagaaaagaaagtagaggggcgcacgctagggaagactatacaaaaagagatgataagaactttatgaaacataccttggcttggcagaaaggtaaagaagtccaaataaaatatagagacgtacattctagaactttaactaacgatgtgcagtattttcctccaaaggagagagtttattaa

SEQ ID NO: 199026 - DNA, 724 bp, Unknown
  Bacterial polypeptide expressing nucleotide sequence isolated from the Sargasso Sea
cttgagggcagggttgcccttgtaaccggaagcagcaagggcatcggcgcaggcatcgcgcgggggctcgcccgggaaggcgcaaccgtcatcgttcacggacgtgacgtaaaccaggcgcgcggcgtggcggagaagatcgaggcggccggcggaaccgcgcatgtcgtaaccggcgatctcaccgatgccgctcaggtcgaggcaatggtgtccgcggcccaagccgccgctggcgatatcgacattctcgtcaacaatgcgggcggttctagcggcgcgtccgactggagcacgacggaggccgctgcatggtccgcgtcctatgacgccaatgtggtggcggccgtgcgcgtgacaagcgccgtgctgccggccatgcggtgcgcgcgatggggacggatcatcaatatctccagcctcgccggcctgatgccgcccgcagcaaacccggattattccgctgccaaggcggcgatgcttgcgatgtcggcttccatgtcgaaagccgtcgccgccgacggcgtgaccgtgaacacggtttcccccggcacaatccacagcgagaagctcgacttgaagtttcgcgaggtcgcgcaaaccagaggcatcgtgccggatgcgccctgggacgaggtggaggccgcagtccttccgctctttgcggcggtccccgttggtcgggtgggaacgctggaggagatcgcggatgccgtctgcttcc

SEQ ID NO: 199027 - DNA, 596 bp, Unknown
  Bacterial polypeptide expressing nucleotide sequence isolated from the Sargasso Sea
tatgagctttataatctggaaaagtgaacttttatcagaaaaagacaaatctttagcagagccaaataatctaagatctgagtatgttgatttcaaagaaattgataacgactttcaattcttagacgtcggcagatatgatccacagaaaaaagatatagaaagtagaaaaattcattttgttgagatctatggagaatataatcaaacacaagctgcgaatcaggctcatagatgtctggactgcggtaatccctattgtgagtggaaatgccctgttcataactacataccaaattggttgaagctcgttaatgaaggaaatattcttgaagcagtagagctttgtcatcagacaaatagtctcccggaagtttgcggaagagtttgcccacaagataggctttgtgaaggagcttgtacattaaatgatggatttggagcagtcacgattggatcgattgaaaagtacataactgacaaagcttttgaaatgggatggaaaccagatttatcaaatagatcatggtctggcaaaaaagttgcaataattggagctggtccagctggactatcgtgtgctgacgttcttacga

SEQ ID NO: 199028 - DNA, 311 bp, Unknown
  Bacterial polypeptide expressing nucleotide sequence isolated from the Sargasso Sea
tatgaaaaatataaaagtagcggtggtaaccggtagtggtaaaggtattggcgcacgcatcgttgaaaagttagcggcaaataattttgcggtggtagttaattatgccagtagtagtgatgctgcaaacgaactcgttgataaaattaaaagtaaaggtgggcaagccattgcagtaaaagctgatgtgtctaaacctgagcagtcaaaaatgttatttgataccgcgttaaagaagttcggtaaggtagacgtactggtgaacaatgcgggtgtaatggcgctttcaccgttagccgatacgagcgatg

SEQ ID NO: 199029 - DNA, 944 bp, Unknown
  Bacterial polypeptide expressing nucleotide sequence isolated from the Sargasso Sea
aattaaagcatcagaacttgcgccagcgacgatgtttgaatttgcaaaattaattgaagaaacaggaattcctaaaggagtagtaaatgttattacaggttttggagacccttgtggaaaagctttaacaactcacaatttagttgaaaaggttgcattcacaggtggacctgaaacagcaagacatatcataagaaattctgcagaaaatttatctgaggttagtttggaacttggtggaaagagtccagttgcagtattcaacgatgcgcatcaggaaaatgcagttaatggaattactgctggaatttttggtgcatctggacaaagttgtattgctggttcaagattatatttacaaaaagaaatttataatgaatttttagataaacttacagcaagagcagaaaaaataaaaataggagcgccaatggatccagatacagaaatgggaccattaagtaattttaaacaattagaagttattgaaaaaaatataaaattaaccattgaacaaggtggcaaaataaaatgtggtggaaaaagacattctttttccaatgaaggatattattttcctccaacaattattgaatgtgataatcataacttaccggttgcagaaaatgaattgtttggtcctgttttatcagttatgaaattcgaaaatgaaaaggaagtaattgaaaaaatgaatgataatcaatttggattatcttctggagtttatactagtgatctggctagaggattaagagtttcaaacgcaattagagcaggaattacatttgtaaatacatacagattaatctcaccatctgccccatttggaggaattaaagatagtggatatggaaaagaagcaggtgtagactcaatcaaagactacacgagagttaaaacaatttggtactatacatctgacgaaccaacacttgatcctt

SEQ ID NO: 199030 - DNA, 283 bp, Unknown
  Bacterial polypeptide expressing nucleotide sequence isolated from the Sargasso Sea
aatgcacgaatatgatgttgtcatcattggcgccggtggtgcaggtttgcgtgcagccattgaagcaactcgcgaaggtgtatccgtcgccgtgatttgcaaatctatgctcggcaaggctcacaccgtaatggcagaaggtggtgcagctgcagcacttgggaataaagatcctcgcgactcatgggaaactcacttccgtgacaccatgaagggtggcaaatatctgaatgattggcgtatggctgaaattcatgccaaagaaagccccgatcgaatccga

SEQ ID NO: 199031 - DNA, 460 bp, Unknown
  Bacterial polypeptide expressing nucleotide sequence isolated from the Sargasso Sea
atgaataaaaaagaaattataacccaatataatataaaattagaattaattaagaaacttaataaattctattttgataaaagtaaacctattgtttcagatgaagaatatgatgacttgaaaaaagaaattatactcctcgaaaataaatataaatttcttgtatcaaataattctccttcaaaatctgtaggccacaagccttcaaagaattttaaaaaagcaaatcataaagttccaatgttgtcgctagcaaatgcattttcagaggaagatttaataaattttgaaaagaaaattacaaattttctctcccaaaaagaaggttttgaaatttcattcagtgctgaaccaaaaattgatggcatttctgcctcatgtacatataaaaacggaatttttgtgagaggtctttctagaggagatggtaaagaaggtgaagatataactaataattaaa

SEQ ID NO: 199032 - DNA, 808 bp, Unknown
  Bacterial polypeptide expressing nucleotide sequence isolated from the Sargasso Sea
aattgcttttacaggaggtcctgaaactgcaagacatataattagaaattcagctgaaaatttatctgaagtaagtttggaacttggaggaaaaagtcctgtagcagtatttgaagatgctcatcaagaaaatgcaataaatggaattaccgcaggaatttttggtgcaagtggccaaagttgtattgctggatcaagattatatttacaaaaaggaatttataatgaatttctagataagcttgctgaaagagcagaaaaaataaaaattggagcacctatggatcctgaaagcgaaatggggccaattggtaattttaaacaattagaaataatagaaaaaaatattaaattaactgtagaacaaggtggaaaaattaaatgtggaggtaaaagacatccgttttcaaatgaaggatactattttcctccaacaattattgagtgtgataatcataatcttccaacagcagaaaatgaactttttggtccagtgctatctgtaatgaaatttgaaaatgaagaagaagtaataaataaaatgaatgataaccaatacggtttatcatctggagtttatactagtgacttctcaagaggcatgagagtttcaaaagcaatcagagctggaatcacatttgtaaatacttataggctaatatctccatctgctccatttggaggaatgaaagatagtggctatggtaaagaagcgggtattgaatctataaaagattacacaagagtaaaaacaacttggtattatacttcggataaaccaactcttgatccattttcaatgagataa

SEQ ID NO: 199033 - DNA, 573 bp, Unknown
  Bacterial polypeptide expressing nucleotide sequence isolated from the Sargasso Sea
cactaatcgatcttgttgtttttggtaaagcagctagtctaacatgtaaagaaaaagtaaaacctaattctaaaaaaattgaaatcagtaaatcaaaaacaaataatattattgagcgatttgataagattagaaacagcaaaggaaactctacaactggagaacttcgtacttccatgcaacatataatgcagcaaaaatgtgcagtatttagaacacatgatctcatatcaaaaggcattgaagaatattcaaaagttgagagctcaatggatgacatagacattaaagacaaatcattaatctttaatacggacttggtcgaagctttagagttacacaatttaatggcacaatcaaaagttactcttcattctgcgttaaatcgaactgaaagtagaggtgcacatgcaagagaagattataaagaaagagatgataataattggttagttcactctttagcctggttaaacgataagggagatgtgagtatgggttccagaggtgttcatatgaatactctcactaatcatgttcaaccaataccacctaaaagaagagtttactaat

SEQ ID NO: 199034 - DNA, 853 bp, Unknown
  Bacterial polypeptide expressing nucleotide sequence isolated from the Sargasso Sea
acaaaagttgcacctgctttagctatgggtaatacagtagtaattaaatgttctgaactagcaccagcaactatgtttgaatttgcaaagttagttgaagaaactggaataccaaaaggtgttgtaaatgtagtttctggttttggagatccatgtggtaaagctttaactactcacaacttagttgagaaagtagcttttacaggaggtcctgaaactgcaaggcatattattagaaactctgcagaaaatttatctgaagtaagtttagaattaggtggaaaaagtcctgtagctgtttttgatgatgccaaacaagaaaatgcaattaatggaataactgctggaatatttggagcaagtggtcaaagttgtatagcaggttcaaggttatacttacaaaaaggaatatataacgaatttttggataagttagcatcaagagcagaaaaaattaaaataggtgctcctatggactctgatactgaaatgggtccattaagtaacttcaaacaattagaagtaatagaaaaaaatatcaaattaactgttgaacaaggtggaaaaattaaatgtggtggtaaaagacatcctttttcaaatgaaggttattattttcctccaacaattattgagtgtgaaaatcataatttaccggctgctgagaatgaacttttcggtcctgtattatcagtgatgaaatttgatactgaaaaagaagtaatagaattaatgaatgacaatcagtacggtctttcttcaggtgtttatactagtgatcttgcaagaggcatgagggtatctaatgctatccgagcaggaataacatttgtaaatacttatagattaattc

SEQ ID NO: 199035 - DNA, 601 bp, Unknown
  Bacterial polypeptide expressing nucleotide sequence isolated from the Sargasso Sea
catgggggctaaccgtttaggaacaaactctttaattgatctggttgtatttggtaaagcctcaagtattacagccaaagaaaaagtgaaacctaacagtaagccagttgatattgatgaaagcacaattgacccaatattagatcgttttgataaaatccgatttaacaaaggagatagctcaaccggtgaagtgagaacttcgatgcaaaaagttatgcaagaaaaatgtgcagttttcagaacggatgaacttatctcaaaaggtattgaggaatttagtcatatagaaagctcaatggataacatagatgtgaaagataaatccatgatctttaacacagacttaactgagtctcttgagttacataatttaatggcacaatctaaggttactcttcattctgctctaaacagaacagaaagcaggggggcgcatgcaagagaagatcatcaagaaagagatgactctaactggttggtccattctttatcatggcttgataataaaggtggtgttagaatgggaacacgacctgtaaacatgaatactttaactaatcatgttcagcctatccctccaaagaaaagagtgtattaa

SEQ ID NO: 199036 - DNA, 637 bp, Unknown
  Bacterial polypeptide expressing nucleotide sequence isolated from the Sargasso Sea
tgcagttgcagttggaggtataggtgacaagcttgttgactccttagcaaaaaaggttcatttattaaaggttggtccagggatggataaacaatcagaaatgggaccattggttacaaaagaacatttagataaagttaagggttatgttgacattggggaaaaagagggtgcaaagcttgttgttgatggaagaaattttaaattgcaaggatatgagaatggatattatatcggaggatgtctatttgatcaggtaactaaaaatatgaggatttataaagaggaaattttcggtccagttttatcggtgatcagagcaaaagattttgacgaagcattacaacttgttaatgatcatgaatttggaaatggtgtgagcatatttactagagacggtgattcaggaagaactttttcaaataaagctaagattggaatggtaggaataaatatacctataccagttccaatggcatttcatagttttggagggtggaaaagatctttatttggagatcaacatatgcacggtcctgaaggagtaagattttatactaaattaaaaactatcacatcaagatggccttccggtttgagatctgatccagaatttgtgatgccaacaatgaaataa

SEQ ID NO: 199037 - DNA, 826 bp, Unknown
  Bacterial polypeptide expressing nucleotide sequence isolated from the Sargasso Sea
aggcctttgggcgtggtcttcgcgatcatgccctggaactttcctttttggcaggttttcagagctctggcgccagccttgatggtggggaatggattgctgctcaaaggagcctccaatgttcctgggtgtagtcaagcgattgcccagctactcaccgaaattgatgttccagctggcctactcaccaatttgccgattcatgctgaagaggctgaaagggtgattgctcatcctttggtacgtgctgtgacgctcaccggaagtgaatcggcgggccgagcagttgcagctctagctggtgcccacctcaaaaaatgcgttctcgaattgggtgggcaagatccatacatcgtcttggctgatgccgacatcacactggcagcgcaaaagtgcgtgcaaagccgaatgctgtgttcgggccaagtgtgtattgctgccaagaggttgatcgttgtcgacgcgatttacgacgcgtttcgaagcgaggttttgaaacaacttgagccgtacctcctggccgatcccaccgattccagttgtcgtcttggccctctggcgcgagaagatctgcgtgatctggtgcatgcccaggttgccgccagcatcgcggctggttgccgcttactcatcggtggcgtgatccccaagcaaccaggttggtggtatccagccaccgtgttggaaggagtcagtccaggcacgacggcttttgacgatgaggtattcgggccggttgtgagcttgatacgtgcccgcgatgaagaagaggctctaaccctggctgctgagagtcgttttggcttaggcgcagccatctttacgg

SEQ ID NO: 199038 - DNA, 578 bp, Unknown
  Bacterial polypeptide expressing nucleotide sequence isolated from the Sargasso Sea
tatttatccaatcaaattagatttagaaaatgaggaaagtgttaaagaagcctttattaaaattaattccttaaatcttgaaattgatattctagttaataatgcaggaactattcatacagcattattccaaatgacttcagtaagaaaattaaaagagatatttcaagtaaattttttttcgcaaacaatttttacccagtatattattaaatcaatgatgaaaaggaaaagtggaagtattatttatatttcatctagttcagcattagattcaaatataggaagaagtgcttattcagcttccaaagctgccttaattgcgcaatcgaaaactttgtctaaagagttaggttctttaaatataagagtaaataccatagccccaggcttaaccaacactgatatgatgaaggaaaatacttcacaagaagtaattaaagaagtaacatccaatttatcactcaaaaggataggcgaacctaacgaaatagctaatcttgctttatttctagcctcagatctatcgtcttatattactggacaagtaattagaatagatggaggaatgaaatgaa

SEQ ID NO: 199039 - DNA, 801 bp, Unknown
  Bacterial polypeptide expressing nucleotide sequence isolated from the Sargasso Sea
gaaagtgcaagaaataatataccaacctgtgtatcgatggcttccacaactaccttagaaaaaatgtacgagctttcagaaggtcattcatggcttcaactttatatttttcaagatgaagcttttgtaatggaattgctagatagagcagaaaaaactggctatgaagttgctatacttactgttgacgttccagttttatcaagaagaactagagacgataaaaatggattttcatacccttttaaaataggacctaaacaattttttgattttgcaactcatcctgtttggtcaatatctacattactaaatggaataccaaaaccaatgaattatgaaacttcaaaaagtggaaaaggtatttttaaaagaaaagaaagtagaggaaagacagattgggaaactttaaaaagagtaagaaataaatggaaaggtaaattaattgtaaaaggtgttatgtcatcagatgatgcagttaaaattaaagaaatgggggctgatgctatccaagtttcaaatcacggaggcagacaattagatagtgcctcagcagcaataaatattttaccttttattagagaggcagtaggaaataattttccaattatatttgatagtggaataagaagtgggagtgatattgtaagatcattagctttaggagcagatttttcaatgattggaaggcctgtaatgtatgctatgggagccgacggagctagcgggttaagaagaattgtagatataattaaagaggaaactagcaccacgctaggtttggttggattaaatgatatt

SEQ ID NO: 199040 - DNA, 382 bp, Unknown
  Bacterial polypeptide expressing nucleotide sequence isolated from the Sargasso Sea
tatgcaatctaaatgtgcagtatttagaacagataaaacattaaaagaaggagttgaggaaattagaaaaccttttgatggaatgaaaaaaataaacgtaaaagataaatctctaatatttaatacggatttggtagagacattggagtttgacaatctaataagacaagcaattactacaatggactcagcatacagtagaaaagaaagcagaggagctcacgctagagaagattatccaaaaagagatgatcaaaattatatgaagcacaccttatcatggtgtaatggaagcaagtcaaaaatagcttacagagaagttaataaatcaacattgacaaatgaagttcaatatttcccaccacaagaaagaatttactaa

SEQ ID NO: 199041 - DNA, 325 bp, Unknown
  Bacterial polypeptide expressing nucleotide sequence isolated from the Sargasso Sea
aatggatactttattggatggctgtttatttgaccatgttaaggaagatatgcagatatatagagaagaaatatttggacctgtattatctgttgtacgtcaacctacttttgatgatgctttaaaaatggttaatgatcatgaattcggcaatggtactactatttatactcgtgatggtgacacagctagagcttttgctaatcaatgcaaaattggaatggtaggagtgaatgttcccataccggttcccatggcttttcatagctttggtggttggaaaagatccttatttggggatcatgcaatgcatggtatggacgga

SEQ ID NO: 199042 - DNA, 748 bp, Unknown
  Bacterial polypeptide expressing nucleotide sequence isolated from the Sargasso Sea
tatgtctaaaaaaatttcatttacttttgatggaaagaaatattttggccatgaaggagatacacttgcagaagctttattagataatggtgtgtttttagttggaagaagttttaaatatcatagacctcgtggcattataagtgctggtagcgaagagccaaatgcaatagttcaattagagactggcaatattactgagccgaatgtacgagcaacagaaataataatttatgagggcttaatagctaagtcacaaaataactggccaaatgtaaattttgattttggtgcaataaatgactttctttctcgtttttttcctgcaggtttttattataaaactttcatgtggcctccgaaattttgggagaaatatgaatattttataagaaaagcagcaggtttaggaatttctcctaaagaagatgatccagatagatatgaacattttcactatcattgtgatgtcctagtagttggtggaggtataagtggcttatatgctgcagaattagcagcaaaaacaaatttaaaagttttacttattgagcaatattcaaaacttggtggtgaaataaataatgattctcgcttaaaattaaatccaattactcaagagacgatagataattttccagctatattatttgatgaaatatattctaaattaaaaaagcgaaagaatgtcaaaataattacaaatacaactgtttttgcatatatgcacaataaattatttacttgc

SEQ ID NO: 199043 - DNA, 646 bp, Unknown
  Bacterial polypeptide expressing nucleotide sequence isolated from the Sargasso Sea
gttcaatcagctcaaaaagcttttgaaaataattggtctaaacttcatccaagagacagagcaaaatatttaagattaattgctgatcaactaagagaaaatgctgaacatcttggaaaaatagaaactattgatactggaaaactttatagagaaacaaaaactcaagcaaattatattgctgaatactatgattactttgcaggtctagctgataaagttgagggcactgttgttccaattgataaacctgatatgcaagttacaacaacaagaattcctataggtgttgtagcggcaattattccttggaactctcaaatgcttttaaccgctgttaaacttgcacctgctcttgcaatgggtaatactgttgtaataaaagcatctgaacttgcacctgtaactttattagagtttgcaaaattaattgaaaaagctggagtacctaaaggggtaattaatataattactggacttggagaaccatgtggtaaggcactaactactcatcatcttatagaaagaatcgcttttacaggtggaccagagactgcaaaacatattgtaaaaaattctgctgaaaacttatctcaagtaagtttagagcttgggggaaaaagtcctgttgtagtatttgatgatg

SEQ ID NO: 199044 - DNA, 611 bp, Unknown
  Bacterial polypeptide expressing nucleotide sequence isolated from the Sargasso Sea
atcagctggagagagatgtatggcgatatcagtggctgttgccgttggaaatgttgcagataaattaattgaaagtataacccccaaaattaataaaattaaagtaggaccatataatgataagcaaactgaaatgggaccagttgtgagcaaaaaagccttagaaagaattcagtctttaattgcaagtggtgtagaagaaggagcaaatttacttatagatggaagagatgttaaattgcaaggttatgaaaatggatattttatagggccatgtttgtttgataaagttaaccctaatatgagtatttataaggaagaaatttttgggccagttttgagtatagttagagctgatagttataatcaagctcttcaaatggtaaaagataatccctatggcaacggatgttcaatatttactagggacggtgatactgccagagacttttctaatgaagcaaatataggaatggtcggggtgaatattccaattcctgttccggtagcttattatagctttggtggatggaaaaactcaatattcggaggacataatgcttatggcatggaagcagttagattctacactaaagtgaaaacagttactt

SEQ ID NO: 199045 - DNA, 869 bp, Unknown
  Bacterial polypeptide expressing nucleotide sequence isolated from the Sargasso Sea
gatgagtaaactaaagcaatataaaatgtttattaatggtgagtgggtagactctgaaagtaaaaaaacatttgaaactttaaatccagaacataatgagccatgggcagttgttccagaagcaagtgctaaagatgttgataatgcagttaaagctgctcaaaaagcattcgagggtgaatggtcaaagctacttcctagagaaagagctaaatatttaagagctattggaaatcaattgagagagaatgcaaaaatgctgggagaaatagaaacaattgatactggaaaactttatagagaaacaaaaaagcaagcagtttatattgcagaatactacgactattatgctggcttggcagataaagttgaaggtacggttttgcctatagataagccaaatgttcaagcaataacaacaagaatacctataggagttatagctgcaattattccatggaattcacaaatgtttttaaccgcaactaaagtagcaccagcacttgcaatgggtaatacagtggtaattaaatcttcagaacttgcacctgctgttttgtttgaatttgcaaaattagttgaaaaaactggtatccctaaaggcgtagtgaatgtaattacaggatttggagatccttgtggtaaaagtttaactactcataacttagttgaaaaagttgcttttactggtggtcctgaaacagcaagacatataattaaaaactcagcagaaaatttatcagaagtaagtttagaactgggtggaaaaagtccagttgcagtctttgatgatgcagagcaagaaaatgcaataaatggtattacagctggaatatttggtgcaagtggacaaagttgtatagcaggtt

SEQ ID NO: 199046 - DNA, 640 bp, Unknown
  Bacterial polypeptide expressing nucleotide sequence isolated from the Sargasso Sea
agttgctgtagccgtcggcaatgttggcgataaacttgttaatgaattagcaaaaaaagttgaagcattaaaagttgggccaggtatggataaaaattcagagatgggccctttagtaactaaagaacatttagaaaaagttaaaggttacgttgatctaggagtaaaagaaggggctaatttagttgtagatggtagaaatattaaacttcaaggttatgaaaatggtttttatataggtggatgtttgtttgataacgtaaaaaaagatatgagaatttataaagaggaaatttttggaccagttttatctgtagtcagagctaaggattttgatgaggccacacaactgataaatgaccatgaatttggaaatggtacaagtatttatactagagatggagatgtaggtagaacttttgcaagtaaaattaaagttggcatggttggaataaatattcctatccctgtaccagttgcctttcatagctttggtggttggaaaagatcattatttggagaccagcatatgcatggtcctgaaggagtaagattttatacaaaattaaaaacaataacttcaagatggccttctggtgttagatctaacccagaatttgtaatgcctacaatgaagtaa

SEQ ID NO: 199047 - DNA, 802 bp, Unknown
  Bacterial polypeptide expressing nucleotide sequence isolated from the Sargasso Sea
ggagtatttaacgtaatcaacggtgataaagaagtagtagatgcaatattaacaaacaaagaaattaaggctgtaagttttgttggttcaactccaattgcaaaatatatttatgaaaatgcagctaaaaatgaaaaaagagttcaagctttaggaggagcgaaaaatcattgtgttgttatgccagactgtgatttagatcaagcagttaatggtttaatgggagctgcttatggatctgcgggcgaaaggtgcatggcacaatctgttgcagttgcagtgggtgatgtaggagatcatttagtaagtaaattaggtaaaaaagttgaagcactaaaaattggaccaggtatggataaaacatctgaaatggggccgttagttacaaaagaacatttagaaaaagttaaaggatatgttgatattggagtaaaagaaggtgcaaaattagtagttgatggaagaaatttaaaattacagggatacgaaaatggttattatatgggaggatgtctatttgatcatgttaaaaaaaatatgcgaatttataaagaggaaatttttggaccagtgctttcagtagttagagcaaaaaattttgaagaagctactcaattagttaatgatcatgagtttggtaatggaacgagcatttatactagagatggagatgtaggcagaacatttgccagtaaaattaaaattggaatggtgggtataaatataccaatacctgtgccagtagcttttcatagttttggcgggtggaaaagatctttatttggagatcaacacatgcacg

SEQ ID NO: 199048 - DNA, 490 bp, Unknown
  Bacterial polypeptide expressing nucleotide sequence isolated from the Sargasso Sea
attgatttcgggagtaaaagaaggcgcaaaacttgttgtagatggtagagatattaatcttcaaggttatgagaatggttattatataggtggatgtttatttgatcatgtaaaaaaagatatgagaatatataaagaagaaatttttggacctgttttatctgtagtgagagttaaaaattttgatgaagcacttcaacttataaatgaccacgagtttggaaatggaacaagcatttatacaagagatggagatgcaggaagaacttttgcaaataaaataaaagttggaatggtaggaattaatatacctattccagtaccagttgcttatcatagctttggaggctggaagaggtcattatttggagaccagcatatgcatggcccagaaggtgtaagattttatactaaattaaagaccattacttcaaggtggccgtctggttttagatctagtcctgaatttgttatgccggtgatgaagtaa

SEQ ID NO: 199049 - DNA, 549 bp, Unknown
  Bacterial polypeptide expressing nucleotide sequence isolated from the Sargasso Sea
tcaaaggtgctccaaaacccatgaattatgttacttctaaaactggagatcaaatttttagaagaaaagaaagtagaggagctactgattgggacacattaaatagaattagagattcatggaaaggtaaattgataattaaaggtgtaatgaatgctgatgatgccaaaaaaattatggaatctggtgctgacgctattgaagtatctaatcatggtggtagacaattagatagtgcaacagctgcaataaatgcgcttcctttaattagaaaaagtgttggtaaagaatatccattaatttttgatagtggaattagaagtggaagtgatattttaagagctctagcatttggtgcaaactttgtaatgctaggtaggcctttaatgtatgctatcggtgctgacggagcaagaggtctgagaagaattattaacttaattaaagaagaattaagcactaatcttggcttagttggacttacaaatattaatcaagttgatgaaaaaataatagcagagaaatattttaaagatataaactattaaa

SEQ ID NO: 199050 - DNA, 282 bp, Unknown
  Bacterial polypeptide expressing nucleotide sequence isolated from the Sargasso Sea
tcccaaacttaaaaccagcctctggaaccgttttcaacaccagcttgatggattggcttgatctgaggaatagtcttttgtgcgctgaggccatctgccttgcagccaacgagcgcaaagaaagtagaggcgcgcatcagatggaagacataccttttaaatccgacaaatttataaagaatcaaataatatcaatgattgacgggaatcttgtgtcgcgctggcaagatgtacaaaaattggaatttgatcttcaaaaaaagcgtttggcaaaagtatgaa

SEQ ID NO: 199051 - DNA, 905 bp, Unknown
  Bacterial polypeptide expressing nucleotide sequence isolated from the Sargasso Sea
ctggaattctcaaatgtttttaactgcaacaaaagttgctcctgctttagctatgggtaatacagttgtaattaaatgttctgaattagcgccagcaactatgtttgagtttgcaaagttagttgaagaaactggaataccaaaaggtgtaataaatatagtttctggttttggtgatccatgtggtaaagctttaactactcacaacttagttgagaaagtagcttttacaggaggtcctgaaactgcaagacatataattagaaattctgcagaaaatttatctgaagtaagtttagagttaggtggaaaaagtcctgtagctgtttttgatgatgctaaacaagaaaatgcaattaatggaataactgctggaatattcggagcaagtggtcaaagttgtatagcaggttcaaggttgtatttacaaaaaggaatttataatgagtttctagataaattagcatcaagggcagaaaaaattaaaataggtgcgcctatggactctgatactgaaatgggtcccttaagtaacttcaaacaattagaagtaatagaaaaaaatattaaattaacagttgaacaaggtggaaaaattaaatgtggaggtaaaagacatcctttttcaaatgaggggtattattttcccccaacaattattgagtgtgaaaatcataatttaccagctgctgaaaatgaactttttggacctgttttatcagtcatgaaatttaatactgaaaaagaagtaatagaattaatgaatgacaaccaatatggactttcatcgggtgtttacactagtgatcttgcaagaggaatgagggtatctaatgctatccgagcaggaataacatttgtaaatacttatagattaatttctccttcagctccatttggaggta

SEQ ID NO: 199052 - DNA, 460 bp, Unknown
  Bacterial polypeptide expressing nucleotide sequence isolated from the Sargasso Sea
tatggagcttggactgaataataaggtagttttgattaccggtggagccagaggaattggggcagcaacagtccgagcttttctaaatgaaaatagcaatgtaatctttgcagaccgagattttgagtctggagaaaaactggctaaatcaataggacccaatgtaaagtttatagaagctgaacttaacactatagaatcatgccgaaagaccgttgaaaagacagtatcattttttggaggaatagatgttcttgtaaataatgcaggatttaacgatggtcttggcttagaaaccccacctgaagaattcatgaattctgttcgttcaaatctattgcatgtttatgccattactcattattccctgcctcaactccgaagaagtaagggatgtattgtgaaccttggctcaaaagtatctgaaacaggtcagggtaatacctctgcctatgctgct

SEQ ID NO: 199053 - DNA, 538 bp, Unknown
  Bacterial polypeptide expressing nucleotide sequence isolated from the Sargasso Sea
gatgggccctttagttaccaaagaacatttagaaaaagtaaaaggctatgtagatctaggagttaaagagggagcaaaacttgttcttgatggaagaaatttgaaattgcagggctatgaaaatggtttttatattggtgggtgtctttttgatcatgtgactacagatatgagaatttataaagaggaaatatttggaccagttttatctgttgttagggtaaaaacatttgaagaggctacaaaaatgattaatgagcacgaatacggaaatggagttagcatttatactagagatggagatgcaggtagaacattcgcgagtaaaattcaagttggaatggtagggataaatgttccaataccagttccaatggctttccatagttttggaggctggaaaaggtcattatttggagatagtggaacgcatggtatggaaggtgtaaaattttatactaaattaaaaactattacttctagatggccatcaggaattagatctaatcctgaatttattatgccaacaatgaaataa

SEQ ID NO: 199054 - DNA, 612 bp, Unknown
  Bacterial polypeptide expressing nucleotide sequence isolated from the Sargasso Sea
agcccctgaacctgagcacctgcgcgtgcatcttagcaggacataaggacgacgtaaggccctacacgcccatttccacgaacgcgatgattggtagttttgaattactggtccgagcgtacccggacggtgccctaagccagcgcctggcgacgatggaactcgacgaggcgatggccttcaagcacataaaatttaatgtcaaaacccaataccccttctccgcgaagaaggtcggcatgctcgctggagggaccgggataacacctatgttgcaagcgctgcacgctatactaggtgcaccggacgatgagacggaagtcagtttggtctacggctcgaagacttccgagggaatactagctcgcgatacattacacgactgggaggccgagcatttttggaggttcaaagtcacgcatgtgctgggcggttttatcggcgaggaccatgtccggaggcacctgccgtctccctcagaggactgcgtgctcttcgtctgcggtcccgacctcatgtacaacgcgttgtgcgggccccgcggggaccccgaggtgacgggcctgctgaagaagctcggctacgcgaagagccaggtctataagttctagt

SEQ ID NO: 199055 - DNA, 667 bp, Unknown
  Bacterial polypeptide expressing nucleotide sequence isolated from the Sargasso Sea
tatgggaagtagattagaaaataaagttgcaatagttacaggaggagcttcaggaattggagaagcgatttccaaaatgttttttgatgaaggttcttgtgtttgtattattgataccaataatgaaaaattgagactattagaagaaaaaatatcttcaaaagaaaaaattattataaaaaactttgatgtttctgatgaaaaaagctggaaagaatgtgtagatactatcttgaaaaaatggggtaagatagacattttggtaaataatgctggaatgtcactaaggtctacttttgaggatatggaaagatcagattgggatagagtttttgctgtaaattcaacatctgtgatgatagggaccaaaagtgttatttctaacatgaaaaaaaacgaatcaggttcaataatcaatatttcatcaatttttgggattataggaagtgcaagaggatctaccgcttatcatgcttcaaaaggtgcatcaaggatttttacaaaaacaatagctgctcaatacggtaagtataatgttagatctaattctattcatcctggatttacagatactcctatgacagaagatatacattcaatagaacagattcgtaatgaacgattagatatgactcctatgggaagattaggaacgcctgaggatatg

SEQ ID NO: 199056 - DNA, 443 bp, Unknown
  Bacterial polypeptide expressing nucleotide sequence isolated from the Sargasso Sea
cagcggcccgatgggcagcttctacctgcgcaacggggaacgcccgctgctgatgctggcgggcggaaccgggctggcgccgctgctgtcgatgctgcacacccttgcccggcagggcagcacccggccgatcacgctgctctacggcgtcacccgcgatggcgatctggtgaaaaccgaggcgctggatgcgtttgtcggccagctttccgactatcgctggctgccggtggtcgccgatgaacagagcgcctgcccgcagcgcgggtttgtcaccgggcatcttgatgaggcgatgcttaacgatggcgatgtcgacatctatctgtgcggcccaccgccgatggtcaacgcggtctccggcgcgcttcgcgagcggggaattaacccggcaggtttctggtacgaaaaatttctcgccagccagagtgcggcggcataag

SEQ ID NO: 199057 - DNA, 213 bp, Unknown
  Bacterial polypeptide expressing nucleotide sequence isolated from the Sargasso Sea
caataaagggcacatggccaaaccaacaacttttacagacgttaacaacgatatgaaaattgctagagaagaaatatttggtccggtgctgtcaattattccatttgatacagaagaagaggcaattaaaatcacaaatgatacatcttacggattaggtaactatttacaaactgaagataaggaaaaagcaaaaagagtagcaagaaaagt

SEQ ID NO: 199058 - DNA, 412 bp, Unknown
  Bacterial polypeptide expressing nucleotide sequence isolated from the Sargasso Sea
cttgaatcaattagttacattaagtcttgaaaacaatgaatttgaaaaaggaaattttgttcccccttcactttttggcaatgttcaaccggaccatgttttagctcaagaagagatttttggtcctgtccaagttataattccatttaaagatgaggaagaagctataagaattgcaaatggaacaaaatttggtctcgtggctggtatttggacaaaagatggatctcgtcaaatgcggatggcaaaacaattaaaagctggccaagtttttgtaaataattatggtgcaggaggtggtgttgaattgccatttggtggagttggtcattctggttttggaagagagaaaggttttgaggctttaaaaggtttttcggtcatcaaaacagttgcagtgaatcatgggtga

SEQ ID NO: 199059 - DNA, 722 bp, Unknown
  Bacterial polypeptide expressing nucleotide sequence isolated from the Sargasso Sea
tatgagcgaagtttctggaaaagttgtcatcattacaggtgcaagtagcgggcttggagaagcaacggcgaaaatgcttgcggataaaggtgctaaattagtgttgggagcccgccgtgaagaccgtcttaaaaaacttgtagatgaaattgaatcttcaggtggccaagctacttatcaaacggtagatgtcacgaaaaaggatgaagtcaaggcgcttgcgaaagcggccatagatgcctatgggcgtattgacgtgctcgtcaacaatgctggtcttatgccactcgctccgcttgacgagatgaaagttgacgagtgggatcagatgatagatgtaaacataaaaggcgttatgtatggagtagcagctgtattaggacaaatgcgagagcaaaaaagcgggcatattatcaatctttcctctgtggcaggtcatgttgtgttccctggagcaacggtttattgcgcaactaaattcgctgtaaaagcaataagtgaaggcattcgtagagagtcaaatggtgaaattcgctctaccaacatctcacctggtgcagtggcgacagaacttactgaccacatttctcacaaagactcaaagcaaatggcagatgatatgtatgacgatgctatcgatgcagatgctattgcacgtgcagtaacgtttgccatagagcagcctggcgacgtagacataaacgaaatgatcatcagaccta

SEQ ID NO: 199060 - DNA, 940 bp, Unknown
  Bacterial polypeptide expressing nucleotide sequence isolated from the Sargasso Sea
agcatgtggaaatacttttatattaaaaccatcagaaaaagatccatcttgctcaattagattagctgaatattttacagaagctggtttgccagatggagttctaaatgtagtaaatggggataaagaagtcgtagatgcaatattgacgaataaagatattcaggctgtcagttttgtaggatcaactccaattgcaaaatatatttatgaaactgcagcaaaaaatgaaaaaagagttcaagcgcttggtggggctaaaaaccattgtgttgtaatgccagattgtgatttagatcaagctgtaaatggtttaatgggagcagcgtatggttctgcaggagaaagatgtatggctcaatcagttgccgttgcagtcggaaatattggggacaaacttgttaatgaattagcaaaaaaagttgaggcattaaaagttggcccgggtatggataaaaactcagagatgggtcctttgattacgaaagaacatctagaaaaagttaagggctatgttgatttaggcgtaaaagaaggagccaatttagttgttgacggtagaaatattaaacttcagggttacgagagtggtttttatataggtggatgtttatttgataatgtaaaaaaagatatgagaatttataaagaagaaatatttggaccagttttgtcggttgtaagagctaaagattttgatgaagctacacaattaattaatgaacatgaatttggaaatggaacaagtatttatacaagagatggagacgtaggaagaacgtttgcaagtaaaataaaagttggcatggttggaattaatatacctatacctgtgccagttgcttttcatagttttggtggatggaaaagatctttgtttggagatcaacatatgcatggtcctgagggagtaagattttatacaaaattaaaaacaata

SEQ ID NO: 199061 - DNA, 601 bp, Unknown
  Bacterial polypeptide expressing nucleotide sequence isolated from the Sargasso Sea
atgtatttaaaaaaaataaatcttaaaaaaaaatatgcattagttacaggtgccgggaaaggattgggaagagcttgttcaatagctttagctgaagcgggagcaacagttataggtttaagtagaactcaatctgatctagataagttacaaaaagatatcaagaaagttaaaggaaaattaattaaaattaactgtgatgtaatgaactataatgatcttaagattaagattgaaaaaataaaaactattgatgttctggttaataatgctggaacaaatattcctgaaccttttgaaaaaatacagcaaaaaagtatgaattacatagttgatttgaatttaaaagctgcatttaatgttgctcaactagttgtgaaaaaaatgttaaaaaataaaaaaataggtggatcaataattaatatgtcatcacaacttggtcatgtaggcatgactggaagaaatgtttataatatgactaaatttggtattgaaggtttaactaaaggtatgggtgttgagctagcatcaagaagtataagagtaaattctgtagcaccaacttttgttgaaactcccaatggtaaagagattttttaaa

SEQ ID NO: 199062 - DNA, 793 bp, Unknown
  Bacterial polypeptide expressing nucleotide sequence isolated from the Sargasso Sea
cctgatcaagaagaaagattcaaagctcattattattgccgttgctagtcctctacaatacagaacaggtcacattcctggttcacatcaaatttggagaggcgactatacagggaaaagtagtgaaggatttggtgggatgctcgcaagtaaagacaccttccaaaaattaatgaggtctttaggtgttaataataatagtaaagttgttctttatgatcacaagtatgactctacaagagtttggtgggcattttttaaaaacggaaaaaaagatatcagaattcttgacggagggattgctggttggaaagcatctggtggtaaaacaaatatccttgcccctagtaagccaaaagctggaaacttcacagcgaaatttgactctaagatgatgatggcgacgatgaaagatgttcaaacagctaggaaaaacgcttctaagtaccaaatttgggacacaagagaaacaaaagaatggaccggagagcaattaaaaaaaggtgcttatagaaaagggagaattcctggtgctgaatttatgaattggcaaaaatttagagataaaaagaccggtgagttttatgatgccaaaagaataaaaaaagttattgctgaaatgggtattgatagaaataaaaagcacattttttattgtcaatcaggtgttagaacaactgttgaaatgttctcactctatttaatgggatggcctgaagagaaccttttaaattatgatgggtcttggattgagtggagctttcataagaagaatccagtcaccaaagactag

SEQ ID NO: 199063 - DNA, 750 bp, Unknown
  Bacterial polypeptide expressing nucleotide sequence isolated from the Sargasso Sea
tgaatgcaatggttatcgactcatcagcactatttgaacaagcttgtgatgatgtgattagatcggcttttatgtctgcaggtcaaagatgctcagcattaagaattgccttgattcatgaagatatttatcaagattttaaagctatgcttgctggagcaatagatgatcttgtagttggtaatccaaaagagactcgaacagacgtagggccaataataagtgttgatgcagcaaataagattaaagcttatgttgatctaaagaggtctgagggattcaaaattttttgtgccaatgaaaacaacgctcatactgatcagtttattcagcctacatttattgagatgtcatcactttcagatataaatgaggaaatctttgggcctgtattacacctagtttcatttcaagaaaaaaatctagaaattgtcttacaagaattgaaatctaagggttttggattaacatttggaattcattctagaattgagagtaaagcgacaaagatgagtaagttggtaagctcgggtaatagttatattaatagagatatgattggagctgttgttgggactcagccattcggtggctctggcttatctggaacaggtcataaaactggtggtccaaattatttaatccaatttgtaaatgaaaaattagtgtcgattaatactgtagctataggaggaaacgcagagctacttaatctagaaactgaaaatggcaattctcaaggaacttaag

SEQ ID NO: 199064 - DNA, 760 bp, Unknown
  Bacterial polypeptide expressing nucleotide sequence isolated from the Sargasso Sea
atgtatcttcaaaaaataaatctaaaaaagaaatatgctttagttacaggtgcaggtaaaggactaggaagagcatgttcaattgcattagctgaagcaggcgcaaccgttattgctttaagcagaacatcttcggatcttaataaattagaaaaggatataaaaaaagttaaaggtaaaattattaaggtttcatgcgatgtaatgaattatgaagatttaaaacataaattagacaaaattaaaattattgatgtgttagtaaataatgctggaactaatattccagaaccctttgaaaaaattaaacaaaaaagcatgaattatcttgtagatttaaatcttaaggcagcatttaacgtagcacaaattgttgtaaaaaagatgctcaaaaacaaaaaaagacctggttcaattataaatatgtcatctcaacttggacatgtaggtatgggaggtagaaatgtttacaacatgacaaaatttgggattgaaggattgactaaaggaatgggagtagagttagctaaaaaaaatattagagttaatacagtagcccctacttttgttgaaacaccaatggttaaaaatttttttaaaaataaaaaatttaaaaagttagcccttggaaatattcctatgggaaaagcagctactgaaagtgatgttgctacaacagtttgctttttagcatcctcagcatcttcaatgataactggaacatcaataattatagatggtggatggacagctcaataat

SEQ ID NO: 199065 - DNA, 407 bp, Unknown
  Bacterial polypeptide expressing nucleotide sequence isolated from the Sargasso Sea
tagaacctcgatgcaaaaagttatgcaagaaaagtgtgctgtgtttagaactgatgaacttatttcaaaaggtattgaggaatttagtcatatagaaagatcaatggataatatagacgttaaagataaatctatgatttttaatacagacttaactgagtctctagagttacataatttaatggcacaatcaaaagttactcttcactcagccctaaacagaacagaaagtaggggggcacacgcaagagaagattaccatgaaagggatgattcaaactggttggttcattctttatcatggttggacagcaagggtgatattaaaatgggaacacgtcctgtacacatgaatactcttactaatcatatacagcccattcctccaaaaaaaagagtatactaaa

SEQ ID NO: 199066 - DNA, 472 bp, Unknown
  Bacterial polypeptide expressing nucleotide sequence isolated from the Sargasso Sea
atgtatcttcaaaaaataaatcttaaaaacaaatatgctttagttactggtgcaggcaaaggacttggaagggcatgttctatcgcattatctgaggcaggtgcaactgttatagctttaagtagaacatcttcagatcttaataaattagaaaaggatataaaaaaagttaaaggtaaaattattaagatatcatgcgatgtaatgaactatgaagatttaaaacaaaaattagataaaattaaaattattgatgtgttagttaataatgctggaaccaacattccagaaccctttgaaaaaattaaacaaaaaagcatgaattatcttgtagatttaaatctaaaggcagcatttaacgtagcacaacttgttgtaaaaaaaatgctaaaaaataaaaaaagacctggttcaattataaatatgtcatcacagctcggtcatgtgggtatgggtggaagaaatggtatat

SEQ ID NO: 199067 - DNA, 786 bp, Unknown
  Bacterial polypeptide expressing nucleotide sequence isolated from the Sargasso Sea
aatggaaataattcctctaattcttttattattgatttgttctgccttactaattggctatccagtagcgctaacattagcaggagtctcaatcttatttgctttaatttgtgttccttttgaaatttttgatccaacaatttttaaaagtatccccataagaatctttgggatcatgaataatatgactcttcttgcggttccactatttatttttatgggaactattcttgaaagatcaggggtggctgcaaaaatgcttgaaaacatggcaacagcatttaaaagtattaaaggaggcttatctatttcaataattattgttggtgcattgcttgctgcaagcacaggaattgttggagctacggttgtaaccatgggtcttatgtcactaccaataatgataaatcaaggatatgaaaaaagcttttcagctggattagtagcttcgacaggaactttaggtcagattattccaccatcaattgctctcgttttattgggggatgtcatgtctaatgcttatcaaagagctcaaaatgacatgggtatattttcccaacaaactgttactgttggtgatctttttgtcggtgcaattattccaggagtattgatatgtattggatatctaatttatacaatgtataaaaatagaaataataagaatcttaaaatttacaataataatgctcgaataaatcaagttgaagttataaaaacactagctatgccagtaactttaatctttctcgtacttggatcaatttttgcagggattgcaac

SEQ ID NO: 199068 - DNA, 681 bp, Unknown
  Bacterial polypeptide expressing nucleotide sequence isolated from the Sargasso Sea
aatgaagaagaagctttcaataacaagaagggatttcataaacggtgtcagctatggtttagcagcatcagttgcaccgattgattttttgaaagcaaagaatattgatccttttaagtatccacctgcgttaacaggaatcagaggcaatcaccctggttcttttgatcatgctcataggcttgcattggccggaggaaattttcttgaagagatcatagatcttggtgagagcaatgatttaattgttgtaggaggaggcatatcgggtttgtcagcagcatatttttatcaagagcgcactgcttcaaatcaaaacatactcatacttgataatcacgatgactttggcgggcatgcaaagcgcaatgaatttcaagtcgatggaagagaaatgttaacttatggcggcagccagtccatagagtcaccgagttattatgaagaggtatcaaagaagttgatggcggacctcgggattgattttcaaaaattttatagagcttatgattttgactacttcaaaagcagagggcttacttcttcgttcttttttaataaagaaacctacggtgagaataaaatcgtccgcaaatgttccaactataggtatgacataaatcataagaacaacacaaaaccagaaaatataaaaaaagttgtgaaagagatgccgatctc

SEQ ID NO: 199069 - DNA, 733 bp, Unknown
  Bacterial polypeptide expressing nucleotide sequence isolated from the Sargasso Sea
ggtaaagcaacggcgcttgccttcgccgatttaggcgcaaacatagccgtatgcgacatgctcgacgatgaactggccgaaacagaagccgaaatcgaggcgcgcggcgtcacggtacttgctgagtcgtttgatgttcgtgacgctgaacgcgttgacgcgttcatggcccgcgcccacgccgagatgggtccggtcgatgtgctggtcaataacgctggcggcgggttctgggcgccctttaccgacgtttccgcaaaaggtgaacaagcgctggtcagcgaaaacttttccacggtcaccaactgtgttcgtgccgtcacgccgctgatggctgacggcgggtcgatcattaacgtcacatctgtcgaggcctaccacgctgcccctggtttcgccgtgtatgcggcgatgaaagccgccgtccagcaattcacccaatcgctcgccgtggaactcggcgctcgatccatcagggtcaattgtgtcgcccccgacatgatcccaacccccggagacgctgatctcgctgaagattctggcgctctcatctccggcctgcaacccactccgctggggcgcacaggcacacccgaggaatgcgccgctgtcatcgtgttcctcgcatcggatctggcaagtttcgtgactggttcaaccattcctgtcgatgggggaacagtcgccgccggttcatggaaggtacgcgacgacggcacgtggggaatgtagc

SEQ ID NO: 199070 - DNA, 712 bp, Unknown
  Bacterial polypeptide expressing nucleotide sequence isolated from the Sargasso Sea
gatgaaatccatttttgactcgatcactttaggtaaaaataccctacaaaacgcacttgttatggcgccaatgacccgttcaagggccaatcgggatggtactcccggtgcattagcagccgactattacagtcaacgcgcaagtctgggcttaattgtcaccgaaggcatacaaccatcagacgacgggcaaggctatatctttacgccagggatttacacccaagcccatatcgacggctggaagccggtcacgcaagcggtgcatgcaaaaggcggacgtatttttttccagctgatgcatgctggccgaatgtctcatccagacaatacaccgcatcaccgggctggtttggccccttcagccatagctccaggtacgcaaatgtttaccttgaaaggcatgctggacattccggtgcccgaggccatgactcaggtgcaaattaagcaagccattggcgaattcagacatgccgcacgcagtgccattgaagcgggcgccgatggtgtcgaaattcacggtgcgaacgcttacctcatccaacagtttcttgccccaagctcaaatactcgtacggatgaatatggtggttctatagagaacagagctcgctttgctatcgaaattgctaaggctgtcgccgaagaaatcggtgcagaaagaacagctatccgcttgtcaccgggcacaaaatttgtggggcattga

SEQ ID NO: 199071 - DNA, 804 bp, Unknown
  Bacterial polypeptide expressing nucleotide sequence isolated from the Sargasso Sea
atattcttttcagtcttgtttttgtagtttattttaatttaaatgttcaaggagttgcgcttggcaccttagtgtcttcaactcttacatctataatttttctattttttactgtctttgaatttaaaaaaattaaaaatttagagtttaattataaaaaaatttttaattttaataaaataaaaaatatatttaatattaatttaaatatttttattagatcaatacttcttacgttttcttttttattttttacctatcttggtaactctattagtgaagatgttgtagcggccaatactatattaatcaatctcatcatgctttcagcttttattcttgatgcctatgcattttcaacagaagggcttgtgggttattcaattggatctaaaaataaaaaattattaaaagaaattatcaaaaactcttttattctgagtagctctacagggctaataatttcatttgggtattttttaggcaaaaatcattttatagaaataatgactgacttagagagcatcaagaatatttgtttatcatattcggtatggatagtaataattccttttatttcttctttttgttaccaatttgatggaatttttgttggcgcatctaaaacaaaagaacttcgaaatgctatgattatgtctgttagtatttatttattaacagctttatttttagttaatttttttggcaatttaggtttgtggatatcattaagtattttttttattttaagagggttaactttatttttatatcttggaagaatttacaaaagatttaaataaa

SEQ ID NO: 199072 - DNA, 351 bp, Unknown
  Bacterial polypeptide expressing nucleotide sequence isolated from the Sargasso Sea
attatcatcctactgttatagctaattgcaaacaagatatgagaatcatacaagaagaaatctttggccccgtattacctttagttgaatttgaagatttagaccaagcgattgaatatgcaaatgattctgattatggccttacttcttctatttttactaataatttaaaaactgctttaaaagcttgtaatgaaatacggtttggagaaactatgataaacagagataacatggaaatcttccaatcttttcatgcaggattaagaaagtctggcattggcggtgcagatggtaagcatggattatatgaatatatgcaaacacatgcagtatatatgagagcatagt

SEQ ID NO: 199073 - DNA, 475 bp, Unknown
  Bacterial polypeptide expressing nucleotide sequence isolated from the Sargasso Sea
atgtccagagtaataattcatccaaaagttaaagatgaatacatgacaaaattgtatgaaaaaacaaaagaattaagaattggaccaggaaataatgaaaatacagaagtcacccccttgatttcaaaagaacaacttcaaagagtttcaaattattgtaattctggggttcagtcaggtgctagcttagttactggtggtgaaaagcatgactctggaaaagggaatttttttaaacccactatttttgataatgttgatccaaaatcaactattgctcaagaagaaatttttggcccagttacaagtattattaactttgaaaatgaagaagaggcgataagaatagctaattcaactgattacggattggcctcaggagtttttacatctgatgatcaaaaagctaaatggactgctgaaagaatagaagcaggtgttatatggcataatgattggtttgtagatggagtta

SEQ ID NO: 199074 - DNA, 668 bp, Unknown
  Bacterial polypeptide expressing nucleotide sequence isolated from the Sargasso Sea
tatgccagattgtgatttggatggtgcagtaaatggcttgatgggtgcagcttatggatctgcaggtgaaagatgtatggctcaatccgttgctgttgctgtaggagatattggtgatgaactggtttcaagactttctaaaaaagcagaagccttaaaggtaggacctggtatggataaaacttcagagatgggacctctagttacaaaagagcatttagaaaaagtaaaaagttatgttgatttaggagttgaagagggagcaaaattagttgttgatggaagaaacttaaagctccaaggttatgaaaatggattttatattggtggttgtttatttgatcacgttaataaagacatgagaatttataaagaagaaatttttggtcctgttctatctgtagttagagttaaaacttttgaagaagctgcaaaactaatcaatgatcatgaatacggaaatggagtaagcatttatactagagatggtgatgcaggcagaacatttgctagtaaaattcaagtaggaatggttggtattaatgttccaatcccagttcctatggcctttcatagttttggtggctggaaaagatcattatttggagatagcggcatgcatgggatggaaggaataaaattctatactaaacttaaaacagtaacat

SEQ ID NO: 199075 - DNA, 457 bp, Unknown
  Bacterial polypeptide expressing nucleotide sequence isolated from the Sargasso Sea
agataaagctctccataacctaaatatattaaatgaatcttcatcaggtcatgaagtttcaacagtaaaaaaagaactgcaagaagttatgcaaaattactttggtgtttttagaagaggcgattatatggaaaaaggtgttgctgccttaaatgatatacgtgaaaagattgagaatcttcatttaatagataaaagtgctgcattcaatacaaatagagtagaagctatagaactgcaaaacttattcgaggttgctgaggcaactgctatttcctctcttcaaagaactgaaagtagaggagcgcatgctagagaggattatcctaatcgagacgatgaaaattggttatgccattcgttatatgatccgataacaaaaactttaggtaaaagacatgttaattttgagccttctcaagttgaagcatttccaccaaaagtaagaacttattaa

SEQ ID NO: 199076 - DNA, 898 bp, Unknown
  Bacterial polypeptide expressing nucleotide sequence isolated from the Sargasso Sea
gctgcgtcattagctgctggtaattgtttagtaattaaacctgcagaagaagcttgccttactgttttaaagattgcctcttatgcgcttgaagttggacttccgcctgatgtgattaacatagttacaggttatggtgaagatataggtccttctttatgcaagcataatgatatagatcatatttgttttacaggttcaccagaagtaggttctatagttcaacaaaatgcatctttatcaaataaaagttgcacaatggagttaggaggaaaatcacctcaaattgttttttcagattgtaatattgaaaatgcaatcccaataatattgaattctataactcaaaactctgggcaaacatgttctgctggaagtagacttttaattgaaaaaagtatttatgaaaaatttttcaatatctttattggtaagttttctaatttactagttggttcagcagaaatggatttagatttaggtcctttaattagtttgaaacaaaaaaatagagttcttagtttttatgaaaatgctgatcaagatggaatttctattctagcaaaaggctcaatatctgataatgtttcaaaaactggtttttttgtatctccaattttgttaggtcctgtcccaacagataatactttagctaaagaagagatctttgggccatgtctgagcgttattcctttctctaatgaaaatgaagctataagtatagctaatggaacacaatatggattaactgcaggtatttggactaatgatggctctaaacaattaagagtggcaaatgctttaaaatgcggccaagtttttatcaattgttatggagcaggtggtggtgttgaacttccatttggaggtatgaaaaaatcaggatttggtagagaga

SEQ ID NO: 199077 - DNA, 571 bp, Unknown
  Bacterial polypeptide expressing nucleotide sequence isolated from the Sargasso Sea
aaagttggaccaggaatggacaaaaattctgaaatgggccctctagtcaccaaagaacatttagaaaaagtaaaaagttacgttgatttaggtgtaaaagaaggtgcgaaattagttgttgatggaagaaatttaaatttacaaggatacgaaaagggtttttacattggtggttgtttatttgataatgtgacaaaagatatgagaatttataaagaagaaatatttggcccagttctatcagttgttagagttaaaacttttgaggaagcttcaaaattaataaacgagcatgaatatggaaatggtgtaagtatttatacaagagatggagatgctggaagaacatttgcgagcaaaattcaagttggaatggttggtataaatgtgcccatacctgtaccaatggcttttcatagttttggtggctggaaaagatccttgtttggagatagtgcaatgcatggcacggaaggaataaaattttataccaaattaaaaacaataacttcaagatggccctcaggaattagatctaacgctgaatttgtgatgccaacgatgaaataaa

SEQ ID NO: 199078 - DNA, 493 bp, Unknown
  Bacterial polypeptide expressing nucleotide sequence isolated from the Sargasso Sea
gaaaaaatttcaaattcagaaacagataaatgtttagacagatttgaaaaattaagaaatggcaatggatcaaacagaacagctgatttgagattagctatgcaaaaaactatgcagtcaaaatgtgcagtatttagaactgaaaaaactttaaaagaaggagtaaaagaaataagaaaaccatttgaaggaatggattcaatatcagtaaaagataagtctttaatttttaataccgacttagttgaaactttagaatttgataacttaataagacaggcaatagttacaatagactctgcatacgaaagaaaggaaagcagaggagctcatgcaagagaagattatcctaaaagagacgataataactttatgaaacatacattatcttggtgcaaagatagtaaaacaaaaatttcttatagagatgtgcatagatcaacattaacaaatgatgtacaatattttccacctcaagaaagagtttattaat

SEQ ID NO: 199079 - DNA, 706 bp, Unknown
  Bacterial polypeptide expressing nucleotide sequence isolated from the Sargasso Sea
agttgaaaaaactggaatacctaaaggtgttattaatataatcaccggtttaggagagccttgtggtaaatcactaactactcacaatcttgtagaaagaattgcttttactggtggacctgaaaccgctaaacacattgtaaaaaattctgcagaaaatttatcacaagttagtttagaacttggaggaaaaagccctgtagctgttttcaatgatgctgatcaagaaaatgctttaaatggtattactgctggaatatttggagctagtggacaaagctgtatcgctggatcaaggctttatttgcaatcaaaaatttatgatgaatttttaaataaattaatcggtaaagcagaaaaaataaaattaggagctccaatggaagaaagtacacaaatgggtcctcttaatagtttaaagcaattagaaaatatagaaaaaaatattaaagcaactatagagcaaggtggaaaaataagatgtggtggaaaaagatcttctatttcaaataaaggttattactttccagcaactataattgaatgtgaaaatcataacttaccggtagctgaaaatgaattatttggtccaattttatcagtaatgaaatttgataatgaagatgaagtaataaaaaagatgaatgataataaatatggattatcatctggtgtttatacatcgaactttgctagaggattaaga

SEQ ID NO: 199080 - DNA, 767 bp, Unknown
  Bacterial polypeptide expressing nucleotide sequence isolated from the Sargasso Sea
aatgcatgttggaggcgaagaaattcttgctaaagcaggtgacaccatcgtggtgggaaaccctgctttccgtgggctcccacttgccttagtgccaaggtcatatcaagaagatgtagaccatgcggttcatgtcgcacaggacgccttccagagttggaggaaagtagctcctcgtgaaagaggacgtattatgcttcgcattgcagatgctctggaatctgctgctgaggaaatagctattctgatttctacagaaaccggtaatgcattagcaccgcaatcaagacctgaagctaacactaccgccgaggttttccgttattttggaggagttgcaaacgagcttaaaggagagacaattcccctaggggaaaatctccttgtctacaacaggcgtgaacccattggcgttgttggcggaattattccctggaattcaccagttctattaggcgcattgaaaatcgccatggcaattactgccggaaacactttagtcctcaaggctgcggaagatgcacctcttgcagttctcaaaatgtccgaaatttgtaacaattttttgcctgcaggtgttttgaatgttctcactggctatggtgaagaggccggcgcagcactagcagctcacccattagtaagaaagctttcgttcacaggatcaactgacgtcgggaaattaattatgcatgcagcggcagacagaattgttccggtctctcttgagcttggaggtaaaagccctgttgtcgtgtaccctgact

SEQ ID NO: 199081 - DNA, 373 bp, Unknown
  Bacterial polypeptide expressing nucleotide sequence isolated from the Sargasso Sea
gatgtctgatcgattacaaaaaaagatcgcaatgatcacagggggtgcctcgggtatcggcgaggggatggtcaggcgtttctgcgctgaggatgccaaagtcatcattgccgacgtcgatgaggccaatggatctcgcatagcggctgagtgcggcgctgatttcgcgctgctggatgtcagttcggctgatagctggcagttgcttgagaagaagattcggggtgacgaggggcggctcgatattctcgtgaataacgctggtgtcgtgactggtctggatatcaccgccgtcacggttgatgcttggcagcagctcatgagcattaaccttttgggcatgatgctgggctgccagaccgccatatcgctg

SEQ ID NO: 199082 - DNA, 742 bp, Unknown
  Bacterial polypeptide expressing nucleotide sequence isolated from the Sargasso Sea
catgacccttcgcatcgcgtacgtgaccagtggcatgggcagcgtcggcaccgccatctgccagaagctcgcccgcaacggccacaccgtggtggccggctgcgccccgaactcgcctcgcaagtcggcctggctgcgcgagcagcgtgagctgggctttgatttcatcgcctccgagggcgacgccaccgactgggcgtcgaccgtggccgccttcgccaaggtcaaggccgaagtcggcgagatcgatgtgctggtcaacaacgccggcggcagccgcgacgtcctgttccggcagatgacccaggacgactggaacgcggtgatgggctccaacctgcacgcgctgttcaacatcaccaagcaggtgatcgacggcatgagcacgcggggctggggacgcatcgtcaacatcggctcggtgagcgcgcacaagggccagatcggccaggtcaacttcgctaccgccaaggccgccatgcatggcttcagccgcgcgctggccaacgaagtggctacccgcggcgtcaccgtcaacaccatttcgccgggctacatcgccagccaggccatcagcagcttcccgccggacgtgctggaccggctggcggcgtccgtgccgatccgccgcctcggcaagccggaggaagtggccagcctgtgcgcgtggctggcctcggatgacgcggcgtatgtgaccggcgccgactatgccgtcaacggcggcctgcacatgttctga

SEQ ID NO: 199083 - DNA, 594 bp, Unknown
  Bacterial polypeptide expressing nucleotide sequence isolated from the Sargasso Sea
ccagggaaagagcaaaatatgttagaaagatcggagaaaagctaagagaaaatgcagagcttctaggaaaaattgaaacaatagatactggcaagctttttagagaaactaataaacaagcaaattatatagctgagtattatgactattatgctgacttagcagacaaagttgagggaacagttttaccaattgataaaaaaaatattcaagcaattacaacaagaattccaattggagtcattgctgcaataattccctggaactctcaaatgtttttaacagcaacaaaaattgctccagctctggtaatgggaaacacagttgttattaaatcttcagaattagctccagcagttatgtttgaatttgcaaaattaatagaagaaactggtataccaaatggagttattaatgttattactggctatggcgagccttgtggaaaatcattaacttctcacaaccttgtagaaaaagttgcatttacaggaggtccagaaaccgcaagacaaataattcaaaattcctcaaaaaatctttctgaagtaagtttagaacttggtggtaaaagtcccagtggctgtttttgag

SEQ ID NO: 199084 - DNA, 508 bp, Unknown
  Bacterial polypeptide expressing nucleotide sequence isolated from the Sargasso Sea
aaagttgatattgcatccaaaaaaggagatcatatagggcctgtagtttcaaaaatacaatatgataagattattgatcttataaatagtggaattcaagaaggtgcaacattagttgctggaggatcagaacgtccagaagggttaaataaagggtattttattaaacccacaatatttacagatgtttcaaataacatgagaattgcaagagaagaaatttttggccctgttttatcaattataccatttgaaaatgaagatgaagctgtatcaattgtcaacaaaacatcttatggcttaggtaattatgttcaaacacaagataaagaaaaagcaagaagagttgctagaaaatttagatcaggtggtgtttatattaatggaaatagcgcagatcccggcacaccttttgggggctatagacaatctggtaatggtcgagaaggaggcaattggggtttggaggaatatttagaagttaaaacaatttgtggttggcattaat

SEQ ID NO: 199085 - DNA, 910 bp, Unknown
  Bacterial polypeptide expressing nucleotide sequence isolated from the Sargasso Sea
ctgggctgcttttaaaaaaactaaaggtggattatcaatatcaatcattgttgtgggggctctccttgctgcaagtacaggtattgttggagcaaccgtagtaaccatgggtttaatgtctttaccaatattaataaatcaaggatatgaaaagagtttctcagcgggattggttgcatcaaccggtaccctagggcaaatcatacctccttcaattgcgttggttttacttggcgatgttatgtcaaatgcttatcaaagagctcaaaatgatatgggtatattctcacaacagacggttacagtaggagatctttttataggcgcagtaatcccaggaatgatgatatgtcttgggtatcttatctatacgatttataaaaatggtaaaaataaagatttgaaagactacgccagtgaagtcccaattcaaagaattgagttattaaaaactcttgcccttccaatagtcttaatctttcttgtgcttggttctatttttgctggcattgcaacgcctacagaagcagcagcaattggagcttttggagcgatgctaattgcatttataaatggcaaaattaattttcaatttataaaggaaacctcagagaagacagcgatagtatctactatgatttttactatacttattggagcctcaattttctcattaatctttagaggtgtaggtggagacgagttgattaatctgatttttagctcgctgccaggcggccccctcacagcactaatctttgttttaatagtaattttcttattaggatttatcttagactttatagaaatctgttatgtaatagttcctttgatagccccgccacttttaatgatgggctttgatccagtttggttggctattctttttgcaattaattacaaacctctt

SEQ ID NO: 199086 - DNA, 238 bp, Unknown
  Bacterial polypeptide expressing nucleotide sequence isolated from the Sargasso Sea
agaatttgataacttaattcgacaagcaattacgactatggaatctgcctatcaaagaaaagaaagtcgcggagctcatgctagagaagattatcctaagcgagacgataataattttatgaaacatactctaagctggcatgaaggaaaaaagactaggattaactatcgaccagtgaaactatcgacactaactaatgatgttcaaacttttcctccaaaagaaagagtttattaa

SEQ ID NO: 199087 - DNA, 436 bp, Unknown
  Bacterial polypeptide expressing nucleotide sequence isolated from the Sargasso Sea
ggaaatggaacacaggatattttttatgaaaatgaaaatgttctttttatatcaacacaccaatatccttactacccaggaactggttcagaacaagaaagaggtaaatttaacaatatctttaatatacctttgccagctggcacaagttcagaagaatatttaaacgtatttgaacgtgtattaaaaaaattagaagagtttagaccagagtttatattgattagcgctggttttgatgctcatgaaaatgaccctctcgctcaatttaatttaaaaacagaggattattttactattactaaaagagtattagagacttctaaaaagttttgtaatggaaaagttgtttcaattttagagggcggttatgacctaaatgcacttcgagacagtactaaaagacacgttgatgctcttttagaatttaattgat

SEQ ID NO: 199088 - DNA, 418 bp, Unknown
  Bacterial polypeptide expressing nucleotide sequence isolated from the Sargasso Sea
agtacagctgaattaagactttctatgcaaaaaactatgcaatccaagtgtgctgtatttagaactgagaaaactcttaaagaaggtgttgatgaaatcagaaaaccttatgagggaatgatcgacctatcagttaaagataaatctttaatatttaacactgatttagttgaaactttagaatttgataatctaataagacaagcaataacaaccatggactctgcttatcatagaaaagaaagtagaggagctcatgcaagagaagattatccaaaaagagacgatagtaaatatatgcaacacactttatcttggtgtgatggaactaaaacaaaaattgattatagaccagtgcatagatcaacattaactaacgatgttcagtattttccaccccaagagagagtatactaat

SEQ ID NO: 199089 - DNA, 637 bp, Unknown
  Bacterial polypeptide expressing nucleotide sequence isolated from the Sargasso Sea
aaaaatggtttctcttatccttttaagataggtccaaaacaattttttgattttgcaactcatccaacttggtctttatcaactttgatgagtggaattcctaagcctatgaattatgtaacgtcaaaaattggagatggaatttttaaaagaaaagaaagtagaggttctactgattggaatacactaaaaagagtaagagataaatggaaaggcaaacttattgttaaaggagtaatgtctcctgatgacgcaataaaaataaaagaagctggtgcggatgcaattcaagtttcaaatcatggcggtagacaattagacagtgcttcagcagcaataaatatgcttccattgattcgaaaatcagttggaagtaattttcctttaatctttgatagtgggataagaagtggaagcgatatagtaagagcgcttgcatttggtgcagattatgcaatgattggaagaccagttatgtatgcaatgggagctgatggaaaaaaaggattaagaagaattgttgagattataaaagaagaagttagcacaacactggggttggttggattaaatgatattaatgaagtaacttctgagatagtaatagagaacactattaataaggtaaattactaaa

SEQ ID NO: 199090 - DNA, 619 bp, Unknown
  Bacterial polypeptide expressing nucleotide sequence isolated from the Sargasso Sea
tcagaagaaattggcgaaggcgttgattatatcaaatgtgatgtaaggcttgaggatgatattatttctgtttcagaaaaagcttatgaaatgtgggatcaggttgatgtgttggttaacaatgctggatctgaactcaatcagtcctatgataagatgacagaggcagaatgggataatgttcttaacacagatctaaaagggccttggttaatgtgtaagcacattgtaccaaagatggtagaggcaggatcaggaagtgttatcaatatttcctctttaaatggtttagttggctttcctctttcaactgcttacggaagtgccaaaggcggattagtagtatttactcgcgatatggcgattgagttagcttcgactggtgttagaattaactgtgtttgtccgggtgttatccaaacaggtatgatggaaagatggacagatcttatgcctgataaagctgaggcacaggaaatgcttaggaacacaatgccgattggaagaatgggaacagcagaagaagtcgcaggttcaatcttcttttttgcttcagatgattccagtttatgccaaggatctgttttgagtgttgatggtggatttactgcacagtaaa

SEQ ID NO: 199091 - DNA, 512 bp, Unknown
  Bacterial polypeptide expressing nucleotide sequence isolated from the Sargasso Sea
taaaatgataatgggtgaccctatggataatattgatattggtcctatggtatcaatgcaagctagagatgaaatccatgatcaggtcacacgttctttagactctggtgcgaaacttgagcttggtggagaagtgccagatttaaaaggatatttttatccggttactttgttgtctaatgttaaaccgggtatgccagcatttgatgaagagatatttgggccagttttttcattaattatggcaaaagacgaagatcatgcaattgcattaggtaatcaaacgcaatttggattgggagcagctttgttcacgaaagatataaagaagggtgaagagattgccagagctcaaataaatgctggtttgtgctttgtgaatgattttgtaaaatcagaccctagattaccattcggtggggttaaggaatctggatatgggagggaactgtcaagttatggtttgatggaatttgtaaatataaaaactgttgttgttaacaatgaataat

SEQ ID NO: 199092 - DNA, 922 bp, Unknown
  Bacterial polypeptide expressing nucleotide sequence isolated from the Sargasso Sea
aaagaaataaactggaatggttctattgatcttaattgggattattcgcatccagcagatgaaagaattattgaaactgatgaagaacttcctcatgaagctcttgatgcctataacgatctttcagaagaagaaaaaatactctttgataggcatagcactgctgaacttatgagccaatttcttcatggagagcaaggtgctcttttagttgcttcacaattggcaagttgtgcaccctcttataatgcaaaactatatgctgcttctcagacatttgatgaagctcgacatgtcgaggtttttaataaatatcttcaagataaaataggtattcattatccaatcaatcctaatttaaagttattgcttgacaaaattcttacagatgaaagatgggatttaaaatttataggaatgcaaataattattgaagggttagcattggctgcatttcagatgcttaaatctattacaaaagacccgttattaaaacaattacttcattatgttgttcgtgatgaagcaagacatgtaacttttggtataaattatttagaggattttattaagacattatcgcctgaagaaatagaagaaagagcacaatttgcatatgaggcttgtgttatatcaagagacagattaattaatacaaaagcggaacaaagatttcttaaaatgtctgaggatgaagcaagagaattttctttaaatactggaagttttgaattattcagaaatttcttattttctagagtaatacctaatttatcgagaattggtctcttaactgattctgtcaggcctaaatttgaggctttaggcttattagaatatgagcacgcccctgatgattttgaatgtgattgggcggaaatgaaaaagcctttagaacaattggacaaatacctacaacttt

SEQ ID NO: 199093 - DNA, 676 bp, Unknown
  Bacterial polypeptide expressing nucleotide sequence isolated from the Sargasso Sea
atggttcatagtgttgcaataataggggcagggatatctggtcttacggcgggctgcgcattgagaaaatatggatttgaagttgatatttttgaaagatcagattccataacagaatttggagcaggaattacattatccaggaacgctacttctcttttaagaaaaattgatctgtatgacgagctagaaagaagcagttataaacctcaaggttcatttataagacattataagactgcaaaagatttagcttatgtagacttcactaaagattttttaacagcaaacaggagagacgttgtaagaatcttttctgaaagatttatcgacatgggaggccgcttgcatctgtcccaagatatagaaagcttagatgtagagagtgggcagtttttttcttcaggaaaagattcctactccgctgatcttgttttagcgtgtgatggaattaaatccactattagggatggagagtttgatgtttccgagccaactttcacaaactatattgcttggaggggggttgttgatgaatctaattttcctcaattttcaggcaacgaccaagtcaatatttaccatggacctggaggtcatgttgttcattatccaataggaaatgaaaataagattaacttcgttgccatagagactggagaaaattgggaagaag

SEQ ID NO: 199094 - DNA, 637 bp, Unknown
  Bacterial polypeptide expressing nucleotide sequence isolated from the Sargasso Sea
tctgcaggagtctcatcatggcttcttaaatacaggacaatcgtgtaatgcacctacaagaatgcttgtctcatcgaagaactatgataaagcagtagaagttgcagctaatactgcaaatgctatgaaggtagggaatccttttgatgctgatacaaaaatgggaccaatttctaataagaatcaatatgaaaaagttcaaagaatgatacaaattggtattgatgaaggggcgacactatcagctggtggcgttggtcttccagatggctgtgaaagtggctattacgttaaaccaactatattttctgatgtaactaatgatatgactattgctagagaagaaatttttggccccgttttatgtttaattaaatatgaaacagaacaggaagctatagagatagcaaatgacacgccttacggtcttgctggatatgtccaaggtgagcaagcgcatgcagttgaagttgcttcaaaaataagagctggtcaagtcactatcaataaaggagctagagtcagatcagcaccctttggtggttatggttcttctggtaatggaagagaacatggcacacatggccttgaagaatgtttagagactaaggctgtaattggtgctttagtcgaataa

SEQ ID NO: 199095 - DNA, 367 bp, Unknown
  Bacterial polypeptide expressing nucleotide sequence isolated from the Sargasso Sea
aaataaagaatcggcctatcatccaatcatgattttaactgatgtgaaaccagggatgcccgtgtttgatgaagagattttcggaccagttttatgtatcatttcagcaaaagatgaacttcatgcaatatcattagctaaccagacatcttttggtttgggatctgcagtttttactagtgatgttgaaaaagggaaaaaaattgccaatttcgaattagatgctggtgctggttttgtgaatgattttgtacgttctgaccctagattaccatttggtggcgttaaggaatctggctatggaaatgaactatcttcttatggtatattagaattcgtaaatattaaaacagtttatatacgatga

SEQ ID NO: 199096 - DNA, 583 bp, Unknown
  Bacterial polypeptide expressing nucleotide sequence isolated from the Sargasso Sea
ggtgccaataggctgggtggaaactcattattagatctaattgtttttggaagagctgcaggtaagcacataaatgaggagcttaaatctggtggtggtgtagacaaggcttcgaatgaagatattgaattggctatgagcagactaaattcactaaatgaatctgaatctggttatgaggttgctgatgttaaaaaacaacttcaaacttgtatgcagaactactttggtgtctttaggcgtggtgagtttatggagaaaggagtcgaagaacttaaggaaataagagagaaatccgaaaatctttatttgaaggataaaagtattgcttttaataccaacagagttgaggcactcgagttacagaatcttttagaggttgctgaggctacagctatttctgcaatgatgagagacgaaagtagaggcgctcatgccagagacgactttcccgaaagagatgatgaaaattggttatgccattctttatatgatccagttgaaaaaaaattggggaaaagagatgttaattttgttcctaaagaagtagaagcatttccacctaaaatgaggtcttattaaa

SEQ ID NO: 199097 - DNA, 877 bp, Unknown
  Bacterial polypeptide expressing nucleotide sequence isolated from the Sargasso Sea
ttatggatgtttcccattgcaattgcatgtggaaattgttttattttaaagccttcagaaagagatccaagttctacattgttgttagcgcaaatggtattagatgccgggatccctccaggtgtcttaaatgttgtaaatggtggtaaagaggctgttgatgcaatattaaaaaataaagatattagtgctgtcagttttgttggatcaacaccaatagcacattatatatatcaagaagccgcaaaatatggaaaaaaagtacaagccatgggtggcgccaaaaatcacatggttgttatgcctgatgctgatataaacttagtctgtgattctattatgggatctgtttttggatctgctggtgaaagatgtatggcagtttcagttgttgttcctgttggaaaagagactggagatgctattagaacaaaaataactccaatgattgaaaacttaaaaataggtccgggtttagaaaaatcgtctgaaatgggtcctttggtaactaaacaacacttagataaagttaaaaattatattgatattggcattaaagagggtgctgatctagtagttgatggaagaaattttaaacttcaaggttatgaaaatggctattatgttgggggaacattctttgatcacgtttcaactgacatgaaaatctaccaagaagaaatatttgggcctgttatgtcaatggtaaggtctgagagtatggtagaagcattagaaatggttaataaccatgaatatggaaatggcactgctatttttacttctgatggtggtgtcgccagaaaatttgcaaacgaatgtcaaataggaatggtaggcattaatgtaccaattccagttccaatggcttatcatt

SEQ ID NO: 199098 - DNA, 424 bp, Unknown
  Bacterial polypeptide expressing nucleotide sequence isolated from the Sargasso Sea
atgcaaactgaaagtattatttataaattttattatcaatggtggaaaaacatagataaatctatttttatgttaataagtctattatttgttattggattatttttttctttggtttcaacttctttaatagcttccgacaagttagatactaatagttatttctttttttttaaacatttgatttatgttttaattggaataacacttatttttatattttcttcttttaattcagatcaattatacaaatattcaatttatcttttttttatttctcttatttctttatttttagtaccattcataggtgttgaagttaaaggttcaaaaagatggatagacttattttttttaccaagatttcaacccatagaggttctgaagccatttttaatagtaattttggcaacaattttatgta

SEQ ID NO: 199099 - DNA, 196 bp, Unknown
  Bacterial polypeptide expressing nucleotide sequence isolated from the Sargasso Sea
ctcagcttataataggaaagaaagtagaggagctcatgcaagagaagattatccaaaaagagatgatgagaagtttatgcaacatacattagcatggtgtgatggaaaaaaatcaaaaataagttatagagatgttcataagtctacattaaccaacgaagtacagtattttccacctcaggagagagtatattaa

SEQ ID NO: 199100 - DNA, 285 bp, Unknown
  Bacterial polypeptide expressing nucleotide sequence isolated from the Sargasso Sea
cgccgagtgcctgctggacggctcgcactgcgcagtcgagggttaccccaatggcaactgggtcggtccaaccctgtttcgcggcgttaccgccaagatgagcctgtaccgcgaggaaatcttcggcccggtgctggtatgcatggaagtcgatacgcttgaggaggccatcgagctggtcaacgccagcccctacggcaacggcacctcaatcttcacccgctccggcggcgcggcgcggcattaccagcacgcggtggaagtcggccaggtcggcatcaacgt

SEQ ID NO: 199101 - DNA, 690 bp, Unknown
  Bacterial polypeptide expressing nucleotide sequence isolated from the Sargasso Sea
actagaaatcagtctcctggagggattcccacgcaggaggtgattgcatattattcaaggagagcaaaagcagaagttgggttgattattacagagggaattgaagtaagccataaggcttctagtgcatatccaaatgttcctaaattagatagcaataaagctagagaagcttggaaaaaggtcgtagagggaattaaaaataacaacggggcagttattgcacaactatggcattgtggtggttttagaaagctaggcatgcaaccaaatcctgaagtacctggtcatacagcctctgggcttgtaaaacctggtaaaaaagtagcccatgagatgactttaagggacatcaaggaaacaattgatgcttacgcatcagatgcaaagatatgtgaagagattggatttgatggagttgagatacatggagctcatggttacttgatagataattttttttggagcggtacaaatattcgtgaagatgaatatgggggctcaatagaaaatcgctcacaatttgtttcagatattattaaatctgttagagagaatgtcagtgaaaattttatcgttggcttaagattttctcaatggaagcaacatgactttgaagctaaactcgcatctaatcctgaagaacttaaaacgattcttacttcacctgtagaatctggtttggattat

SEQ ID NO: 199102 - DNA, 355 bp, Unknown
  Bacterial polypeptide expressing nucleotide sequence isolated from the Sargasso Sea
gtattacgtcaaaccaactatattttctgatgtaacaaatgatatgaccattgcaagagaggaaatttttggtccagtattatgtttaattaaatatgagactgaagaagaagccatcgagattgcaaatgacactccatatggtcttgctggatatgtccaaggcgagcatgcgcatgcagttggagttgcttcaaaaattagagccggtcaagttactatcaacaaaggagctagagttagatcagcaccatttggtggttatggctcttctggtaatggaagagagcatggctcactcggccttgaagaatgtttagagaccaaagctgtaattggagctttagtcgaataa

SEQ ID NO: 199103 - DNA, 754 bp, Unknown
  Bacterial polypeptide expressing nucleotide sequence isolated from the Sargasso Sea
gatctcacaggcaaggtagccgtagttacaggcggaagccgtggcatgggaagagaaatggtcttggccttcgcacaacacggcgccgatattgttattgcctcgcgcaagattgatgcttgcgaggaactcgccgacgaagttcgagaaaccacgggtcgtcaggcgctgccagttgcgtgccatgtcggttactgggaacagtgcgatgagctgtgcgacacggtctacaaggagttcggacgttgcgatgtgctcgtcaacaatgcaggtttatcgcccttgtatccgtctctctatgacgttacagaggatttgtatagcaaagtaatggacgtaaacctcaaggggccattccgactatccgctgtgttcggaaagcacatgtttgacggcgatggtggatcaattattaatgtgagttccgttgcagcgatggagcccacaccaaatgaaacagcctacggcgctgctaaagccggcgttcacgcaatcaccaagtcctttgctagggaatacggacctaaagttcgagtgaactgcattatgcccggcccatttttaaccgatatatccaaagcttgggatatggacgtttttaatgccaaagctgaaacggatatcgctttgcagcgtggtggtgaagccgacgaaattgttggcgcagcactctatttcgcaagtgcagcatctagttacacaaccggggcaattttgaaagtcgatgggggcgccggctgggcagctggctgac

SEQ ID NO: 199104 - DNA, 704 bp, Unknown
  Bacterial polypeptide expressing nucleotide sequence isolated from the Sargasso Sea
agcagttaatggtttaatgggagctgcttatggttcagcaggcgagagatgtatggctcaatcagttgctgtagcagtaggaggaataggagataaattggttagttctttgactaaaaaagtagaggcgttaaaagttggtccaggcatggataaggaatcagaaatgggacctttagttactaaagaacatttagcaaaagtaaaaagttatgtagacatcggtgtaaaagagggcgctaaattgttagtagatggaagaaattttaaaattcaaggttatgaaaatggttattatattggtggatgcctatttgaccacgtaaaaaaagatatgagaatttataaagaagaaatttttggaccggttttatctgttattcgagctaaagactttgatgaagcgctacaattagtgaatgaccatgaatttggtaatggggtaagtatatttactagagacggagactcaggcagaacattttcaaataaagctaaaataggcatggttggtatcaatattcctataccagttcctatggcttttcacagttttgggggttggaaaagatcattgttcggagatcaacatatgcacggtccagaaggagttagattttatactaaattaaaaacaataacttcaagatggccttctggattaagatctgacccagagtttgtaatgccaactatgaaataaa

SEQ ID NO: 199105 - DNA, 589 bp, Unknown
  Bacterial polypeptide expressing nucleotide sequence isolated from the Sargasso Sea
caaacccctttgggaggccgagatcgaactgcgcggcgcggcgctttatttcgaatactacggcaatcaggccgccacggtcgaaggcaggtctatcccgctgggcgcgggctattacgactttaccgattgtgaacctttcggcgtttcggcccagatcatcccgtggaactatcccgtcgagatgaccgcgcggtcgcttgcggcggcgctggccaccggcaatacctgtgtgatcaagacgcccgagctgaccccgctcagcacctacatcttcgcccatgcagccgaggctgcgggcctgcccaggggcgcggtgaatatcctctgcggctggggccatcaggcgggcgcggccctgtcaggccaccccgacgtcaaccagatcgtctttaccggctcggtccccaccggcgttgccatcgccacggcggcggcgcagaacgtggtgccctgcgtgttggaactgggcggaaaatcggcggccatcgtgcatgacgatgccgaccttgaggccttcgagaatgatatccgctggggcatctatttcaatgccggtcaggtctgttcggcgatgagccgggtcatc

SEQ ID NO: 199106 - DNA, 775 bp, Unknown
  Bacterial polypeptide expressing nucleotide sequence isolated from the Sargasso Sea
gtccgcggattgagtcgggggttgttgttacttaatttgttaaataaattcgatggcggggccacgatcggcacgctggctgagtttagcggtctgcatcgcaccaccgtcaggcggctgctggagacattgcaggaggagggttacgttcgccgcagtcgatccgatgacagctttcgtttaaccctcaaaatccgtcagttgagtgaaggatttcgtgacgaacattggatttctgccctcgccactccgctgctgggagagctgttgcgcgaagtgctgtggccgacggatatctccacgctggatgttgacgcgatggtggtccgtgaaaccacgcaccgcttcagccgcctgtcgtttcatcgcgcgatggtcggccgtcggctcccgctgctgctgaccgcctcggggctaacctggctggccttcgccccggatcatgagcgccaggcgatgatcgagatcctcgcggcgcgtccggaagaggagtatcagctggcgcgggagccggaaaagctggcggccattcttgagcgcacacgacgccagggctacggcgaaaactttcgcggctggcagcaggaggagaaaatcgcctccatcgccgtaccaatccgcagccagcagcgggttattggttgtctgaacctggtttatatggcgaaagcgatgagtcttgagcaagcggcgcagaaatatctggcgccgttgcaaaaagtggccgcccagatcgagtcgcgaatgaccgaggaagaggttttttacgagtaaa

SEQ ID NO: 199107 - DNA, 868 bp, Unknown
  Bacterial polypeptide expressing nucleotide sequence isolated from the Sargasso Sea
aaacaagcaaactatattgcagaatattatgactattatgctggtatggcagataaagttgaaggaacagttttgccaatagataaaccaaatattcaagcaataactacgagagtaccaataggtgttatagcagcaattattccttggaattcacagatgctgttaacagtaactaaactagcgcctgctttagcaatgggaaatactgttgttataaaatcatctgagttagcacctgcagttttatttgagtttgcaaaattagttgaagaaacaggaataccaaaaggagttgtaaatgttattacaggttatggtgacccatgtggaaaagctctaacaacacataatttagttgaaaaaattgcttttacaggaggtcctgaaactgcaagacatataattagaaattcagctgaaaatttatctgaagtaagcctggaacttggaggaaaaagtcctgtagcagtatttgaagatgctcatcaagaaaatgcaataaatgggattaccgcaggaatttttggtgcaagtggccaaagttgtattgctggttcaagactttatttacaaaaaggaatttataatgaatttctagataagcttgctgcaagagcagaaaaaataaaaattggtgcacctatggatcctgaaagcgaaatgggtccaattggtaattttaaacaattagaaataatagaaaaaaatattaaattaactgtagaacaaggtggaaaaattaaatgtggaggtaaaagacattcattttcaaatgaaggatattatttccctccaacaattattgagtgtgataatcataatcttccaacggcagaaaatgaactttttggtccgagtgctatct

SEQ ID NO: 199108 - DNA, 315 bp, Unknown
  Bacterial polypeptide expressing nucleotide sequence isolated from the Sargasso Sea
tgcaaatggatatgaacaatgtccgtatacaagataaatccttgatctggaacacagagctcatagagacattagagcttgataacttgatgggacaggcactggtaacaataagatcagcaagtgagcgtaaagaatcgcgtggtgctcatgcgcatgaggattatccagagagagatgataaagactggatgaaacacactgtaatgtggctcgatgagcagaacaaatcaaaactcggatacagagacgttacattatcaacattaaccaatgaggtgcaaagtatcgcacctgtcgcacgcgtatactagg

SEQ ID NO: 199109 - DNA, 805 bp, Unknown
  Bacterial polypeptide expressing nucleotide sequence isolated from the Sargasso Sea
atatatatatcgaaaattgctgctaaaaatgaaaaaagagttcaagcattaggcggagcaaaaaatcattgtgttgtgatgccagattgtgatttaaatcaagcagttaacggtttaatgggtgccgcatatgggtcagcaggcgaaagatgtatggctcaatctgtagcagtagcagtaggtggaattggagataaattagttgagtctttagcaaaaaaagtagaggcattaaaagttgggccaggaatggataaacaatcagaaatgggtccacttgtaaccaaagaacatttagcaaaagtaaaagaatatgttgaagttggagagaaagaaggtgcaaaattagttgtggacggtaggaaatttaaattacaaggatatgaaaatggtttttatatgggaggatgtttatttgacgatgtaactaaagatatgagaatttataaagaagaaatttttggaccagttttatctgttgtaagagttaaagactttgacgaagcactaaaactagttaacgatcacgagtttggcaatggtgtaagtattttcactagagatggagactctggaagaacgttttcgaataaagctaaaattggaatggtcggtataaatatacctatcccagttccaatggcttttcatagttttggaggctggaaaagatctttatttggtgatcagcatatgcatggtcctgaaggagtaaggttttatacaaaacttaaaactataacatctagatggccatcaggtttaagatcagatccagaatttattatgcctacaatgaaataat

SEQ ID NO: 199110 - DNA, 517 bp, Unknown
  Bacterial polypeptide expressing nucleotide sequence isolated from the Sargasso Sea
caaagatcacaaaaataaaatagaaaaatatattacagtagggctggaagaaggtgctaaattagttgaagatggaagaaactataaaattcaagggtatgaaaatggtaattttgttgggccaacattatttgataatgtaacaaaagatatgactatttataaagaagaaatatttggacctgttgtgagtgttgttagaacaaaaacatatgatgaggcgttacagttagttaatgatcacgcttttggcaatggaacgagtatttacacatcagatggagagattgctagacattttacaactaatgctaaaattggcatggttggtattaatgtgccaatacctgttccaatggcatttcatagttttggtggatggaaacaatctttatttggagaccattctgttcatggtatggaaggtgttcatttttatacaaaattaaaaactataacaagtagatggccaaaaagtattcaatctggaccagaatttgtattgccaactaattga

SEQ ID NO: 199111 - DNA, 769 bp, Unknown
  Bacterial polypeptide expressing nucleotide sequence isolated from the Sargasso Sea
tcgatctgtaattataacaggtgggaatagaggtttgggtttagaaatggctatatgcttagctaaagctggtgctaaattatgtattactgcatcaaaagagggaaaagtttaccagcaaacatcaaaagagcttattggaatattaggaaaagacaactttttctctagagttgtagatgtttctgacgccgaaggcatggcaagacttactgaggactgtataaaaaaattttctaaaatcgatgtacttgtaaataatgctggaagaggtatgaggcttatatctgaaacctttaatacagtccctacaaaattctgggaagcagacagaagaacttggtcaactataattgataccaacataataggtccttttgttgctgcaaaaagtgtagtccctcatatgataaataataaatttggtaaaattattaatatttctacttcttcacaaacaatgattagaaaaggatattctccttatggaccctcaaaggcatttattgaagctacatcaagaacttgggcatatgatctaaaaggtacaggagttgatgtgaatgttttattgccgggtggggcagccgatacagatctacttccaccttcaaaaaataaaaaaggtgcggatggtaatttgttaccaccaacaataatgaatgaagcaatcttatggcttgtttctgataagtctaatggggtgacaggtggaagatttattggtagatattggaatgatttaaaaaatcgagttgataataaagga

SEQ ID NO: 199112 - DNA, 709 bp, Unknown
  Bacterial polypeptide expressing nucleotide sequence isolated from the Sargasso Sea
gcccttcttgttgcctctcaacttacatcgtgtgccccaacttattacgcaaaactttatgcagcatctcagacatttgatgaagctaggcatgtagaagcttttaataagtatattcaaacaagaacaaagctcatgtatccaattggcaatgctttgaaatcaattttagataaaattcttactgatccaaggtgggatcttaagttcattggtatgcaaattattattgagggattagcattagctgcatttcaaacctcaagagagcttacgaaagatccagtgttacgagacatgcttggcttgatcattcgggatgaggctaggcacgttacctttggaataaattatttagaagagtttgttgaaaccttatcagatgatgaaaaagaagatcgtgctcaatttgcctatgaagcatgctggcttagcagggaaaggcttgtctcaatggatgtttttgagcattttggttggaatgctgaggatgcaagacaatttcaattaagctctgatattactaagcatttccaaaaactactttttcaaagagtcatgccaaaccttagaagaattggcctgttaagagattctgtaaaaggtaaatttgaagatctaggtattctagaatacgctgaagccaaaagtgatgctgagattgactgggctgatctatcaagacctttatttgaagaatctgcttaac

SEQ ID NO: 199113 - DNA, 502 bp, Unknown
  Bacterial polypeptide expressing nucleotide sequence isolated from the Sargasso Sea
aatgaagcatgacgaaattgataaaaatgaaacggatagatgtttagatagatttgataaattaagaaactcagaaggttcaaatccaacatctgaactaagactttcaatgcaaaagacgatgcaatcaaagtgtgctgtatttagaactgagaaaacattaaaggaaggtgttgatgaaattaggagaccttatgatggaatggactctctttctgtaaaagataaatcattaatattcaacacagatttagttgaaactctagaatttgataacttaataagacaggcaataactacaatggactctgcgtatcatagaaaagaaagcagaggagcccatgcaagagaagattttccaaagagagacgatgagaactatatgcaacatactctgtcttggtgtaatggttcaaaaactaaaattaattacagacctgttcatagatcaacacttacaaatgatgtacaatattttcctccacaggaaagagtatattaa

SEQ ID NO: 199114 - DNA, 586 bp, Unknown
  Bacterial polypeptide expressing nucleotide sequence isolated from the Sargasso Sea
aatggatgaagctcgtcacatggatgtctttcgcaagcgtgccctcgctaatggtggcggattaatgagaatgtcgggttctacgtcaggctttgttggcagtattgatttgtccagagattttacagagatgtccactaggcttcatatttcaggagagggagcggttctcacaatgtttcgaatgggcgagttatttggtcaaaatgaagcagaaaagactatgtatcggttgtgtgctcaagatgaagctaggcatgtcgcctttggtgttatgcacctgcggtatctaggtgcaacggcaccagagcgccgggaggagattgaggtctatttagatgaggctgaagggcagattttggctgggcaacaaaaccctgccagccaggctagcgagaccagcgaggctcttgcagtacttcttggaggcggtcagcaaaactacgatgagggttataagcaactacttgctattcgcaagagacagctgaaggagtatatgaagagggtggaaagtgctggttttggtgagcgcttcacaaacggacgttctccgcttccaaagcagtacgcttcaatggtctag

SEQ ID NO: 199115 - DNA, 331 bp, Unknown
  Bacterial polypeptide expressing nucleotide sequence isolated from the Sargasso Sea
gttgacgagattaaaaaaacttatgatggtatagactcaatttcagttaaagataggtctttagtatttaatactgatttagttgaaacattagaatttgataatttaataagacaagcagtaactactgtagaatctgcatatcatagaaaagagagcagaggcgctcacgcgagagatgactacccaaaaagagatgatgaaaagtttatgcaacatacgcttgcttggtgtgatggaaaaaatacaaagattagttacagagcagtacacaaatcaactttaacaaatgaagttcaatattttccaccacaagagcgagtatattaat

SEQ ID NO: 199116 - DNA, 913 bp, Unknown
  Bacterial polypeptide expressing nucleotide sequence isolated from the Sargasso Sea
aaaaaatgtagatagctggtcacttagacagcctctgggagtttgtgccggtatcactccttttaactttccagccatggttccaatgtggatgtttccaatggctatagcctgtggaaatactttcatattaaaaccatcagaaaaagatccatcttgctctataagactagccgagttgtttagtgaagccggtttaccaaagggagttttaaatatagttaatggcgacaaacaagtggtagatgcaatcatctctaacaaaaatatttctgcagtaagttttgtaggatcaactcctgtcgcaaaatatatttatgaaaactgcgcaaaaaatgaaaaaagagttcaagcattaggaggtgcgaaaaatcattgcgttataatgccagattgtgatttagaacaagcagtaagtggtttgatgggagcagcatatggttcagctggagagagatgtatggcacaatctgttgcagtcgcagtaggagatattggagacgaacttgttaaaaatttagctaaaaaagtagaatctttaaaaattggtccaggtatggacaaaaagtctgagatgggacctttagtaactaaggaacatttgtccaaagtaaaaaattacgtagatattggagaaaaagaaggagcaaaactagttgtagatggtagaaatcttaaattgcaaggttatgaaaatggctattatataggaggctgcttgtttgataatgtaaaaaaagatatgagaatttataaagaggaaatttttgggccagttttatcggtcattagggcaaaagatttttctgaagctctaaatttagttaatgatcatgagtttggaaatggagcaagtatttttactagagacggggatataggaagaacattttcaagtaaatcaaagattggc

SEQ ID NO: 199117 - DNA, 872 bp, Unknown
  Bacterial polypeptide expressing nucleotide sequence isolated from the Sargasso Sea
aatgctaggcgtcgttctctcaaaggatgcaagagcaagagcagttcagttaccagcttggaatgaagcaatgggattgccaagaccatgggatcaacaatggtccttaagattacaacaaattgttgcgtatgaaacagatcttctacattttgacgatatattcaatggctctgaagtaattgatgaaaaggttaaaaatcttaaagagactgcgatgaaagaatttaatcacattcaatcaattggtggtgcagtagctgcagttgaaagtggttacttaaaacaggaattggtcaattctcaaaaagaaaggcttaaaagaattaatgataaagagcaaatcgttgttggagttaatgagtttgttgagaccgaagagtcacctcttgtatcaaatgatggaggcatagagacaattgatccaaaaattgaaaatgaacaagtaaaagcagttattgattggagacaaaacagagatcaaaaacaggttgatagcgctttaaatcaattaagcgaagcagcaaaatctggagataacataatggaagcttctattacagctgcaaaagcaggtgtaacaacaggtgaatggtctcaagtacttcgggatgtttttggtgagttcaaagcaccgactggtataactaacattcaaccatccaataatgacgattacagcccaatacgtaaaagagttgagtcattgtcagataagatgggaagaagaataaaatttcttgtaggcaaacctggtcttgacgggcattctagtggagcagaacaaattgctgtaagtgcgagtgattgtggaatggatgttttgtacgaaggaattagattaacaccagaacaaatagtaaaatcatctg

SEQ ID NO: 199118 - DNA, 532 bp, Unknown
  Bacterial polypeptide expressing nucleotide sequence isolated from the Sargasso Sea
tttagttaaacaagcactcgacaagtatggaaccgtagatgttttggtaaataatgctggattaatgcctcttagttttgtaaaatcactaaaagttgatgagtgggacagaatgatagatgtaaacatcaaaggtgtattgtactgcactgccgcagtcgtccctacaatgactgagaaaaaatcaggccacatcattaacatttcatctgttgcaggaagaatcgtctttccagctggaagtgtttactgtgcaacaaaacatgcagtaactgcattctcagaaggtttgagacaagaactttctgtaagaaaaaacatccgagttactagtatagagcctggtgttgtacagactgaattaacaaacacaatcaccgaagattctctacaaggattcattgaaaaaggtaaacaaatggaagcattacaagcagatgacatatcaaatgcaataatctttgcaattgatgcaccaaatcacatgaacgtaaatgaaattctaatcagaccaactacacaagatcactaa

SEQ ID NO: 199119 - DNA, 406 bp, Unknown
  Bacterial polypeptide expressing nucleotide sequence isolated from the Sargasso Sea
agaacttcgatgcaaaaagttatgcaagaaaaatgtgctgttttcagaacgaaagaacttatttcaaaaggtattgaggaatttagtcatatagaaagctcaatggataacatagatgtcaaagataaatccatgatctttaacacagacttaactgagtctcttgaattacataatttattggcgcaatcaaaagttactctccattccgctttaaatagaacagaaagtagaggagcacatgcaagagaagatcatcaagaaagagatgactctaactggctggttcattctttatcatggcttgataataaaggtggtgttagaatgggaacacgacctgtaaatatgaataccttaaccaatcatgttcagcctattccaccaaagaaaagagtgtattaaa

SEQ ID NO: 199120 - DNA, 439 bp, Unknown
  Bacterial polypeptide expressing nucleotide sequence isolated from the Sargasso Sea
aatgatcaagttcaaagatcaatatctgcaggcgcaaaactcattttaggtgggaagataccggaaattgaaggagcattttatccattgacagtactttcaaatgtctttccggggatgcctgcttttgatgaagaaatattcggacctgttttcacaataattgttgcagatgatgatgataatgctattgacttagcaaataaatctgagtttggacttgggtctgcaatattcactagagatctagaaaaaggggaaagtatagcaaaaacaaaattacaatctggagcttgctttgtgaatgattttgtcaaatctgatcccagactgccctttggaggtataaaaatgtctggatatggtagagaactttctgattatggtatgatggaatttgtcaatataaaaactattgttgtaaaatcagtcaggtaag

SEQ ID NO: 199121 - DNA, 463 bp, Unknown
  Bacterial polypeptide expressing nucleotide sequence isolated from the Sargasso Sea
atggacaaaactgaaatccttgatttctcaggtaaaacggtgattgtcaccggagggactcgtggtcttgggcgcgttatttcagaatcttttttagatgccggcgcgaatgttgttacatgcgctcgaaatgcaccggggaaaccgatcatttctgaattgaataacaaagaagccattttttttgaaactgatgtaagaaaccctgatcaggtcgaatctcttatttctgaggttttcaaagagtttggtcgtatcgatgtgcttgtaaacaatgctggaggggcgccttcagttaaatcttcagaagcttcacctcgctttaatgaaaaagttgtttcattgaatcttttagcttctatgcactgttctcaatctgtgttccctgtgatgaattcgcaagaagacaacggtgtcatcatcaatatctcttcagtcagtgggagtagacccaaccccacgg

SEQ ID NO: 199122 - DNA, 790 bp, Unknown
  Bacterial polypeptide expressing nucleotide sequence isolated from the Sargasso Sea
atggtaccaatgtggatgtttccaatagcaatagcttgtggaaacacttttattcttaaaccatctgaaaaagacccttcttgcgcaataagattagcagaactactttctgaggcgggtcttccagaaggagtatttaacgtgataaatggagataaagaagctgttgatgcaattttagaaaacaaagatatcaaagctgttagtttcgtaggatctactcctattgcaaaatatatttatgaaaattcagctaaaaatgaaaaaagagttcaagctttgggtggagcaaaaaaccatttagttgttatgccagattgtgacttagatggtgcagtaaatggtttaatgggtgccgcttatggttcagctggggaaagatgtatggctcaatcagttgctgttgcggtcggagatatcggtgatgaacttgtatcaagattatcaaaaaaagctgaagctttaaaagttggtcctggaatggataaggcatcagaaatgggacctttagttacaaaagaacatttagaaaaagttacaagctacgttaatttaggtgtcgaggaaggtgcaaaactagtggttgatggaagaggtttaaaacttcaaggttatgaaaatggtttctatataggtggatgtttatttgatcatgtaaataaagatatgagaatttacaaagaagaaatattcggtccagtcttatcagttgttcgagtaaaaacttttgaagaagctgcaaaattaattaacgaccatgagtacggaaatggagttagtatttatacaa

SEQ ID NO: 199123 - DNA, 310 bp, Unknown
  Bacterial polypeptide expressing nucleotide sequence isolated from the Sargasso Sea
tttgcggttaaaaggtaaaaaatgcattgttactggaggatcaagtggtatcggtgaagcaactgttagaagatttatcagcgaaggggcagaagtcttaattgcagatatcaatcttgaagattcaaaaaaattatcagaagaaattggtgaaggcgttgattatatcaaatgtgatgtaaggctcgaggatgatattatttctgtttcagaaaaagcttatggtatgtgggatcaggttgatgtgttggttaacaatgctggatctgaactcaatcagtcctatgataagatgacagaggcagaatgg

SEQ ID NO: 199124 - DNA, 790 bp, Unknown
  Bacterial polypeptide expressing nucleotide sequence isolated from the Sargasso Sea
tcgacgctcgtcgtcgtgccgatctcgatcctcgagcacatggacgagcccacggcgcaggtcaagcgcagcctccgcgtcttcaagcgcgcgcgcaagggcggtctcaagaacctcatcatggtggcgctcgccgccaagaagttcacgaccgccgtccgcgacgtcgcgacgaccggccacacgcggcgcgagtcgcgcgaatcgcgtgactcgaagaagaagcaagaggtggagacgccgcgcgacgagcccgaggaggagagcacagaggacgcggagaaggccgacctcgcgccgcagtacgacgacctcgtcgagcgcgcgctgcagtcggcgaacatcaccgcgcgcgcgatggtctccgtcacgcgcttcgtcaagaaggccgcctccgacttcaacccgaggctcatcaagcgcgtcgtcggcgccttccccgacgacgtcgtggtggagctgcgcaacgtcgcgcaggagctgcgcgagcgcgtgcgcccggggcaagacacgctcgaccgcgacgacgagatcacgccgcggggccggcggccgccgcagtcggtcgacgagtggcaggcgctcgtcgagagcttgtggaccgcctccgcgacgatcaaccagtcgctgctgcagatccgcgccgcggtcaagcgcgtgctgcagaacgaccagacggcggcgatgctcgagcagtccgactacagcgactcggcgcggatggagctggccgactcggtcgacatctccgccaacgcgctgcagatgctcttctcgatcgcctcgcgcg

SEQ ID NO: 199125 - DNA, 874 bp, Unknown
  Bacterial polypeptide expressing nucleotide sequence isolated from the Sargasso Sea
tggaattcacagatgttattaactgctgtaaaacttgctccagcacttgccatgggaaatactatagtaatcaaatcttctgaattggctcctgctacattatttgaatttgcaaaattaattgagaaaacaggtatacctaaaggagtagtaaacattgtttctgggtttggagatccttgtggaaaagcattaacctcacataattttgtagaaagagtcgctttcacaggaggtccagaaactgcaagacatattataagaaattctgccgataatttatcacaagtaagtttagaattaggaggtaaaagtcctgtagctgtttttgaagacgctgaccaggaaaatgctttaaacggaattacagcaggaatctttggtgctagcggtcaaagttgtatagcaggttcaaggttgtatatacaaaatagtatttatgaaaattttttagaaaaaatagtaaatagagctaacaaaattaagctgggtccacctatggaacctgatacacaaatgggccctttaagtagtttaaaacagttagaaattatagaaaaaaatatcagacttactttagatcaaggaggaaaactaaaatgcggaggtaaaagacataacttatcgaataaaggttattatttcccacctacggtaatagagtgtgaaaatcataatttaccaactgcagaaaatgaattatttggacctgttctttctgtaatgaaatttaacgacgaaaaagaagtcatagaaaaaatgaatgacaaccagtatggattatcatctggagtttatactaaagatataaatagaggtttaagagtttcgaattcaattcgagctggaataacttttgtaaatacttacagat

SEQ ID NO: 199126 - DNA, 739 bp, Unknown
  Bacterial polypeptide expressing nucleotide sequence isolated from the Sargasso Sea
atgtcgctttcactggacggacgcgtagctcttatcactggcgccggcagcggaattggccgcagccacgctgtgttgatggctgaacggggggcggatgtgattatcaatgacatcaacgctgagggtcttgcggagaccgccgaaaaagcggccgcaaatggccgacgcatccatcaggtcgtcgaggatgtcagagacatcgcggcaatgacgaacgcagccaagaaagccgaagctgaattcggtaagatagacattctcgtcaacaatgctggtgtcagcggccagcgcctggccttcgaagatatcaccgaagaagcttatgaccggatggtcgacatcaacctgaagggcgcgttcttccttacccaggccattgttcccggtatgaaggaatgccgatacggcaagattatcaacacctcgtcgatgtatgcgatgggcggaaataatgttggcgcgcattattccgcggcaaaatccgctctgtccggtctgacgaactcgctagcccgcgagctggccgaatggaatatcatggtgaacgcggttgcgccgggatttgttctgaccggaatgacatctccagggagagatgaagaagggctgaaaaggcgagttcagcaggtacccctgcaacgtatgtccggtgaattcgacatagcctatacggttgcctttctggcctccgacgaagcggatttcattaccggtcaggtgatcagcccgaacggcg

SEQ ID NO: 199127 - DNA, 397 bp, Unknown
  Bacterial polypeptide expressing nucleotide sequence isolated from the Sargasso Sea
atgctttactttgcatacggaagtaatcttaacctttttcagatgaaaaaaagatgtaaagatagtattttaataaataagattaaacttaagaattttaaattaacttttagaagtaaatatagggcagcagatattgagcctaaaaagaattcagtcgtgccaggcgcattatttgaaatatcaaaaagtgatgagagaaaacttgatgtttatgaagattatccaaatttatataaaaaatattattttttttactatggaaaaaaagttatgacttatacaatggtaaagaaatcttcttttagattcccaactgaaagatatctcaatataattaaacgtggttataaagattgtaatttagataatggctatcttaaaaaagcattacagt

SEQ ID NO: 199128 - DNA, 625 bp, Unknown
  Bacterial polypeptide expressing nucleotide sequence isolated from the Sargasso Sea
ggtgatattggagatgaactagtgtctagattatcaaaaaaagcagaggctttaaaagttggaccaggaatggacaaaaactcagaaatgggccctttagttactaaagaacacttagaaaaagtaaaaagttatgttgatttaggcgtaaaagagggtgcgaaattagttgtcgatggaagaaatttaaaattacaaggatatgaaaatggcttttacattggtggctgtttatttgataacgtgacaaaagatatgaggatttataaagaggaaatatttggcccagttctatctgttgtaagagttaaaacttttgaggaagcttcaaaattaataaatgatcatgaatacggaaatggcgtaagtatttatacaagagacggagacgctggaagaacatttgcaagtaagattcaagttggaatggttggcataaatgtaccaatacctgttccgatggcttttcatagttttggtggttggaagaggtctttgtttggagatagtgcgatgcatgggatggaaggaataaaattttatactaaattaaaaacgataacttcaagatggccctcaggaattagatctaatgctgaatttgtgatgccaacaatgaaataat

SEQ ID NO: 199129 - DNA, 874 bp, Unknown
  Bacterial polypeptide expressing nucleotide sequence isolated from the Sargasso Sea
agaaaaattgcagatgaaacgagaaaagttgccaaagaaggtggcgagcttttatgctatgaaaatggaaaaactttaggagctgcggttaaagaatttaacgatgtagcagatatgtttgattattatgcaggattaactgataaattagaaggcaaaactatacctgtagcaaaaaatgtttttgattatactgttctagaaccttttggaatttctgcacatattgttccttggaattatccattatcaatgatcgggagatctcttgcatgttcttttgcaacaggaaattcaactataattaaaacagcagaattaactcctctgtcagcaaccatttttgcgaaagcaatcgttaattcaggtgttccagatggtttaattaatattatttgtggttatggtaacgaggcaggttcgtatttagtctctcatgaagatgttaatcacgttgtttttactggatctgtttcaactggaaaaaaaatattacatgcatgtgcagataaggcaataccagcagttgttgaactagggggtaagtcagcaggaattgttttcccagatgctgaccttgatgaagtagttgatagtgcaagacatgctatttttggtgttgcaggtcaaatatgtacagccatgtctcgtgttgtagttcataaatctgttaaagatgagcttgtagataaacttgtagatttaagtaaatctctaaaaattggaccaggtatagaaaaagatactgacttaactcctgtaatctcagaaaatcaacttcaaaaagttgaaggctatgctagatcaggtattcaagaaggagcagaagcagctcatggtggaaaaagagttgaacgtgatggttattttatgg

SEQ ID NO: 199130 - DNA, 491 bp, Unknown
  Bacterial polypeptide expressing nucleotide sequence isolated from the Sargasso Sea
agaagaatcaatggataggtttgataaaattagaaattctaaaggtaacattcctacagctcaattaagattagaaatgcaacaaaccatgcaggctgatgctgccgtctttaggtcagataagacccttgctgaaggttgtaaaaaaatgaaaaagatagcttcagatttttctgatgtaagtgttacggataaaacattaatttggaattcagatctaatggagactttagaacttgataatttaatgccaaatgctcttactacaattttttcggccgaagcaagaaaagagagcagaggtgcccatgcacatgaagattatccagatagggatgataagaattggagaaaacacacattagcaagaataaatcataatggatctgtgagtttgacttataggtcggttcatacagaaacactttcaaatattgaggatggaggaattgatccaaaaaaaattgcaccgaaggctcgagtttattgaa

SEQ ID NO: 199131 - DNA, 844 bp, Unknown
  Bacterial polypeptide expressing nucleotide sequence isolated from the Sargasso Sea
ggacaagacgacttctctagaatgggagaatattttgctgagagggcatccacaggcgttggtcttataattacgggaggtatttcccccaatgaagaaggtgctcttgacggagctatttttaatcaagaaagtcaagtcgcaagacataagcttgtaacggatgcggtgcacaatgcgaatgtagacacaaaaatttgtatgcagattttacattcaggtccattggcaattagtaaagaattagttgctgctagtcccgttcgatctagaattggtcgtcttgttcctaatgaaatgtcgctagaggtactcagaaagcaagttagtgattttatcaagtgtgcagaactatgtaaaaaagctaattatgatggagtagaaatcataggttcagctggatattttatttctacttttttcgtcaataaaacaaatctgagaaccgacgaatacggaggaagtttctctaataaaattagaattgcaacagaaattgtggaaggaattcgtaaatctgttggtgaggattttctgattatattcagaataccggcaatggatatgcttgagggaggaatgtcatgggaagagatctgtaccttagggcaggccttagaaaattcgggtgtttcgatagtgtctacgcatttttcatggcatgaaagccctgttccaactattgcaacaatggttcctagagcagcttttacatcagtaacgaagcgcctgaaaagttttattaatgttccggtaattacatcaaacagaataaatatgccggatgtcgctgagaatgttttggcgaatggtgatgcggacctaatttcgatggcaagaccat

SEQ ID NO: 199132 - DNA, 754 bp, Unknown
  Bacterial polypeptide expressing nucleotide sequence isolated from the Sargasso Sea
gcaattattacacgtggtagtgaaggaattagggaaagcatctgccaaaataatgtgcgaagaaggtgcaaatgttgtcatctgcgcaagacgacaagaacttttagatagtgcagtaaatgagattaaagccactgctaagggtgaaattattggaatttcagctgacgtgacaaatccagatgacataaaaaatgtcgtagaatcatgcataaccaaatttggtagaattgatatccttgtaaataatgcaggaacatctaatgctaacaattttgaaactgtagatgatgatgtctggcaacacgaccttgacctcaaattttttgcagcaatacgattttcacgactagcaatagaacaaatgaaaaaagtcggtggtggaaggatcatcaatgttacaaatctaggggcaaaacagcctggagctaattctgtccctacttctgtaagtagagccgctggaattgcattaacaaaagcaatgtctaaagatttagctcaatataatatattagtgaacactgtacttatcggattaattaaaagtggacaacatcaaaatcggtttcataatgaaaaaggtgtagatattgaacagtattatgaggaaagaagtgggaatatacccttaaagcgattcggtgaagcagaagaagcaggaaacatcatttcctttttagcttctggtaaagcaagttatataacaggaacatcaatgaacatagatggtggaacatcaggagtactttag

SEQ ID NO: 199133 - DNA, 829 bp, Unknown
  Bacterial polypeptide expressing nucleotide sequence isolated from the Sargasso Sea
ggatatcccgtggctttaactttaggtggtatatcaattttgtttgcattgatttgcattccttttggaatatttgatccaaccatttttggaagcataccgattagaattttcggtattatgaataatgtaaccttgcttgcagttccattatttatttttatgggaactattcttgaaaaatcaggtattgctgcaagtatgttaaaaaatatggcattagcttttagaagtgttaagggcggtttgtctatttcaattattatggttggggctttgcttgctgcaagtacaggaattgttggagcaacagttgtgactatgggattaatgtctctccccattcttattaatcaaggatacgataaaagcttctctgcgggactagttgcatcaactggaacacttggacaaattattccaccatccattgcattagttttgcttggcgatgttatgtctaatgcttatcaaagagctcagaatgatatgggaattttttcacagcaaacagttactgttggcgatttatttattggagcaatagtgcctggtgtattaatttgtattggctatcttatttacactatttataaaaaccaaacaaatccaagtattaatgaccacactattgattcaaagattaacataataagtttatttaaaactttagctctaccattcctattaattttcttagtactaggttcaatctttgctggaatagctaccccgactgaagctgcggcaattggagcatttggtgcactaattattgcattagtaaatggaaaaattacttttgcatttgttaaagagtcttcagaaa

SEQ ID NO: 199134 - DNA, 616 bp, Unknown
  Bacterial polypeptide expressing nucleotide sequence isolated from the Sargasso Sea
atgccaacgaaaaaagagattattaataaacataaaaagaatttaagtatccttaaaaaacacaatgaagattattttatccacgactctccaaaaattagtgattcagaatatgacaaattaaaaattgatgctctaaagtttgaagaaaattacccatatttaaaaaaatacgagagcattaatagcatagtaggctcaaaacttttaaataaatttaaaaaagtaaaacatttaacgccaatgctctcattgtcaaatgcttttaatctagatgacatgaaagattttttaaaaaagattaataattttttaaataaaaaaaatgaaattattgagcttttttgtgagccaaaaattgatgggatatccgcaactataatttatgaaaatggaattttagtaaggggattatccaggggtgatggagagacaggagaagatattttagaaaatttaaaaacaatagataatttgccaaagaaaattatatcaaagaatgtaccacaacttttagaaattagatgtgaagtctatataggaaaaaaggattttacagatttgtctaataaatttgcaaatccaaagaaatgctgctggagggtcttaagacaaa

SEQ ID NO: 199135 - DNA, 419 bp, Unknown
  Bacterial polypeptide expressing nucleotide sequence isolated from the Sargasso Sea
caactagtagataaattagcaaaaaaagttgagaggctaaaagtagggcctggattggatgaagaatctgagatggggcctcttgtgaccaaagaacatttggaaaaagtaaaaagctacgttgatataggtgaaaaagagggagcagaacttgttgttgatggaagaaattttaaaatacaaggatatgaaaaaggattttttataggcggttgtttatttgataaagttacaaaaaatatgagaatttataaggaagaaatctttggtcctgtattatcagtagtaagagcaaaagattttgacgaagctttacaattagtgaatgaccatgaatttggaaacggtgtaagcatcttcaccagagacggagactctgccagaacattttctagtaaagcaaaaattggtatggttgg

SEQ ID NO: 199136 - DNA, 271 bp, Unknown
  Bacterial polypeptide expressing nucleotide sequence isolated from the Sargasso Sea
catgtcagaccgagtcgtcctcgtcaccggcgccgcgcgcgggctcggcgccgtcatcgccgaacgttttcatgcggccggctaccgtgtcgcgctggccgatatcgccgccgacgccattgaggcgcacgcacgcgaactcgacccgagcggcgaacgcgcgatcgcgctgccgctcgacgtcacgtcgaaacgcgatttcgaagccgcgcgcgatgcgctcgtcgcgcgctggggcgcgatcgacgtgctcgtgaacaacgcgggcgca

SEQ ID NO: 199137 - DNA, 630 bp, Unknown
  Bacterial polypeptide expressing nucleotide sequence isolated from the Sargasso Sea
aatgcagcaatggaaaggaaaaacagcctttatcaccggtgccagtaatggaatcggagcagctgttgcaacacggctcttggctgaaggaatgcgggtggttggatccgcccgtcgacacgaccgagttgcggcagtccttcagaaggccgatacctccggaggcaatagtcttgcggtccagtgtgatgttcgggatgagcaatctgttcaggaagcattttcacttgcaaaacaaacgtttggtggtgtggatgttttggttaacaatgcagggcttggtcatgcggcgacgcttgctgaaggtaaggttgacgagtggcgagaaatgcttgatgtcaatgtactggggttatgtatttgcacccgggatgctctagccgatatgcgatcgagaggtggtcgtggtcacattattcacatcggatcaatggctggtcagcgtgtgcctgctggagccggtctctattcagccacaaaacatgccgtccgcgcattgaccgaagcattgcgaatggagttgcgagaaaaaggtgactcaattcgggttggtgagatttgcccagggtttgttgaaacaggatttgcaagtaactacatgaagtctgaggaaaaagctcgtgaggtgta

SEQ ID NO: 199138 - DNA, 389 bp, Unknown
  Bacterial polypeptide expressing nucleotide sequence isolated from the Sargasso Sea
tgaaatcaatgaagaaatctttgggcctgtattacaccttgtttcatataaagaaaaaaatctagaaattgtcttacaagaattgaaatctaagggttttggattaacatttggaattcattctagaattgagagtaaagcaacaaagataagtaagttggtaggctcgggtaatagttatattaatcgagatatgattggagctgttgttgggactcagccattcggtggttccggcttatctggaactggccataaagctggcggtccaaattatttaattcaatttgtgaatgaaaaattagtgtcgattaataccgtagccataggaggaaacgcagagctacttaatctagaaactgaagatggcaattctcaaagaacttaag

SEQ ID NO: 199139 - DNA, 712 bp, Unknown
  Bacterial polypeptide expressing nucleotide sequence isolated from the Sargasso Sea
aatgaatatgtcaaattcgatgattccagtcagtagtccagataatacttctgccacgcacatgccttctgttgggcttggcttatggaaggtagatcctgcaagcgtaggtgaactgattcatgaggcgatcagtgttggctaccgacaccttgatagcgcgtgtgattatggaaatgaagcagaggttggaaaaggtatcgagcgtgtccttacatcaaacctgtgtcatcgtgaagatttgtgggtgacttcaaaactctggaataccttccatgaacccaaatacgtacgatcagcaattgaaagaaccttgcgagatcttcggctggaatatctcgatagttatctgattcattttccaattgccttagcgtatgtagcacctgagacacgctatccaccaggttggttttttgagccagatgcaccaaacccttccatgcaatcaatcaaggttccactagccgagacgtggggtgccatggaagaactggttgatgcgggactcgtacggactattggtgtgtgtaattttggtgtctcgctgttacgtgacttacaagctggagctcgaattcaaccgtctagtctgcaggtggagatgcacccaaggctgacccaaaaaaaacttctacgattttgtgatcaagaagatatcgccgtcacggctttttcaccgttgggtgcaccttcgtacgtgtcgctcggc

SEQ ID NO: 199140 - DNA, 300 bp, Unknown
  Bacterial polypeptide expressing nucleotide sequence isolated from the Sargasso Sea
tgttagaagatttatcagcgaaggggcagaagtcctaattgcagatatcaatcttgaagattcaaaaaaattatcagaaggaattggtgaaggcgttgattatatcaaatgtgatgtaaggcttgaggatgatattatttctgtttcagaaaaagcttatgaaatgtgggatcaggttgatgtgttggttaacaatgctggatctgaactcaatcagtcctatgataagatgacggaggcagaatgggacaatgttcttaacacagatctaaaagggccttggttaatgtgtaagcacat

SEQ ID NO: 199141 - DNA, 568 bp, Unknown
  Bacterial polypeptide expressing nucleotide sequence isolated from the Sargasso Sea
ttaattgatctcgtagtatttggaaaggcagcatctaaaaaagctaccgaattggttaaacctaattcaaaacatgaaataattcctgatagtgaaacacaaaaatctttagacagatttgataaattaagaaattcaaatggatcaacatcaacggcacatttaagaaatttaatgcaaaaaactatgcaaaataaatgcgctgtttttagaacaaataaaactttacaagaaggtgtcaacgaaattagaaaaccttgggatggtttaagcgatttatctgtaaaagatagatcactaatttttaatactgatttggttgaaacgttagagtttgataatttaataagacaatcaatggttacaatggcatctgcagagaatagaaaagaaagtagaggagcacattcaagagaagactttaaagagagggatgataataattggatgaaacacacacttgcttggcataaatcaggatcagttgatatagattatagggatgtacacaaacatacactttcaaacgatgttcaatactttccaccaaaagcaagagtatattaat

SEQ ID NO: 199142 - DNA, 706 bp, Unknown
  Bacterial polypeptide expressing nucleotide sequence isolated from the Sargasso Sea
tttgggtagagcatgtgctatcgctctatcagaaggagggtcaaatcttattattataagtagaactaaaaaagatttatctgaagtatctaaaattataaagaaaaataaatcaaaatgtaaatcctatgtatgtgatttaacaaattatggagaaattaaaaaaataataaacaagcagccaagaatagatattttggttaataatgcaggtaataatattcctgaacattttacaaaagtaaaaacaaaaaatatggaaaaccttgtaaaaattaatactatagctgcatttaatgttgctcagctatgtgctttaaaaatgatagaattaaaaaatagaaggaaaattggagcttcaattataaatatatcgtctcaaatgggacatgttggcggtcctattagaagtgtttataatatgaataaatttggattagagggtctaacaaaagggatggctattgatcttgctaaatataatataagagttaattcaatagctcctacttttgttattacgcctatgactagaaaatttctaaaaaataaaaaattcagaaaacaaactttaaataatattccattaggaagatttgctgaaatgtcagaagtatcttcagcggtagcttttcttgcatctgatgctgcttctatgattacagggacttcattattagtagatggcggatggacagcaaaataa

SEQ ID NO: 199143 - DNA, 818 bp, Unknown
  Bacterial polypeptide expressing nucleotide sequence isolated from the Sargasso Sea
agttgaaaagattgcttttactggtgggcccgagactgcaagacatatcattagaaattctgcagaaaatttgtcagaagtaagtctggaacttggaggaaagagtccggttgctgtatttgacgatgctcatcaagaaaatgcaattaatggaataacagcaggaatttttggagcaagtggtcaaagctgtatagctggatcaagactgtatttgcatgatggaatttataatgaatttttagacaaactttctgctagagctaataaaattaaaattggagctcctatggatcccgaaagtgaaatgggtcctctaagtaattttaaacaattagaaataattgaaaaaaatataagacttactgtagatcaaggtggaaaaataaaatgtggtggaaaaagacattcattttctaatgaaggatattatttttcacccacaataattgaatgtgataatcataatcttccagttgcagaaaatgagctctttggacctgtattgtctgtaatgagatttaaaacagaagatgaggtaatagaaaaaatgaatgataatcaatacgggttaagctcaggtgtttatacaagtgatttttcaagaggtttaagagtttcaaaagctataagggcaggtattacatttgtaaacacttatagattaatttcaccttcggctccttttggtggaattaaagacagtggctttggaaaagaagcaggagttgaatccattaaagattatacaagagttaaaacaacttggtattatacttctgacaagcccactttagatccgttctcgatgagataat

SEQ ID NO: 199144 - DNA, 793 bp, Unknown
  Bacterial polypeptide expressing nucleotide sequence isolated from the Sargasso Sea
gtaatttctgatccttatccaagaactttagatttaattttttctaagacaacattaaaagaactaaaaaccaaatataaaataatagttgctccaaaaaaaaataaaaaaattttttatgaaaataatattggcaaggcaacatttattatgggtcaaccaaatttagataaatatttgttgtctaaagcttcaaaattaaaatgtattataaatgtagaaagcaattttatggacaatttagactatgattattgtttcaaaaaaaatattcatgttattgcaacctcgccagtattttcaaaacctgtagctgaaattgctttaggtatgacattgtctcttctaagaaatatccacaatgcgcactttgattttattaaatcaaaagagaaatacggtttagaaagtaatttacaagcttcacttcttacaaataaaaaaattggtttactagggtttggagacttagcaaaatctttataccccttacttttaccattctcaaaaaatataaatgtatatgacccatggatacctaaaaataaaataaaaaaaattggatttaacccaattaatttaaacaagatgtttagtagttgtgaagtaatttatgttttagccacaataaccaaaaagaataaacatttaattgataagaaattattaaataaaatgaaatctggaactatttttattttaatgagcagagcagcaatagttaattttaaagatttgattaagagaattaaaaagggagatatttatgtcgcaaccgatgtctttccagact

SEQ ID NO: 199145 - DNA, 859 bp, Unknown
  Bacterial polypeptide expressing nucleotide sequence isolated from the Sargasso Sea
tttggagatccatggtggtaaagctttaactactcacaacttagttgagaaagtagcttttacaggaggtcccgaaactgcaagacatataatcagaaactctgcagaaaatttatctgaggtaagtttagagttaggtggaaaaagtcctgtagctgtttttgatgatgccaaacaagaaaatgcaattaatggaataactgctggaatatttggagcaagtggtcaaagttgtatagcaggttcaagattgtacttacaaaaaggaatttataacgaatttttagataagttagcatcaagggcagaaaaaattaaaataggtgctccaatggactctgatactgaaatgggtcctttaagtaactttaaacaattagaagcaatagaaaaaaatattaaattaactgttgaacaaggtggaaaaattaaatgtggtggtaaaagacatcctttttcgaatgaaggttattatttccccccaacaattattgagtgtgaaaatcataatctgccagctgctgagaatgaactttttggccctgtattatcggtaatgaaatttgatactgaaaaagaggtaatagaattaatgaatgataatcaatatggtctttcttcaggtgtttatactagtgatctcgctagaggaatgagggtatctaatgctatccgggcaggtataacatttgtaaatacttatagattaatttctccttcagctccttttggaggtatcaaggatagtggatacggaaaagaagcaggaattgagtctattaaagactacacaagagtaaaaacaacttggttctacacatctgacgaaccttcgctagaccccttctcaataagataa

SEQ ID NO: 199146 - DNA, 790 bp, Unknown
  Bacterial polypeptide expressing nucleotide sequence isolated from the Sargasso Sea
tttgtagaggactttatcgtagctgaagacattttcagtatctatggtatgggcacttttgagcttgggaacgcgcttgttgtggctggagtgagaatcgaaaatacgtcagttgatggtgaggcctttgatcaagatggcgccaaagtgacctccagcaacgagcatacttttgtatcgccctctctaaatatcaaatacggtctttcggaccagctgcttctgagaggagcattttggagatcactagccaggcctggattcaactctatcgcaccagctgtggaaatagaggttgatggagacgaagtatcaggaaaggttggtaatcctgatcttgaaccctatgaggcaagcaactttgacatctccttagagttttatggagatggcatgacttatatcgccgcgggggttttctacaaggatatcgacaacgcaatctacaaaacgattcagaaaacgggtacttttaatggtgtcacctttacggacgaagttgaaacttggcttaattccgatcagtcaacagttctgggtttggaattaaatttccaatatgggcttgagaatggactcttcatcgcaaccaatctgacgcatatgctagacaatgagagcacattccaaaacgacggggactctactttcacgactccatttaggaaattagctgacgataccgctaacgtgagcttcggttttgacaaaggaaaactggacgttcgactagctatgaactatcggagtgaatatctggattccttagctgacggcgaggacgatatcg

SEQ ID NO: 199147 - DNA, 688 bp, Unknown
  Bacterial polypeptide expressing nucleotide sequence isolated from the Sargasso Sea
gtagcaaaatacatttatgagaactgtgcaaaaaatgaaaaaagagttcaagcattagggggagctaaaaatcattgtgttgtaatgccagactgtgatttagatcaggcggttagtggtttaataggtgctgcctatggttcagcaggagaaagatgtatggctcaatcagttgcagtagctgtaggaaatattgcagataatcttgtaaaaaaattagccaaaaaagttgagttacttaaggttggctcaggaatggacaaaaaatctgaaatgggacctttggtaaccaaagaacatttggaaaaagttaaaggttatgttgatcttggagtcaaagagggagccaaactagttgttgatggaagaaaattaaaacttcaaggacatgaaaatggatatttcatgggaggctgcttatttgatcatgtaaagaaagatatgagaatttataaagaagagatattcggaccagttttatcagttgtgagagcaaaaagttttgatgaagcgctacaattagttaatgatcatgaatttggaaatggagtaagtatatttaccagagatggcgattcagcaagaactttttctaacaaagctaaaattggaatggtaggtattaatatacccatcccagttcctgttgcttttcacagttttggtggttggaaaagatcattatttg

SEQ ID NO: 199148 - DNA, 589 bp, Unknown
  Bacterial polypeptide expressing nucleotide sequence isolated from the Sargasso Sea
atggagcttggactaaaagataaggtagttttgattactggaggagccaagggaataggagctgcaacagttcgggcttttcttgatgaaaattctaatgttgtattcgttgaccttgattctgaatccggatctgcactggaaaaatcgttaggcacccgcggaaagttcattgaagctgagcttaatacccctgaatcctgcaagcaagctgttgaaaacacagtatccttttttggtggaattgacgtcttagtaaataatgcaggatttaacgatgggctgggtattgaaacccctcctgaaaaatttatggattctgtccgtacaaatctattgcatgtttattcaatgactcattattccctgccactactgcgaaaaagtcaaggatgcttggttaacatcggctctaaggtttctgaaacaggtcagggaaacacttctgcttatgctgctgctaaaggtgcaattcaggctcttacccgagaatgggcggttgcaatggcacctgacaacattagggttaattgcgtcttgccggcagaatgtcatacagaacagtatgaaaaatttttccaaaactagg

SEQ ID NO: 199149 - DNA, 484 bp, Unknown
  Bacterial polypeptide expressing nucleotide sequence isolated from the Sargasso Sea
aagtcatccacagataaaataattgaccgcttagataaaagtttacattcaaaaggtgatgtttctgtaagtgaagttagatatgcaatgcaaaatgcaatgcaaaaacatgcagcagtatttaggtcttctaagtctttgcaagaaggggttacaaatattaataaaatttgtaaaaatttagataatattggaattaaagatagatctcttatctttaatacagatttaatagaatctttagagttagaaaatttgatgcagcaagcattagttacaatgagatctgcagatcaaagaaaggagtcaagaggagcgcatgcacatgaggactttcctgatagaaatgataaagattggatgaaacatactttgatgtggttagacaaaaataataaatctaaattaggttacagagacgttcaattaaacactttgtcaaacgaagttaaaacaatacccccagtggcaagagtatattaaa

SEQ ID NO: 199150 - DNA, 694 bp, Unknown
  Bacterial polypeptide expressing nucleotide sequence isolated from the Sargasso Sea
atgtcaaggcgtgttatgattactggaggcgctagcggtattggaagagctttagctcaaaggtttaggtcgtgtggagatcgcatagccatatgtgataagtcccgaccaaatcttgaaagactaaagttagagatgccagaatcacttgttattaaggcagatgtaacgcaagtaaatcaaatgcaaaacttttttaaccgagttatcgaagttcttggagggatagatatattgatatctaatgccggaactagtggccctgcggaaaacatagaaaatttaaaattttcagagtggaaatcgtgtctggaaactaatttaaatggcgcatttttaaccagtaggtggggagccaaagttatgaaggatcaggaaagtggtcttattctcttcatttcatcaacttcaggtttacatggcgtcccattgcgatctccttatgtgacagcaaaatggggcttaattggtttaacaaaaacgcttgctatggagcttggccccaaaggcattcgtgtaaatgctatttgtccaggatcagttgaggggaagcgaatgaactcagttttaaaaatggagagctctgcaactggattaactgaagaagaaattgaacgcctaatacataaactctgtgtcgttaaaaaaatttgtaactgcgaaggatgtcgcagaccatggctgtattttagct

SEQ ID NO: 199151 - DNA, 328 bp, Unknown
  Bacterial polypeptide expressing nucleotide sequence isolated from the Sargasso Sea
aaagaaggtgctaaactagttgttgatggaagagatcataaacttcaaggttatgagaatggattttatattggtggttgtttatttgatcatgtcaataaagatatgagaatatacaaagaggaaatatttggcccagtattatcagttgtaagagttaaaacttttgaagaggctgcaaaattaattaacgatcatgaatatggaaatggagtaagtatttatactagagatggagatgctggaagaacattcgctagcaaaattcaggtaggtatggtgggtattaacgtacccataccagtgccgatggcctttcatagttttg

SEQ ID NO: 199152 - DNA, 747 bp, Unknown
  Bacterial polypeptide expressing nucleotide sequence isolated from the Sargasso Sea
tagctttgatacaagataaggttatagtaattactggtgcatctagcggaattggtcattcaactgccaaagcacttgcaaaaaaaggtgcaaaaatagttgctggagcaagaagattagatagactggaaactttgaaaaaagaaatcatcgatgacggtggagaaataactatctgtgaaacagacgtaaccaaaaaagcagattgtgataatttagttaaacaagcactagacaagtatggaactgtagatgttttggtaaataatgctggattgatgcctcttagttttgttaaatcactaaaagttgatgagtgggacagaatgatagatgtaaacatcaaaggtgtattgtactgcactgccgcagtcgtccctacaatgactgagaaaaaattgggccatatcattaacatttcatctgttgcaggaagaatcgtcttcccagcaggaagtgtttactgtgcaacaaaacatgcagtaactgcattctccgaaggtttgagacaagaactttctgtaagaaaaaacatccgagttactagtatagaacctggtgtcgtacagactgaattaacaaacacaatcaccgaagattctctacaaggattcattgaaaaaggtaaacaaatggaagcattacaagcagatgacatatcaaacgcaataatctttgcaattgatgcaccaaatcacatgaacgtaaatgaaattctaatcagaccaactacacaagatcactaat

SEQ ID NO: 199153 - DNA, 682 bp, Unknown
  Bacterial polypeptide expressing nucleotide sequence isolated from the Sargasso Sea
tttgtattttgatgaagatttaaatctttcacaaaagcaagttgaagatgttatagaaatatttaataccccattaacaggtgcttacaattgggactatacggtatctgataatagaattaaaaaactatatgaattaggtaaagaattaaattggaatggttctatagatttaaactgggaatatacacatccctctgatgaaaaaataattgagcctgatgaggaattgcctcatgaattgttagatgcatatcaaaatctatccgaagaagaaaaaatattatttgatagacataatacagctgagcttatgagccaatttcttcatggtgaacaaggcgctttattggtagcatctcagcttgcaagctgtgcaccaacgtataacgcaaaattatatgcagcctctcagacatttgatgaagcaaggcatgtagaagtttttaataaatatcttcaagataaaattgggatacattatccaattaatccatcattaaaattactattagataaaattcttactgatgagagatgggatcttaaatttattggtatgcaaattattatcgaaggcttagcacttgcagcctttcaaatgcttaaagctataacaaaagatcctttgttaaaacaattgcttcattatgttgttcgagatgaagcgaggcatgtaact

SEQ ID NO: 199154 - DNA, 520 bp, Unknown
  Bacterial polypeptide expressing nucleotide sequence isolated from the Sargasso Sea
aactaaaaaattaaaaataggttcaggtgataataataaaacagaagttactccattaatctcaactgaacaattacaaagggtttctaattattgccaatctggtattcaatcaggtgctaatctaattactggcggtgaaaagcacgtagaaggcaaaggaaattattttaaacctactatatttgataatgttgatccaaaatcaactatagcacaagaagaaatatttggtcctgtcacaactattttaaattttgaaactgaagaagaagcaataaatattgctaattcaactgattatggtcttgcttcaggtgtatttacatctgatgatcaaaaagccaagtggacagcagaaagaatagaagctggggttatatggcaaaatgattggtttgttgatggtgtaaacttaccaggaggaggttataaaaaatcaggatatggccgtgatggaggaattgatagtttgtatagttatggtcaaacaaaacgtgtaagtaaacgcttaaattaa

SEQ ID NO: 199155 - DNA, 835 bp, Unknown
  Bacterial polypeptide expressing nucleotide sequence isolated from the Sargasso Sea
aagtttgactcaaatatgtttcatggttgttcggtaattaatggaaatgaaatttctaaagaagacaacaaggtggctgctccttttgaccctaataaaattatagggaatgtgagtttcttaacagacaaggatattaaagaaatttcttttaaagagagtgatgattggaggcattcaagccttgacgaaagaacaaaaatttttaaaagaatctctgatcgttttgaggatgaaaaatataagtttttttaccttctaactaatgaggctgggaaaactctgaaggattgtgatgctgaagtaagagaatcaattgattttataaattattactcagcgcaagcaaaaaaaatctttactaatattgaattagaaagcccatctggagagaaaaactatcttaggcatgcaccaaaaggaacttttttatgtattagcccatggaattttccaatggcaatttttgttggccaagtatcagcagctttgctcactggaaatactgttattgctaagccggctgaggatacatctttaattgcatcagaaattgtgaaagttttccatgattgtggggtgccaaaggatgcattgcatttggtagttggtggaaaagacgcaggcaatgaattaacaaagatacatgcattgagcggtgttgcatttactggctcaacttcagcagctaaaaaaattaatatgaatctagcagaatcagacggaccaattaaaacgcttattgcagaaacaggtggtcaaaatgtaatgtttgtggattcttcttcaaaaaaagagcaagttattgacgatgttgtaagatctgctttttata

SEQ ID NO: 199156 - DNA, 427 bp, Unknown
  Bacterial polypeptide expressing nucleotide sequence isolated from the Sargasso Sea
tgggggcacaaatactgcaagtctaagattatcaatgcaaaaaacaatgcaaagtaagtgcgcagtattcagaacagaaaaaactttaaaagaaggtattgatgcaattagaaaaccttttgagggcttagcagacatatctgtaaaagataagtctcttttattcaatactgatttagttgagtctttagaatttgataacttaataagacaagctatgaccactatggactcggcttatcatagaaaagagagcagaggagcgcacgctagagaagatttttctaaacgggatgacaaacaatttatgaaacatactttagcatggcaaaatggtaaagaggtcaaagttaaatatagagatgtacattcaagaacattaacaaatgatgtacaatattttccaccaaaagaaagagtttattaa

SEQ ID NO: 199157 - DNA, 859 bp, Unknown
  Bacterial polypeptide expressing nucleotide sequence isolated from the Sargasso Sea
aaagttgagggaacggttcttccaatagataaacctaatatgcaagtaattactactagagttcctattggagttgtagcagcaattattccttggaattcccaaatgttattaaccgctgtaaagttagcaccagctcttgccatgggaaatactgtggtaattaaatcatctgaattagccccagcaacattatttgagtttgctaaattaattgaaaaaactggaattccaaaaggagttgtaaatattatttcaggttttggtgaaccttgtggaaaagctttaacctcacataatttagttgaaagagttgcttttacaggtggacctgaaacagctaggcatataataaaaaactctgcaaacaacttgtcccaggttagtttagaacttggtggtaaaagtccagttgcagtttttgaagatgctgaccaggagaatgctttaaatggaattactgcaggaatttttggagcaagtgggcaaagttgtatagcaggctcaagactttatatacaaaataccatttatgataaatttttagagaagattgttaatagagcaaataaaattaaattaggtcctcctatggaggctgagactcaaatgggtcccttgagcagcttaaagcaattagaaattattgaaaagaatattaaacttactttagatcaaggtggaaaacttaaatgtggaggtaaaagacatagcatgtcaaataaaggttactattttccacccacggtaattgaatgtgagaatcacaatttgccaacagcggaaaatgaattatttgggcctgtactttctgtaatgaaatttaataatgaagaagaggtaataaataagatgaaat

SEQ ID NO: 199158 - DNA, 792 bp, Unknown
  Bacterial polypeptide expressing nucleotide sequence isolated from the Sargasso Sea
aagaatgtgcaaaaaatgaaaagagggtgcaagctttaggaggcgccaaaaatcattgtgtagttatgccagattgtgatttagaccaagctgttaatggacttatgggcgctgcttacggttcagcaggtgagagatgtatggctcaatctgttgcggtagctgtaggaggaataggagataagctagtaagctctttagctaaaaaagttgaagctcttaaagttggaccaggtatggataaacattcagagatgggacctctagttacaaaggagcatttagctaaagtaaaaggatacgtggacattggtgttaaagaaggagcaaaattaattgttgatggaagaaattttaaaattcagggttatgaagatggctactatattggaggatgcttatttgacaaagtcacaaaagatatgagaatttataaagaggaaatttttggcccagtgttgtcagtagtaagagctaaagattttaatgaggctttgcaattagttaacgatcacgaatttggaaatggtgtaagtatatttaccagagatggtgactcagggagaacattttcatctaaagcaaaaatcggaatggttggtatcaatattccgataccagtccccatggctttccatagttttggtggctggaaaaggtctttatttggtgatcagcatatgcacggacctgaaggtgtaagattttacactaaattgaagacaatcacgtcaagatggccttcaggcctaagatctgatccagagttcgtcatgccaacaatgaagtaaa

SEQ ID NO: 199159 - DNA, 897 bp, Unknown
  Bacterial polypeptide expressing nucleotide sequence isolated from the Sargasso Sea
gatgagtatctcaaacaaggtggctattctgtatggaagcagatcctttccgaccaatcgaacaaaactagtgaatgggtcattgaagaagttaagaagtcagggcttagaggcagaggaggggctggcttcccaaccggtctaaaatggagtttcatgcctaaaaatgatgatcaaaaatacattgtctgtaattctgatgaaagcgagccagggacatgccacgacagagacattcttaaatacaacccacatgcgttggtcgaaggaatggcaatcgctggctatgcaattggagcaacagttggatacaactacgtcagaggtgaattcatacttgaatgttaccctcgcattgataccgctgttaaggatgcatacgatgcaggtttattgggtgtcaatgttttggattcgggtatagattttgacttatataatttcctcggtgccggtgcatatatatgcggtgaagagacaggactactcgagtcactggagggcaaacaaggaaaacctcgattcaaaccaccttttccagcaaattacggcttgtatggtaaacccacaactgtcaataacactcaaacccttgctaccatcccaaaaatactcgaaaaaggtgcaaaatggtacgcggactttggtactgaaaaatcacctggaacattgatcttttccatatctggccacgtgaataagcccggtaattatgaactacctctagggatttcttttgaagaagtcattgatgtggctggaggcgttctagatggaaaaaaattaaaagccgtaataccaggcggatcctccacaaaaatactgcccgctgaaatcatacaaaactgcaccatggattatgagtcccttcaagatgcagactctgctttgggaacc

SEQ ID NO: 199160 - DNA, 637 bp, Unknown
  Bacterial polypeptide expressing nucleotide sequence isolated from the Sargasso Sea
atggccgtcgctaattaccaaagacaagtggcgattgtgcttgacggagtagtcgaatcggcgccgacgatcaatgccaccgaattcaatggccaagccgtgatttcaggctcattcgatgaagccgaagcaaaaaacctcgcattagtgcttcgattcggagccctcccagttgagttcgaacgagacgacgtgcgcacggtttccgcgacactgggagaaggaacgctgcgcgcgggagtgatcgccgggttagtgggtttggcgttggtcggtctgtacatgttgctttattaccgattactcgggttggttgcgatctgcagcctcgcggtaagtggtgccacgctgtggtcgatcattgcttggttgggtgaaagtaaaggcttggctctaacgctggctggcgccaccggcatcatcgtctcaatcggtgttcaggtcgactcgaacatcgtgtactacgagagaatcaaagaagaagttcgacgaggtcgagcagtcagatcggctgccgccggcagtttccgggccgcattttcaaccattgtctgggcagacctagcctctctcattggcgcaggcgttctgtaccagctgaaaagcggaacagtcagaggtttcgcgctgtacctag

SEQ ID NO: 199161 - DNA, 866 bp, Unknown
  Bacterial polypeptide expressing nucleotide sequence isolated from the Sargasso Sea
attggcagagctattttctgaagcaggattaccagagggtgtgcttaatgtagttaatggagataaagaagtagttgatgctattcttacaaataaagatattcaggcggttagttttgtcggatcaactcctatagctaaatacatttatgaaaatgcagctaaaaatgaaaaaagagtgcaagctttaggaggtgcaaaaaatcattgtgttgttatgcccgattgtgatcttgatcaagctgtaaatggacttatgggagcagcttatggatcagcgggtgaaagatgtatggcccaatcagttgcagttgcagttggcaatataggggataagctagtaagtgaattagctaaaaaagttgaagctttgaaagttggacctggtatggataaaaattctgaaatgggaccactagttactaaagaacatttagaaaaagttaagagctatgtagatcttggggttaaagaaggagcaaaattagtagctgatggaagagatattaaacttcaaggatatgaaaacggtttttatattggaggatgtctttttgaccatgtaaaaaaagatatgcgaatatataaagaagaaatatttggaccagtactttcagtagtaagagctaaagattttgatgaagcatctcaattagttaataatcatgagtttggtaatggaacaagtatttatacccgtgatggagatgtaggtagaacttttgcaagtaaaataaaagtaggaatggtaggtataaatatacccatacctgttcctgttgcatttcatagctttggtggatggaaaagatctttatttggagatcagcatatgcacggtccagaaggagttagattttatacta

SEQ ID NO: 199162 - DNA, 712 bp, Unknown
  Bacterial polypeptide expressing nucleotide sequence isolated from the Sargasso Sea
ctccaactggacgtcgaggatgacgactcagtagacgctgcatttgaaaagccaggagatattgatgtccttgtaaacaacgctggtttgagcccgattggctcggttgaggaatttcaggtggatgcttggaagcaactgttcgaaaccaacgtattcgggttgattcgttgcacgcaggccgccctcccagccatgcgcgacaacgcttccgggcacatcatcaatatttcttctgtcgccgggcgagtagccataccgatgtttggtccgtactcgtcctcaaagtgggcggttgaggcgctaaccgaaaccctcgcctgtgaagctgcgattttcgggattcgcgtaagtcttgttgagcccggagccgtcgcaacacccatcagagagaaaactggtcgacctaatcgggacagcccatatcgccctgtagcaaaaaactggggttttagcgttgggtacgaccatgcttttccgtcagaacctgaggatgtggcggcttgcattgctcaactgattcgagatccttctcccccacttcgggtgacagtcggccggggcgtagaacagatggtggatttgcgatctgaccatagcgacaccgagtgggttgatctctggtcttcggagacttcaaatttcttgtcgacttgggagtcactcaccggcgatgatctgactgatctttcaaccaaaccagacagttgat

SEQ ID NO: 199163 - DNA, 355 bp, Unknown
  Bacterial polypeptide expressing nucleotide sequence isolated from the Sargasso Sea
ggtttttttatccaaccaactatatttgatcaggttagacctgaaatgatgattggtaaagaggaaatttttgggcctgtaatgtctgtgtttaaatgggatgactacgaaaaaatgctttctgttgctaatgaaattgaatacgggcttactgccatgattgtaacagatgatctaaaaatggccatggagactgcagaaagagttgaagcaggttatgtatggataaattcaactggacgctatcttggagcaccttatgggggttggaaagcaagtggcattggacaggaagaatgttttgaagaacttttgagttatactcaaatcaaaaacgtaaacatgtgctggtaaa

SEQ ID NO: 199164 - DNA, 451 bp, Unknown
  Bacterial polypeptide expressing nucleotide sequence isolated from the Sargasso Sea
atgtctgatctcaatctacattcaatagcaacaacaaaagaaaaagtctggtttatcacaggtgcaaaccggggcataggcgctgaaattgcaaaagcggcgctctctgccggagattctgtcgtagtcacaggccgcaatctgcagcaactcagagaaaagtttggtgattcagacaaagctttggcgttagctttggatgtcacagacatcgctcaggctctggaagcagtagaagcgactctcaaccattttggccgtattgatgtactggtcaataacgcaggttacggccaattaggtgtattcgaggaaattccacaagccgacgtagagcgtcagtttgccactaatgtatttggtctgatgaatgtcacccgcgctgtattacccctgatgcgggcgcagcgcagtggccgtatcttcaacctgtcctctatggcggcgcttt

SEQ ID NO: 199165 - DNA, 880 bp, Unknown
  Bacterial polypeptide expressing nucleotide sequence isolated from the Sargasso Sea
tggagttgttgcggcaattatcccttggaattctcaaatgttattaacagcggtaaaattagctcccgctcttgcaatgggaaacactgtagttattaaatcttctgaattagctcccgcaacattgttcgaatttgcaaaattaattgaaaaagttggaataccaaaaggagtggtaaatatagtttctggttttggtgaaccttgtggaagagcgttaacatctcacaaattagtagaaagagttgctttcactggtggacctgaaacggctagacatataataagaaattcagctgataatttatctcaagtaagtttggaattaggaggcaaaagtcctgttgcagtttttgaagacgctgatcaagaaaatgcattaaatgggattaccgctggtatttttggagccagtggacaaagttgtatagctggatcaaggctttatatacaaaatagtatttatgataattttttagaaaaaattgttaatcgtgcaaataaaattaagttaggtcctccaatggactctgaaacgcaaatgggtcctttaagtagtttgaaacaattagaaatcattgaaaaaaatatcaaacttactttagaccaaggaggaaacttaaaatgtggaggaaaaagacacacaatgtctaacaaaggatattattttccacctacggtgattgaatgcgataatcataatttaccaactgcagaaaatgaattgtttggacctattttatctgtgatgaaattcaaagatgaaaaagaagtaataagtaaaatgaatgacaatcagtatggactatcctcaggagtttatacaaaagatattaataggggtctaagagtttcaaatgcaatacgtgctggaattaca

SEQ ID NO: 199166 - DNA, 694 bp, Unknown
  Bacterial polypeptide expressing nucleotide sequence isolated from the Sargasso Sea
tatgcgccttaaagataaagttaccctagtgaccggtgctggttctggatttggggccgggattgcccgcctctatgccagtgaaggggcaaaggtcgttataaatgacatcaacgacaatgccggccaaaccgttgcccaagagattcggcaggctggaggcgaagccacctacgtacatgctgacgtggcgtctcgggaagagacccggctaatgatacagtccgcagtcgattttggaggacgcttagatgtgctggttaataacgccggcttcacccaccataacaaacccttcctagatgtaactgaggatgaatttgatcgaatctacgatgtcaacgtaaaagcgatatttcacgcacttcaagaggcggtccccattttccttgaacaaggcggtgggtccgtcatcaacacctcgtcgactgccgctattcggccgcgaccagggctaggtgtctactgtagttcaaagggcgcggtaaacaatctcacgaagtcgctggcgatcgaatttgccgacaagaacattcgcatcaatgcagtatgtcctgtcatcggagaaacggggctattggaaacttttatgggcgctcccgatactccggaaaatagaaaaaaatttcaggcgaccattcccatgggtcgattatcaacaccagaggacatcgcgcgtgccgctctcttcctc

SEQ ID NO: 199167 - DNA, 674 bp, Unknown
  Bacterial polypeptide expressing nucleotide sequence isolated from the Sargasso Sea
gtaagcgcgggcagagagctggccgaactggatgacatgcttgtcacccggctcgatgtccaggaccacgccagcattcaggcggctattgctgcagcaatcgagcgcttcggcgcggtcgacacgctcgtcaacaacgccggcttcagcctctacggcgtgttcgaatcgctgtcgcgcgagaaaattcgcgatcaattcgacgtcaatgttttcggcgtcatggacgtgaccagagccatactgccccattttcgtcagcgtcagcgcggcacgttgatcaatatcagctccggcgccggcgtattcggcctgccgatgatctgcgcctacaacgccagcaagttcgcgctggaggggttttccgaatccctcgccttcgagctcgcaagccagaacatacgggtcaaactggttgaaccgggcggagggctcgatacccgtttttcccagcgtgtcgccgccgaagccagtctcactgagacaccgaaggattactctgctttcgttgccggcgccgagcgcgtcttcacctccattcgtgcgacgcgaaacgccacatccgagcaagtcgccgacgtcattttgcaggcagccagcgatgacagtgatcgtctgcgttatgtcgccaccgaagacatcaagccactggtaaaagcccgccgggaaacctc

SEQ ID NO: 199168 - DNA, 657 bp, Unknown
  Bacterial polypeptide expressing nucleotide sequence isolated from the Sargasso Sea
gatgcatggctcaatcagtagcagttgcagttggaggaattggtgacaagttagtaaatgaactatcaaaaaaagtcgaagctttaaaagtgggtcctggtatggacaaagaatctgaaatgggaccacttgttacaaaagaccatttagaaaaagtaaaaggatacgttgatattggtgttaaagagggagcaaagctaattgttgatggaagaaaaattaatattcaagggtatgaaaaaggcttttatattggaggatgtttatttgaccatgtaaaaaaagatatgaggatttataaggaagaaatttttgggccagttttatcagtagtcagagcaaaaaactttgatgaagcccttaaattagttaacgaccacgaatttggaaatggagtaagtatttttacaagagatggagatacagggagaacgttttataacaaagcaaaaataggcatggttggaataaacatacctatacctgtgcctatggcatttcatagttttggtggatggaaaagatctttgtttggagatcaacatatgcatggaccggaaggtgtcagattttacacaaaacttaaaactatcacctctagatggccttcgggatcgaggtctgatccagaatttgttatgccaacaatgaaataat

SEQ ID NO: 199169 - DNA, 754 bp, Unknown
  Bacterial polypeptide expressing nucleotide sequence isolated from the Sargasso Sea
attgaaagaattgctttcactggtgggccagaaacagcaagacatattattaaaaattcagctgaaaatttatctcaagtaagcttagagttagggggcaagagtccagttgcagtttttgaagacgcagatcaagaaaatgccttgaatggtataacagcaggaatttttggagctagcggtcaaagttgtattgcaggatctagattatatttacaaaaaaatatttataataattttttagataaattagttaatcgtgcaaacaaaataaaactgggtaatccaatggactctgatactcaaatgggtccattaagtagtttaaaacaactagaaataatagaaaaaaatataaaacttacagtcgatcaaggaggaaaagtaaaatgtggaggaaagagacatagtttatcaaataaaggatactattttcccgctacaataatagaatgtgaaaatcataatcttccaaccgcggaaaatgaactttttggccctgtattatcagtaatgaaatttgaaacagaagaagaagtggttaacaaaatgaatgacaatcagtatggtttatcctcaggtgtttatacaaaagatttaggtagaggattaagagtttctaaagcaatacgagcaggaatcacatttgtaaatacctatcgattaatatcaccttcagctccatttggtggaatgaaagatagtgggtatggcaaagaaaaggggatcgaatctattaaagattatactagaa

SEQ ID NO: 199170 - DNA, 838 bp, Unknown
  Bacterial polypeptide expressing nucleotide sequence isolated from the Sargasso Sea
gatgtttccaatggccatagcctgcggaaacacgttcattctaaaaccatcagaaaaagatccttcatgttcgataaggttagcagaattgttttttgaagctggattgccagagggagtattcaatgtcatcaacggcggaaaagaatcagttgatgctataattaatcacaaaagtatatcagcagtaagttttgtaggctctactcctatagcaaaatatatatatgaaaattgtgcaaaaaatgaaaaaagagttcaagcgcttgggggagcaaaaaatcattgtgttgttatgcccgactgtgatctagatcaagcagtcaatggcttaatgggtgccgcttatggctcagctggggaaagatgtatggctcaatcagttgcagttgcagttggtaatattgcagattcacttgtaaataaactggcaaaaaaagttgaaattttaaaaattggaccaggtttagataagaaatctgaaatgggccctttaattacaaaagaacatttacagaaagttcaaaattatgttgatataggcgttaaagaaggagccaaactaattgtagatggaagaaaattaaatttgcaaggcttcgataaaggattttttatgggcggttgtttatttgatcatgttaaaaaaagtatgaaaatttacaaagaggaaatattcggccctgtattatctgttgttagagtaaaaaattttgatgaagctcttaaattagttaacgatcatgagtttggaaatggtgtaagcatttttaccagagacggagatactggcaggacattttcaaacaaagtaaaaattgggtatggtaggtattaa

SEQ ID NO: 199171 - DNA, 623 bp, Unknown
  Bacterial polypeptide expressing nucleotide sequence isolated from the Sargasso Sea
tgtagacagtattgctgatgagctctgtgatcttctaaccaaaaaagctgagtcactcagaataggtccaggaaatgaacctgaaaatgaaatggggccgctcataactgatgatcataaaaataaagtcattgattatattcaacaaggcgaagacgctggggcaactgtattattagatggacgtgatcatgaagtcacaagcaaacccggatttttcctaggccccacgctctttgatcatgtcaatccagagatgagtatctataaagaagaaatatttggtccggttctagttgtactcagagtgaaagactttaatgctgccattaaactggcgaatgaacaccaatttggaaacggagtcgccattttcaccaatcaaggctcaaaggctagagaatttgttcactcagtcgaggttggaatggttggcatcaatgtcgcaatacctgtgccgctgtctttttatacatttggtggatggaaagactcaatttttggttcatccaatatttatgggatggacgggattaggttttttacaagaacgaaaacaattacagccagatgggttgatgatgatggatcaattaatctctcaatgccaacagttaagtaga

SEQ ID NO: 199172 - DNA, 854 bp, Unknown
  Bacterial polypeptide expressing nucleotide sequence isolated from the Sargasso Sea
aatgggcttaatttatccaagcagttttcctactaacgaagcttcagctggtagcttctctgattggaaaactctttcttacttagcacttgtaaattattcatttaaagataaatatattgtcgatttgtcatacagaaatgatggttcttcaagatttgcagctgactacagatttggtaatttctattctgcaggtcttgcatggaatatatctaatgaaaactttttagctgacagcgaagtaattgataatctaaaaattagagcttcatatggtgaatctggaaacaatgctgttggtttaaatacttatcaagcactattttcttatagcggatcatacgacgacaatggtacaattgttccatctggattctcaaatcctataatttcatgggaaactgcagaacttaccgatattggttttgatttcggtttattcaaaaatagagtttctggaagtttcaactattacatcaaagatactgaagggttacttcaaagtgttcctttatctcttacgactggccacagctcatatacaatgaatgttggtgctgtaagaaattctgggattgaaatagagtttgacgctactgtagctaaaataggtgattttagttgggatctttacggtaattatgctaccaatgataatgaaatcttggagcttgctaaagatgcgcaaggtaatgacatcaacttggatggaggttatcaagctagtagagttggtaggtcgatccgtgcatggtatctaagaacctggggtggtgtagattcctctgatggtagaccatattatattgttggtggtgatgaaacacctgaacaaggctattctgatgaga

SEQ ID NO: 199173 - DNA, 275 bp, Unknown
  Bacterial polypeptide expressing nucleotide sequence isolated from the Sargasso Sea
aatgagtaaaattgatagaagagattttattaatggtagtttaatgctcttcggctcttcggttatgccggttggaagcagcatgggtcaaaatcctatagatctatctaattcgagttatccgccagcacttaatgggcttaggggtagtcaccctggatctaacgagagtgctcataaaaaagcctggacgggcaataatgattggggcacgagaaacctcctagacgaagagtatgatttggttgtagttggtggaggaataagcgggcttg

SEQ ID NO: 199174 - DNA, 452 bp, Unknown
  Bacterial polypeptide expressing nucleotide sequence isolated from the Sargasso Sea
tttagatggaagaggtataaagattcagggatatgaaaatggcagttttgttggcccaactttatttgataatgttacggaaaagatgacaatatataaagaggaaatttttggtccagtgttatcagttgttagatcaaaaacctatgaagaagctataaatctcgttaacaaccatgcatttggaaatggaactagtatttatacttcagatggagaaatttctagacactttacaactaattgcaaaataggaatggttggtataaatgttcctattccagtgcccatggcatttcatagttttggaggttggaaacaatcactatttggagaccattcaatgcatggcacagagggtataaaattttttactaaacttaaaacagttacctcaagatggccaaaaagcattaggtcaggccctgagtttgaaatgcctacaaactaga

SEQ ID NO: 199175 - DNA, 721 bp, Unknown
  Bacterial polypeptide expressing nucleotide sequence isolated from the Sargasso Sea
ttggcagtgatcactggcggagcctctggaatcggtctaggcgcagtaaaacgttttttaaatgaaggatatgaggtattgagcttagatgctaataaagaagctggagataaatcaatcaatgaacttaaatcagatacttgcaaagtaaattttattcattgcgatattacaaatcattctcaaattgagtctatttttaatgccctattagaggaaaaacgccctgctaaagtactaattaattgtgcaggcatcagcccagcattgaatcccttacacgaatactcagtagacgaatggctcagaaccataaacataaatttacatggaactttttatgcctgtagagaattcttaaagcttgctactgcgatgaacattaaagaaggttccattgtgaatgtggcatcgataatgggaacaagagctagtgcagctcaggcttcgtatggtgcctccaaacatgccgtggttggtctcaccaaatcaattgcgcaagactatgcaacgatgaacataagggcaaatgcaatcggtccaggtgtcatagatacaccaatgaatacagaattaatgaaagacgaaaatgttatgcagtaccttttacaaagagttcctatgaaaagagtggcttctgcagatgaagtggctaatttaatatattttctagcatcatcagaagcatcttatattaccggatcttattacccccattgat

SEQ ID NO: 199176 - DNA, 728 bp, Unknown
  Bacterial polypeptide expressing nucleotide sequence isolated from the Sargasso Sea
ccgtgcgctcagcaatgccgaggtcaaggacctggtcggtatgtggggtgaggcggcacgccgcgttgccgaggcaggtttcgatattctcgaaatacacgcggcgcacggctacctaatccaccagtttctgtcgccatacgcgaatgtgcggaacgacgagtatggcggctcggaggaaaaccggatgcggttcgccacggaagttgtagaagccgttcgtgcttactggcctgccgataagccgctcttcatgcgcttgtccgtcgaggacaatgcaggttggggacctgaagagagtgttcgtctggcacaacgcgtcggcccgatgggcgtggacgtcatcgactgcagctccggcggtatgatgggcagtcccgtggtcggcaaggacatgcgccccggctataattaccaggtgccctatgcggagaagcttaagcgagaaagtggggtcatgagcatggcggtcggcatgatcgtgcatgccgaccaggcggagaaaatccttcaggacggccaggccgatcttgtcgccttggctcgagaaattctctataacccgaattggccgatggacgcggcgcgcaagctcgggcttgagcgggacttcgaaagcgtgccgccacagcagtcttactggctcgccaagcgggcgcagtcgatcgaagatatggtgccctcgacctatcaggtcgggatcgacgggaaggacgggtcgtcctagc

SEQ ID NO: 199177 - DNA, 455 bp, Unknown
  Bacterial polypeptide expressing nucleotide sequence isolated from the Sargasso Sea
tagatttgatcaattaagaaatggaaatggttccaacaaaacttctgaactaaggttatctatgcaaaaaacaatgcaatcaaaatgtgccgtatttagaactgaaaaaacactaaaagaaggtgttgatgaaattaaaaaaccttttataggaatggagtctatatctgtaaaagataaatctctaatttttaatactgatttaatggaaacccttgaatttgataatcttattcgtcaggcgattattactatggagtcagcgtattccagaaaggaaagtcgaggggcacatgctagagaagattttcctaaaagagatgatgtgaattatatgaaacacactttaagctggcacagtggtaaagaggttaaaattaattatcgaaaagtaaatttatcaaccttaacaaatgatgttcaaacttttcctccaaaagaaagagtttattaat

SEQ ID NO: 199178 - DNA, 574 bp, Unknown
  Bacterial polypeptide expressing nucleotide sequence isolated from the Sargasso Sea
ttcccttcttgacttagtagtttttggaaagtctgctgcaaaaagatgttcagaaataatagatagtagtaaagaaaaccctcatgtggatataaatattatcgaaaatcttatccaaaaattccaaaaaataagaaatgctaatggaacaaaaaaggtatcttcaattagattagagatgcaacacacaatgcaaaatttctgtccagtatatagatctgagaaaaaaatgcttgaggggaaaaagaaaatgctttcacttttagaagatttcaataatataaaaattaaagataaaagtcttgtctggaacaccgaagtagtagaggcacttgaattaaaaaatttaatatctcaatcaatagtaagtattgaaagtgctttagttagaaaagaaagcagaggagcgcattctagaattgattttcaaaaaagagatgataaaaaatggcttaagcattcagttatatgggttgacgagaaaggtaaaactaataccaagtttagaaaagtaaatctcaaaacaaattcaaaagaaataaaaactattgaacctaaagcaagagtttattaa

SEQ ID NO: 199179 - DNA, 652 bp, Unknown
  Bacterial polypeptide expressing nucleotide sequence isolated from the Sargasso Sea
aatgtatcttaaaaattataatttaaaaaataaatattcattcgtaactggtgctggtaaaggtttaggaagagcttgtgctattgcgttagctgaagctggttcaaacctaattatagtgagtcgtactcaaaaagatcttaatgaagtttctaagaaagtaaaaaaatacaaagttaattgtaaatcttatgtgtgcgatgtaacaagttatcaacaagttaaaaatattataaataaacaaaaaagaattgatgttttggtaaataatgcaggaaacaatattccaggacattttaccaaagttaaaactaaagatatggagcatcttgtaaaaattaattcaattgcagcatttaatgttgctcaattaagtgctctaaaaatgataaaattaaaaaacagaaaaaaagttggaggttctataataaatatgtcttcacaaatgggtcatgttggtggtcctataagaagtgtatataatatgaacaaatggggcttagagggactcactaaaggtatggctttggatttagctaaatataatataagggtaaatgctgttgcacctacatttgtggtaacttcaatgacaaaaaaatttttaaaaaataaaaaattcaaaagagaaactttgaaaaatattccatta

SEQ ID NO: 199180 - DNA, 326 bp, Unknown
  Bacterial polypeptide expressing nucleotide sequence isolated from the Sargasso Sea
atattcaaaagtagaaagctcaatggatgacatagatattaaagacaaatcattaatttttaatactgacttggtcgaagctttagagttacacaatttaatggctcaatcaaaagttactcttcattcagcgttgaatcgaactgaaagtagaggtgcacatgcaagagaagactataaagaaagagatgataaaaattggttagttcattctctagcttggttaaacgataagggagatgtgagcatgggttctagaggtgttcatatgaatactctaactaatcatgttcaaccaataccacctaaaagaagagtttactaat

SEQ ID NO: 199181 - DNA, 668 bp, Unknown
  Bacterial polypeptide expressing nucleotide sequence isolated from the Sargasso Sea
agccggagaaagatgtatggctcagtctgtagcggtggctgttggcagtgttggagataagctagtaaaaaatttagcaaaaaaagtcgaaactttaaaagtaggtccaggaatggataaaaaatctgagatgggtcccctcgtaactaaggaacatttatctaaagtaaaaagttatgtagatataggtgaaaaagaaggtgcaaaattgatagtcgacggtcgaaatttaaaacttcaaggatatgagaatggatattatatggggggatgtttgtttgatcacgtaacttctaaaatgagaatatacaaagaggaaatatttggaccagttctttctgttgtacgagctaaagatttcaatgaagctttaactttggttaatgaccatgagttcggaaatggagtcagtatttttacgagagatggtgactcaggaagaactttttcaagtaaagccaagattggaatggttggtataaatattccaatacctgtgcctatggcttttcatagttttggtggatggaaaagatcattatttggagatcaacatatgcacggaccagaaggtgtaagattttatacaaaattaaaaacaattacatccagatggccttcgggattaagatcagatccagaatttgtcatgccaacaatgaaataag

SEQ ID NO: 199182 - DNA, 687 bp, Unknown
  Bacterial polypeptide expressing nucleotide sequence isolated from the Sargasso Sea
atattgggggtaccgcgcttgaaatggatgtacaaaaccaagaacatatagacaaggcaataaaccagataatttcagagcaaggtagagtagatgtgcttgtcaataatgcaggtttaggtgtttatggtgcaattgaagatgtatcaatggaagatatttattatcaatatgatgtgaacctttttggtttggcaagagttacaaaagcagttttaccttacatgagagaaaaagaaagtggattaataataaatataagctctgtattaggtgaaacatatggaccattagctggttggtatttatcaacaaaacatgctttagaaggatggtcagatgcactgagagtggaactgaaagagtttgatatcgacgttgttgttgtacagccaggtgctattaataccaatttttcaaatgttacaaaaacatatattgataagtatagagaaaactcagcttaccaacatctttatggagaacctataacagatactggaaatgaggttttatcaaaccaatcagatccaattgttattgctaaggtaattaataaggcaatgaatgcaagaaatcctaaaacaaggtatgctgctggagcatatagtaaaattggtatatttttgcgtaaaattatgacagataagatgtttgatcgatttatactttttattagtgattaga

SEQ ID NO: 199183 - DNA, 578 bp, Unknown
  Bacterial polypeptide expressing nucleotide sequence isolated from the Sargasso Sea
aaattcattaatcgatcttgttgtttttggcaaagcagctagtctaacatgtaaagaaaaagtaaaaccaaattctaaaaaaattgaaattagtaaatcaaaaacagataatattattgagcgatttgataagattagaaacagcaaaggaaactctacaactggagaacttcgtacttccatgcaacatataatgcagcaaaaatgcgcagtatttagaacacatgatctcatatcaaaaggtattgaagaatattcaaaagttgagagctcaatggatgacatagatattaaagacaaatcattaatctttaatacggacttggtcgaagctttagagttacacaatttaatggcacaatcaaaagttactcttcattctgcattaaatcgaactgaaagtagaggcgcacatgcaagagaagattataaagaaagagatgataataattggttagttcactctttagcctggttaaacgataagggagatgtgagtatgggttccagaggtgttcatatgaatactctaactaatcatgttcaaccaataccacctaaaagaagagtttactaat

SEQ ID NO: 199184 - DNA, 370 bp, Unknown
  Bacterial polypeptide expressing nucleotide sequence isolated from the Sargasso Sea
aatgagaatttataaagaagaaatatttggacctgttttatcagttgtaagagtaaaatctttcgaagaagctgcaaaattaattaacgaccacgaatatggaaatggagtgagcatttatacaagagatggcgatgcgggaagaacgtttgcgagtaaaattcaagttggaatggttggtgttaatataccaattccagtaccaatggcttttcacagttttggaggctggaaaagatctttatttggagatagtgcaatgcatggaatggaaggtataaaattttatacaaaattaaaaacaatcacttcaaggtggccatcaggtattcgatctaatgcagaatttgtgatgccaacaatgaaataa

SEQ ID NO: 199185 - DNA, 610 bp, Unknown
  Bacterial polypeptide expressing nucleotide sequence isolated from the Sargasso Sea
gataaaattaaaacaaagttattgggaagaaacggctaaactaaatgttgggccttatacagatgaaaaaagtgactttggtcctttaaataataaagcacattttgaaaaggttttaggatacatagatgccggagaaaaagagggtgcaaaattattgagtgatggaagaaattttaaaaaacaaggttatgaaaatggatattttgtcgggccaacaatttttgatgatgtaaaacctgaaatgaaaatttataaagaagaaatctttgggccagtgttaagtatgatgacaacagatacttatgaagaagctcttaatttagttaatgaacatgaactaggaaatggagcagctgtttttactaaaagcggaaacattgctaaacactttactgaaaatgctaaaatcggaatgataggagtgaatgtaccaattccagtcccagttgcttaccacagttttggtggttggaaacgatctttgtttggagatcattcaatgcatggacctgaaggtgtaagattttataccaaacttaaaactgctacagtgacttgggtagaagataatgcaggacctgaatttacaattccagttttatcttaa

SEQ ID NO: 199186 - DNA, 285 bp, Unknown
  Bacterial polypeptide expressing nucleotide sequence isolated from the Sargasso Sea
tatgtatcttaataaaattagcttaaaaaataaaactgctttggttactggcgcaggaaaaggaattggaaaagcctgtgcaatcgctttggctgaagctggcgcaaatcttattattataagcagaacacaaaaagatttggatattgtttcaaaaataattaaaaaatttaaatcaaaatgtgtatcttatgtttgtgatgttactaactataatcaaataaaaaatattattaataaacaaaaaaaaatcgatattttagtaaataatgctggaaataatat

SEQ ID NO: 199187 - DNA, 560 bp, Unknown
  Bacterial polypeptide expressing nucleotide sequence isolated from the Sargasso Sea
ttattcttcacttggtgctagaaaatctagaggtacgttaaccatacagctaactggaaatattaaaaatggtggcctgattgaggttccatttggaataaaactaagcgaggttttgtatgattatggtatgggtactataactggaagaccgataaaagcagttcaggtaggtggtccactaggagcttattggtctgaaaagttatttgatactcctcttgattatgaaacatttcaagaaaatggaggaatgattggtcacgggggaattgttgtttttgatgatcatattgaccttaggtttcaagccaaatttgcaatggagttttgctcttttgaatcatgtggtaaatgtactccttgtagaatagggtctataagaggaaaagagatccttgataaaataatttttggtgacaatgttaaaaataatattaaacttttaatggatttatgtgatgttatggaacatggttctttatgcgcttttggtggtttaattcctgttccagtaaagagtgcaattgagaattttaaggaagattttatagattaag

SEQ ID NO: 199188 - DNA, 946 bp, Unknown
  Bacterial polypeptide expressing nucleotide sequence isolated from the Sargasso Sea
gttaaatttagctcctgggcgcttgctatgggaaatactggtggttattaaatcttctgaacttgcgcctgcaacactatttgaatttgcaaaattaattgaaaaagttgaattacccaaaggagtggtaaatattgtttcaggttttggagagccttgtggaagagctttaacttcacacaaattagtagaaagagttgcctttaccggtgggccagaaactgcaagacatataataagaaattcagctgataatttatcacaagtaagtcttgagttaggtggcaagagtcctgttgctgtttttgaagatgctgatcaagaaaatgcattaaatggaattactgcaggaatttttggagcaagtggacagagttgtatagctggatcaagactttatatacaaaacagtatttacgataattttttagaaaaaattgtaaatagagcaaataaaattaaattaggacctcctatggatactgaaactcaaatgggtcctttgagtagtcttaagcaattagaaataattgaaaaaaatattaaacttactttggatcaaggaggaaaactaaggtgcggaggtaaaagacatacgatgtcaaataaggggtattattttcctcctacgataattgagtgtgataatcacaatttaccaactgcagaaaatgaattatttggacccattttatctgtaatgaaattcaatgatgaaaaagaagtaataaataaaatgaatgataaccagtatggattatcatctggagtttatacaaaagatatcaacagaggcttaagagtttcaaatgcaatacgagcaggaattacatttgtgaatacttatagattaatttcaccatccgctccattcggaggaatgaaagatagtggatatggaaaagaagcaggagtagaatctataaaagattataccagaataaaa

SEQ ID NO: 199189 - DNA, 595 bp, Unknown
  Bacterial polypeptide expressing nucleotide sequence isolated from the Sargasso Sea
ttttttgattttgcaactcatccaacttggtctatttctactttactgaatggcattcctaaaccaatgaactatgtaacatctaaaagtggagatggtatttttaaaagaaaagaaagtagaggtactacagattgggatacacttaaaagagtaagagataaatggaagggtaaacttataattaaaggagtaatgtctcctgatgatgcaatacaaataaaagaggcaggggctgatgcaattcaagtttcaaatcatggtggtagacaattagatagtgctacggctgcaataaatatgcttccactaattagaaaatcggtgggaagtgattttcctttaatctttgatagtggaataagaagtggcagcgatatagtgagagcgcttgcatttggtgccgattatgcaatgattggtagacccgtgatgtatgcaatgggagctgatggaagaaaaggattaaggagaattgtagaaattattaaagaagaagctagcactacactcgggttagtaggattaaatgatattaatgatgttacttctaatatagtaatagatagtactgtaaataaggtaaattactaaa

SEQ ID NO: 199190 - DNA, 676 bp, Unknown
  Bacterial polypeptide expressing nucleotide sequence isolated from the Sargasso Sea
atgaactctcaaatgttcttaacagcaactaaattagcccctgcccttgcaatgggaaatactgtggttataaaatcctcagagcttgcacctgctgttttgtttgaatttgcaaaacttattgagaaaactggcatacctaaaggagtggttaatgtcattacaggttttggcgatccttgtggtaaaactttaacaacacataatcttgtagagaaaattgcatttactggaggaccagaaactgcaagacgtatcattaaaaattcagcagaaaatctctctgaagttagtttggagcttggtggaaaaagcccagttgcagtatttgatgatgcggagcaagaaaatgcaattaatggaataactgctggaatttttggagcaagtggacaaagctgtattgcaggttcaaggctttacattcaaaaaggaatttataacgaatttttagataagctttctagtagagcttccaaaataaaaataggagctccaatggatctggatacagagatgggtcctttaagtagttttaaacaattagagacaattgaaaaaaatataaaagatacggttgatcaaggtggaaaaattaagtgtggtggtaaaagagactccttttcaaacaaaggatactacttcccaccaacaattatagaatgtgataatcata

SEQ ID NO: 199191 - DNA, 505 bp, Unknown
  Bacterial polypeptide expressing nucleotide sequence isolated from the Sargasso Sea
gaacacctcatgagggaaatttctgagtcagaaacacaaaaatgtttagatagatttgataaacttagaaatgcacaaggaaataatagtactgcagaacttagactttcaatgcaaaaaaccatgcagtcgaaatgtgcagtttttagaacagaaaaaaatcttaaagaaggtgttgatgagattaaaaaaacctatgatggtatggactcaatttcagttaaagataggtctttagtatttaatactgatttagttgaaacattagaatttgataatttaataagacaagcagtaactactgtagaatctgcatatcatagaaaagagagcagaggtgctcacgcgagagatgactatccaaaaagagatgacgaaaagtttatgcaacatactcttgcttggtgtgatggaaaaaatacaaagattagttacagagcagtacacaaatcaactttaacaaatgaagttcaatattttccaccacaagagcgagtatattaat

SEQ ID NO: 199192 - DNA, 682 bp, Unknown
  Bacterial polypeptide expressing nucleotide sequence isolated from the Sargasso Sea
gctgcttacgggtcagcaggtgagagatgtatgcttcaatctgtagcggtagctgtaggagaaataggagataagctggtaagttcattggctaaaaaagttgaagctcttaaagttggacctggaatggataaacaatcagagatggggcctctaataacaaaggagcatttagcaaaagtaaaaggatacgtggacattggtgttaaggaaggtgcaaaattaattgttgatggaagaaaatttaaaatacaaggttatgaaaatggctactatattggaggatgcttatttgacaaagtcacaaaagatatgagaatttacaaagaggagatattcggtccagttttatcagttgtaagagcgaaagattttgatgaagctcttcaactagtaaatgaccatgaatatggaaatggggtaagtattttcactagagacggggactctggtagaactttttcaagtaaagcaaagattggtatggtgggaataaatattccaattcctgtaccaatggcattccatagctttggtggttggaaaagatcattattcggtgatcagcacatgcatggcccagagggagttagattttataccaaattgaaaacaataacatcaagatggccatcgggattaagatctgatcctgagtttgttatgccaactatgaaataaa

SEQ ID NO: 199193 - DNA, 780 bp, Unknown
  Bacterial polypeptide expressing nucleotide sequence isolated from the Sargasso Sea
ccagacatataattagaaattcagctgaaaatttatctcaagtaagtcttgagttaggtggcaagagtcctgttgctgtttttgaagatgctgaccaagaaaatgcattaaatggaattactgcaggcatttttggtgcaagcggacagagttgtatagctggatcaagactttatatacaaaatggtatttatgataattttttagaaaaaattataaatagagcgaataaaattaaattaggatctcctatgaataatgaaactcaaatgggtcctttgagtagtctcaagcaattagaaataattgaaaaaaatatcaaacttaccttagaccaaggaggaaaactaaggtgtggaggcaaaagacattcaatgtcaaataaaggatattattttcctcctacaataattgagtgtgaaaaccacaatttaccaacagcagaaaatgagttatttggacctgtgctctctgtgatgaaattcaatgatgaagaagaagttattaacaaaatgaatgataatcagtatggactatcatctggagtttatactaaagacattaatagaggtttaagagtttctaatgcaataagagcaggcattacttttgtaaatacttatcgattaatttcaccctctgctccctttggaggcatgaaagatagcggatatggaaaagaagcaggaattgagtccataaaagattatacaaggattaaaacaacttggtttaatacatctgataaaccaatggatgatccatttacaatgggttaaa

SEQ ID NO: 199194 - DNA, 727 bp, Unknown
  Bacterial polypeptide expressing nucleotide sequence isolated from the Sargasso Sea
gatgaactaccaatctgtttttcgggacgacctgttcgcggggcaagtcattgtcgtgacaggcgggggcagcggaattgggcgttgcatcgcccacgaactggcctcgcttggtgccggggttgtgatcacaggacggcaagaagctaagcttgcggacgtcgcaggtgagatctcggcggatggcggtgcggttgacacgcttgctttcgatatccgcgacgaggatgcagtgaaggcgaacgtcagcgaaattatttcgcgctatggccgcatccatggccttgtcaacaatgcgggcggccagttcccagcacggctcgaggacatcagtgctaatggctggaatgcggtcgtagccaccaatctgacgggcgggttttttgtggcccgcgaggtttaccgccattcaatgaaggcgaatggcggctcgattgtaaacattattgccgacatgtggcgctcgatggttgaaatggggcattcaggggcggcgcgcgccggcatgatgagcctcaccgaaaccgccgctgtcgagtgggggccggatggcgtgcgtgtcaacgcggtagcgcccggctggatcatgtcgtcgggcttcgacacttatgatgatcctaaaacccgtaaacgcttccgcgaaatgccgggcttcgtacccttgaaacgcatcggcacagaggccgaactgtcggcggcagtcgccttcctttgtcgccggcggcgg

SEQ ID NO: 199195 - DNA, 811 bp, Unknown
  Bacterial polypeptide expressing nucleotide sequence isolated from the Sargasso Sea
aatggtgataaagaagcagttgatgcaattatagaaaataagcatattgcggctgtaagttttgttggatcaactccaatagcaaaatatatttatgaaaactgtgcaaaaaatgaaaaaagagtccaagctttgggtggagctaaaaatcattgtgtcgtaatgccagatgcagacttagaacaagccgtaaacgggctgatgggtgcagcttatggttcggcaggggaaaggtgtatggcacaatccgtagcagttgcagtgggtaaaattgcagatccacttgtgaaaagtttatctaaaaaagttgatgcactcaaagttggaccaggattagataaaaaatcagaaatgggaccactagtaacaaaggagcatttagaaaaagtgaagagctatgttgacacaggagttaaagaaggagcaaaattagttgttgatggaagaaatttaagacttcaaggatatgaaaaaggtttttatatgggaggttgtctttttgaccatgttaaaaatgatatgagaatatataaagaggaaatatttggtcctgttttatcagttgtaagagctaaagattatagtgaggcattaaaacttgtaaacgatcatgaatttggaaatggagtaagtatttttacaagggacggagataccggtagatctttctcaagtaatgtgaaaattggtatggttggtataaatattccgataccagttccaatggcgtttcatagttttggtggatggaaaagatctttgttcggtgatcaacatatgcatggaccagaaggtggtaagattttatact

SEQ ID NO: 199196 - DNA, 299 bp, Unknown
  Bacterial polypeptide expressing nucleotide sequence isolated from the Sargasso Sea
taattctatgtctgttaaagataaatccttaatatttaatacagatttagttgaaagtttagaatttgataatttgattaggcaagcagtagtgacagtggactcagcttaccatagaaaagaaagtagaggagcgcatgcaagagaagattttccaaaaagagatgataaaaaattcatgcagcatactttagcatggtgtgatggtaaggagacaaaaataagttatcgagaggttcataaaactacattaactaacgaagtacagtattttccacctcaagaaagagtttattgat

SEQ ID NO: 199197 - DNA, 595 bp, Unknown
  Bacterial polypeptide expressing nucleotide sequence isolated from the Sargasso Sea
cagtcatgcgatgcgccgactcgcctcatcgtcgagcgttcttgctatggacaagttgtcgagctggccgagcaggccgcaagaagccaggaagtgaaagatccaagcctcgagggagaccatataggtccgctgtttgatgaaattcaataccaccgggttcaggggatgattcaggtgggaattgacgagggtgcaactctcctggttggcgggttaggcaggccggaaggcatcgatggcggatggtacgtcaaaccaacggttttcagcgatgtgaaaaatacgatgcggatcgcccaacaagaaattttcggtccggtactggtgattattccttttgacgatgaagacgaggcaattcaactcgccaatgactctccttacgggttagctgcctatatccaaacatccgaccccaaacgggccgagagggtagcggcgcgactacgggccggccagattcacattaatggtagtgcaccaaattttgctacgccattcggcgggttcaagcagtcggggaatggcagggaaggcgggactcacggcctcgaggaatatctcgagttgaaaagcatttgccgcaactaat

SEQ ID NO: 199198 - DNA, 632 bp, Unknown
  Bacterial polypeptide expressing nucleotide sequence isolated from the Sargasso Sea
tgcggttggggatatcggtgatgaacttgtatcaagattatcaaaaaaagctgaagctttaaaagttggtcctggaatggataaagcatcagaaatgggacctttagttacaaaagaacatttagaaaaagttacaagttatgttgatttaggtgtcaaggaaggcgcaaagctagtggttgatggaagaggtttaaaacttcaaggttatgaaaatggtttctatataggcggatgtttatttgatcatgtaaataaagatatgagaatttacaaagaagaaatatttggtccagtcttatcagttgttcgagtaaaaacttttgaagaagctgcaaaattaattaacgaccatgagtacggaaatggagttagtatttatacaagggacggtgatgcaggcagaacttttgcaagtaaaattcaagtaggtatggttggtattaacgtaccgatcccagttccaatggcatttcatagttttggtggttggaaaagatcattatttggagatagtggaatgcatggtatggaaggaataaaattttatactaaacttaaaacagtaacatccagatggccttcaggtgtccgatcaaatgcggaatttgttatgccaacaatgaaataaa

SEQ ID NO: 199199 - DNA, 656 bp, Unknown
  Bacterial polypeptide expressing nucleotide sequence isolated from the Sargasso Sea
ggataacgaagaatctgcaaaaaatgcaataagtgtaattattcaagaaaaaggtagaatcgatgtactagtaaataatgcaggatgggggatatggggcactggtgaagacgtttcacttgaggaatttagggagcaatttgagacaaactttttttctgttgtaagaatgatacaaaaagttgcaccgataatgagagaacaaggttctggaaatattgtaaacataagctcagttgcaggaagaataggattaccagcatcaactgcatacgttagttcaaaatttgcaatagaaggtctttcagagtcactgagatatgaactaggaccatttggagtaaatgtaataattattgaaccgggagtaatcaagacaaacttttttgattcaatgaaaactgcaaaaaaagcagatgttggagaaacctatagagacataacattaaaggtaatcacaggagtaaaaatgatggcagaaatgggaacaccgccaaaagaagtggcacaagttataatcaattcaattaaggaagagaaaccacttccacgatatattgttgggaatgacgctgcaatgtttatggaatctaaaaaaatgaaaacagatattgagtttgagaattatatgaaaaaggaactatacggagaataat

SEQ ID NO: 199200 - DNA, 814 bp, Unknown
  Bacterial polypeptide expressing nucleotide sequence isolated from the Sargasso Sea
atggaaaaggttgcagttgttacaggcagttctagcggaattggctttgaaacatctttggcattagcaagagagggatatttcacatatgcaaccatgagagatgtaaaaaaggctgctgaaatacaaaaaattacagatgaagaaagtcttccattaaaaataatagaattagatgtagataatgaggaatctgctgaaaatgcaataaatacaatcattcaagaaaaagatagaatcgacgtactagtaaataatgcaggatggggaatatggggcactggtgaagatgtttcaattgaggaatttaaagcacaatttgaaacaaactttttttccgttgtaagaatgatacaaaaagttgcaccaaccatgagaaaacaaggctcaggaaatattgtgaatattagctcagttgcaggaagaataggattaccagcatcaactgcatatgtcagttcaaaatttgcagtagaaggtctttcagaatcactaagatatgagttaggacaatttggaataaatgtaataattattgaaccaggagtaatcaaaacaaacttttttgattcaatgaaaactgcaaagaaagcagatacaggggaaacctatagagacattacattgaaggtgatcacaggagtgaaaatgatggcagaaatgggaacatcaccaaaagaagtggcacaagttataatcaattcactaaaggaagagaaaccacttccacgatatattgttggaaatgatgctgcaatgtttatggaatccaaaaaaatgaaaaccgatattgagtttgagaattatagaaaaa

SEQ ID NO: 199201 - DNA, 835 bp, Unknown
  Bacterial polypeptide expressing nucleotide sequence isolated from the Sargasso Sea
tttcgaaatattttcaatcagtggtaaaaatgtaaaaaacgttataaaaaataaggcgatttcagcagtgagtatcaccggtagtacacctgcaggtagctctgtagcacaaatcgctggaaaatatttaaaaaagactgttcttgaactaggaggtagtgacccatatattatacttgatgatgcagatttgaataattcaatacaagcttgtattaatggacggattctaaattcaggtcaaagttgtatttcagctaaacggctaatagtaacaaaatcattatatcatgattttttaataaaactcaagattcagttgtctaaaaaaataatgggtgatccgatggataatgttgatattggtcctatggtatcaataagcgctagagatgaaattcatgatcaggttacacgttctatagattctggtgcaatacttgaacttggcggcgaagtaccagatttaaagggatgtttttatccagttacaatgttgtctaacgtcaaaccaggtatgccagcatttgatgaggaaatatttggaccagttttttcattaataatggcacaagatgaagaggatgcaattaacctagggaacaatacgcagtttggtttaggcgctgctattttcacagaaaatattaaaaaagctgaagagatagctagattcagtttaaatgctggattatgttttgtgaatgatttcgtaaaatcggacccccgattaccatttggaggggttaaagagtctggatatggaagggagctatcaagttatggtttgatggaatttgtaaatataaaaactgttgttgttaaccatgaataa

SEQ ID NO: 199202 - DNA, 499 bp, Unknown
  Bacterial polypeptide expressing nucleotide sequence isolated from the Sargasso Sea
aatgggagtaattgaaaagtttggtatccccaagcctatttctaaaatattgaattgggcaagagcatatgatatgtggtatttccaatttggtttagcatgctgtgccattgaagttatggcagcaagtggaccgagacacgattttatgagattaggtataattccacttcctgcatcgccaaggcaagctgacctgatggttgttgcaggtaccgtgaccgataaaatggccccggcagtcaaaagattatatgatcaaatgccagaaccgaagtatgtaatttcaatgggttcatgttcaaacagtgggggaccgtattgggattcttactctgttacaaaaggagtagatcaattaattccagttgacgtttatgttccgggatgtcctccaagaccggaagctttgcaagaaggaatagttttattacagaaaaaaataaaaggtgaagatatgaaagaaaagtggagagaaaaagacattgaaccagtctga

SEQ ID NO: 199203 - DNA, 795 bp, Unknown
  Bacterial polypeptide expressing nucleotide sequence isolated from the Sargasso Sea
atgaaaatgcagccaaaaatgaaaaacgtgttcaagctcttggaggggcaaaaaatcattgtgttgttatgccagattgtgatttagatcaagcagtaaacggtctaatgggtgcagcatatgggtctgcaggagaaagatgtatggctcaatctgttgctgttgctgttggtaatgtaggtgacaaactggtggatgaattatctaaaaaagtggaagctttaaaaattggaccaggcatggacaagaattctgaaatgggtcctttagtaacaaaagagcatcttgaaagagtaagaggttatgttgatttagggattaaagaaggagcaaacctcgttgttgatggaagagatattaaacttcaaggatatgaggacggttattatattggcggctgtctgtttgataatgtcaaaaaagatatgagaatttacaaagaggagatatttggacctgtattatctgttgtcagagccaaagattttgacgaagcattaaatttagttagtgaccatgagtttggaaacggaacaagtatttatacaagagatggagatgcaggaagaacatttgcaaatcaaataaaagttggaatggttggaattaatattcctatacctgtgccagttgcttttcatagttttggtggatggaagagatcattatttggagatcaacatatgcacggtccagaaggagttagattttataccaaattaaaaacaattacttcaagatggccttcgggtgttagatcagatcctgaatttgtaatgccaacaatgaaatagt

SEQ ID NO: 199204 - DNA, 372 bp, Unknown
  Bacterial polypeptide expressing nucleotide sequence isolated from the Sargasso Sea
attgtgcagtgtttagagatgatcaaataatgagcgaaggatcaaaactaattgaggaaatatggtttgggtcaacagagattaaaattaaagataaatcaatgatttggaatactgatttattagaaaccctagaatataaaaatcttatagagcaagccgtagttacaatgaattctgctctcaatagaaaagagagtcgtggagcacatgcaagagaggattataaagaaagagacgataagaattggatgaaacacaccctttcatggttggaagagaagtcgtgtaagattgattatagatcagtgcacgaatatacattatcgaacgaagtcaaatatattgaacccaaagcaagagtgtactaat

SEQ ID NO: 199205 - DNA, 475 bp, Unknown
  Bacterial polypeptide expressing nucleotide sequence isolated from the Sargasso Sea
aaagagggtgcgaaattagttgtcgatggaagaaatttaaagttacaaggatatgaaaatggcttttacattggtggctgtttatttgataacgtgaaaaaagatatgaggatttataaggaggaaatatttggcccagttctatctgtagttagagttaaaacttttgaggaagcttcaaaattaataaatgatcatgaatatggaaatggcgtaagtatttatacaagagatggagacgctggaagaacatttgcaagcaagattcaagttggaatggttggtataaatgtaccaatacctgttccgatggcttttcatagttttggtggttggaagaggtctttgtttggagatagtgcgatgcatgggatggaaggaataaaattttatactaaattaaaaacgataacttcaagatggccctcaggaattagatctaatgctgaatttgtgatgccaacaatgaaataat

SEQ ID NO: 199206 - DNA, 726 bp, Unknown
  Bacterial polypeptide expressing nucleotide sequence isolated from the Sargasso Sea
ctgtgatggaattaggaggaaaatctcctcaaattgtattacctgattgtgacctagagttagctgttaatggtataatctcaggtatttttcctgcagctggccaaagttgtatttctgggtcaaggttgttaattcatcaagaaataagtgaattatttacagagtacttattaaatgctctaagagacgttaaagttggggatcctaatgatcctgctacccatattggtccaatagctcatcgacttcattatgaaaatattcttaaaaaaatagaaactgctgttaaggatggttatcaattaattttagacggaagaacttattgtaaatctgatggctattatattgggccaactatttttaaggatatttcaaatgaaacagatttatcccaaaatgaaattttcggtcctgtagtttccactcaatcatgggtggaagaagaagaggtaatccatattgcaaatgataccatttatggactagctgctggcatttggtccaaagatgttgccaaggcaatgagaatagcagacagaattgaagctggtactgtttatattaataattatttcaacgcagctactcaaagtccagttggtggatttaaacaatctgggtatggtcgtgaaaatgggtgggaaggaatgcgatgctttatgcaaacaaaatcagtttggttatcaacaaaccccaatgaaaaaaatccttttgaataaa

SEQ ID NO: 199207 - DNA, 797 bp, Unknown
  Bacterial polypeptide expressing nucleotide sequence isolated from the Sargasso Sea
aatatctagccaccctgatattgatatgatttcatttaccggttctacacgtgcaggaaaacttattactaaaaatgctgcagatacaattaaaagagtctgtttggaattaggtggtaaaggtggaaatatagtttttgcggattcatatccaaatgcaataagagatggaataaaaaatgtaatgagcaactctggccagtcgtgtgatgcgccaactagaatgcttgtagaaaaaactatttacgaaagagcaattaaagaagcagctgatgaagcaaataaaattaaagtagatattgcatcaaaaaaaggagatcatattggacctgtagtttcaaaagttcaatacgataaaataattaatttaattaataatggaattgatgaaggagcaacattagccgctggaggtcctgatcttcctaatggattaaacaaaggttattttattaaacctactatatttacaaatgttacaaatagtatggaaatagcaaaaaaagaaatttttggtccggtgctttctataataccatttgaaaccgaagaagaagcaatacaaattactaatgatacagaatacggcctcggaaactatttacaaacagaagataaagaaaaagcaaaaagagttgcaaaaaaattaagatcaggaattgtttatataaatggaaatgctgctgactctggtacgccttttggaggttatagacagtctggaaatggcagagagggtggagtttggggtcttgaagaatatttagaagtgaaaacagtaactggttggaaataat

SEQ ID NO: 199208 - DNA, 877 bp, Unknown
  Bacterial polypeptide expressing nucleotide sequence isolated from the Sargasso Sea
agcagaattatttaaagaggcagggctgccagatggagttttgaatgtcgtaaatggagacaaagagtcagtagatgctttaataaacaataaagacgtagttgcaatgagttttgttggatccactccaatagcaaaatatatttatgaaaattgcgcaaaaaatgaaaaaagagtgcaagctttaggcggagctaaaaatcattgcgtgattatgcctgactgtgatttagatcaagcagtcaatggtttgatgggtgccgcatatggttctgctggagaaagatgtatggcgcagtcagtagcagttgcagttggaaatattggagataaactagttaactccttagcaaaaaaagtagaagcattaaaagtcggtcctgggatggacaaacaatctgaaatgggacctctagttactaaagagcatttagcaaaggttaaagggtatgtggatattggagtcaaagagggagcaaaattagttgtcgatggtagaaattttaaaatccaaggttacgaaaacggttattacattggcggatgcttatttgaccatgtaaagaacaatatgaggatttataaagaagaaatatttggcccagtcctctcagttgttagagcaaaagattttgaagaagctttgaagctggtaaacgatcatgaatttggaaatggagtgagtatattcactagagatggggactctggtaggacattttctaataaagcgaaaattggaatggttggaattaatattccgataccagtccctatggctttccatagctttggtgggtggaaaagatctctttttggtgatcaacacatgcacggtcctgaaggtgttagattttatacaaagcttaaaactgtt

SEQ ID NO: 199209 - DNA, 766 bp, Unknown
  Bacterial polypeptide expressing nucleotide sequence isolated from the Sargasso Sea
aatgtatttaaaaaattataatctaaaaaataaaactgttattgtaacaggggctggtaaaggcattggaagagcttgtgcaattgcttttgctgaagctagtgcaaatttagttattattagtaggacccaaaaagatttaaatgaagtctcaaaaaaaataaaaaaacttaaagtaaaatgtaagtcttatgtttgtgacattacaaattacaatgaaattagaaatatcatcaataagcaaccaaaaatagatattttggttaataacgctggaaacaatatcccagaacattttacaaaagttaaaactaaaaatatggaatacttggtaaagataaatactatcgccacattcaacctagcacaattatgtgcactaaaaatgataaaatcaaaaaatagaaaaaaagttggtggtgctattattaatatgtcctcacagatgggacatgtaggtggcccaattagaagtgtctataatatgactaaatttggtttagagggtcttacaaaaggtatgtctattgatcttgctaaatataatataagagtaaatactgtttgtcctacatttgttgtaactcctatgacaaaaaaatttttaaaaagcaaaaaatttaaaagagaagttctagggaatattcctttaggaaaatttgctgaactttccgatgttgctagtgcagctgtttttttagcctcagatgcagcatctatgattacaggtacctctttattggtagatggtggatggactgcaaaa

SEQ ID NO: 199210 - DNA, 520 bp, Unknown
  Bacterial polypeptide expressing nucleotide sequence isolated from the Sargasso Sea
aattgttggttttggaagaataggtcaaaacttaataaaaagatgcttaggatttgaaatgaatgtatttgtttacgatccttttgtatcaaaagaaatagttgaaaagttaggtggaaaaaaagttgaggatttaaaagaatcagttaaatctatggatgctatttcacttcacatgccacttaatgaaaaaacaaaaaacctgataaattataatttaataaaaaatatgaaaaaaaattgtattattataaatgctgcaagaggtggaattattaatgagcatgatttggacaaagcacttaataaagagttgatttttggagctggtttagatgtttttgaaaaagaaccacccgataagaataatcctttgcttaaaaataataaggttttcttaagtccacatacagcagctttcacagaagattgcatgataagaatggcgaaagaaacagttcaaaatattattgatttttttgaaaaaaaattagacaaatcaaaattggtaaatctgtaa

SEQ ID NO: 199211 - DNA, 568 bp, Unknown
  Bacterial polypeptide expressing nucleotide sequence isolated from the Sargasso Sea
gaaaatgatgtcaaagccgtttctgaatatgcagaccaagcatgggataaagtagatgttcttgttaataatgctggctctgagttaaatcagacttacgataaaacaactctcgaagagtgggatagggttcttgatactgatctaaaaggaccttggttaatgtgtaaatatattgttccaggtatggtcaatgttggatcaggaagtgttattaatatttcttcattaaatggattggtaggctttcctctgtccaccgcttatgggagtgctaagggagggttggttgtttttactcgtgatatggctattgaactagctaatacaggagtaagaataaattgtgtttgtcccggggtcattgatacaggaatgatggatagatggactgacttaatgccagataaaacagaagctcaagaaatgttaaaaggtgcgatgccaattggaaggatgggtactgctgatgaagtggccggtgccatatatttctttgcatcaccagactcgagtctctgtcaagggtcggttttgagtgtagatggtggatttactgcacaataat

SEQ ID NO: 199212 - DNA, 916 bp, Unknown
  Bacterial polypeptide expressing nucleotide sequence isolated from the Sargasso Sea
ccatcgtatgaatacatcgtatttgataacagcaacagttcaaactatgaacttgcatacccggctgctactgaggacaaatcaaatgccaagcttaccgttaggaatcggttgtccgacgaggcctcagtaataccagacacagagtgggaatatacttcttcagacagaagtgccattagacttttaccaaacagcacctgctttaaacaaagctgcatatatgaatttacatacacagcaatgaatccagtcgtagcaggcataggattggcagccacacgagattttgttgattttctccgaagcgcaacacaaattgatgaaaatcctctcgccggagatgttaaatacacctttagctattcgatatcccagccatcacgcgttttgaatgacttccaaaggctaggctttaatgaatccaaagatgggcacgccatttttgacggcattttgagccataccggaggagctagtggagaccaaatcaactataggtttgcccagacagggagaactgaacgtaatcgccaaaaccatttatatccggaagctgtcttcccatttagccatcaagtattgaccgatcacttaagcgggaaaacagatggtaaaagtctcaggaacatctctagccatacacaaaccaagaaatttgaagtgaacacctcaaacgagtactgggttaaggcttgctcattgttacatactgacacggaagggaatgatctgaacgatcctgaaaacgtcagattttatctactatcagggttatcacatggcgtaggcaagataaatgacaaaagcatagggcaacagtacaccaacccagtggcaccttacgcagctcacagagctcttttgatcgcactaaacgaatgggtaaccaaagggatgacaccacccgatagcc

SEQ ID NO: 199213 - DNA, 857 bp, Unknown
  Bacterial polypeptide expressing nucleotide sequence isolated from the Sargasso Sea
cggttttccagcagatatatttcgcaatatttcaattagtggtaaaaatgtaaaagacgtgataaaaaataaggcgatttcagcagtgagtatcacggggagtacacctgcaggtagttctgtcgcacaaactgctggaaaatatttaaaaaagaccgttcttgagctaggaggtaatgacccatatattattcttgatgatgcggatttagataacgcaatagaagcttgtattagtgggcgtattttaaatacaggccaaagttgtatttcagccaaaaggctaatagtaacaaaatcattatatcatgaatttttaaaaaagctcaagataaaattatctaaaatgataatgggtgatccaatggacaatgttgatattggccctatggtatcaataaatgccagagatgaaattcatgaccaggttacgcgttcaatacattctggagcaaaacttgaagttggtgggaaagtcccagatttaaaaggatgtttttatccggtaacgttgttgtctaatgttaaaccaggtatggcagcatttgatgaagaaatatttggaccagttttttcattaataatggcagaagatgaagaggaagcaattaatctagggaataatacgcagtttggcttaggtgctgctattttcacagaaaatttaaaaaaagctgaagaaatagctaaatcaagtttaaatgctggattatgttttgtgaatgattttgttaaatcggatcctagattaccatttggtggtgtcaaagaatctggatatggacgggagctatcaagctatggcctgatggagtttgtaaatataaaaactgttgtagttaagcatgattattaga

SEQ ID NO: 199214 - DNA, 769 bp, Unknown
  Bacterial polypeptide expressing nucleotide sequence isolated from the Sargasso Sea
atcgagaatgctgtgaggggagcttactgggcgggtttcggtactgctggacaacgctgtaccagcctagggaatctgattatccacgaggacatctacgatgagttcgttgagcgtttcatggagaaagtgaggtcaactacaatcggcgattcgatgcgtcacgatggggttctgtacggcccgatgctgtcagagaggtattcagttgacttcctcaaaggtgtcgatatgtgtgaatcaagtggcgctacgaagatatggggagaggggcgaattaccgaagacagcaagcccgacagtttccatggtgacgccagtgaaggaatctacatgtggcctcacgtctatgtagatgtcaccgaagacatggagtgcttccatgaggagattttcggaccactagtgaccatagtcaaggccagtgattttgaccatgcattgcaccttgccaatgcttccccatatggtctatcatctgcaatctacactaacgatcggcttgaggcctaccgatacaagacaggaatcaaggcgggcatgactgggattaacaattccaccaccggtgccgaagcgcatctgccatttggaggagttaaggggagcggcaacggtactcgtgagtccgggatatgggtgatagaggcatattcgtactggcatgcggtaaatgacgaactgtcaggaaagctgcaactggctcagatggacgtggacgaaattgagatggaagaggcagatgctgactatggtggactggcctagt

SEQ ID NO: 199215 - DNA, 735 bp, Unknown
  Bacterial polypeptide expressing nucleotide sequence isolated from the Sargasso Sea
catgagcactcgaatggccaatccgtttcagtttctggatgtcgaccgcatggatcccggcaaaaagaacatggagacgcgcaccgaggcttttgttgagatctacgatccctatacgcaagtgcaagccgctgagcagtcgcaccgctgtctggagtgcggcaacccctattgtgaatggaagtgccccgtgcacaacttcattcccaactggcttaagctgttggctgagggcaacctgtttgaggcggcagagctcagtcatcaaaccaataccctgcccgaggtgtgtggccgcgtttgcccgcaagaccgcctctgtgaaggggcgtgtaccctgaatgatggcttcggcgccgtgaccatcggcaattcggagaagtacatcaccgataccgcgctggccatgggctggcgacctgatctctccgacgtggtgcctaccgacaagaaggttgcgatcatcggcgcagggcccgccggattgggctgtgctgacatcttgacgcgaaacggcgtgaatgccgtggtcttcgatcgttatcctgaaatcggtggtcttctgacctttggcatcccgcagttcaagctcgagaagcaggtgatggagcgtcgtcgagaggtttttgagggtatgggcatcgagttccggctgaacactgaagtgggccgagacatcaccattgaccagttgctggctgactacgatgccgtcttcttgggtatgggcaccta

SEQ ID NO: 199216 - DNA, 543 bp, Unknown
  Bacterial polypeptide expressing nucleotide sequence isolated from the Sargasso Sea
aatgtatttaaaaaagataaatcttaagaataaatatgctttagtaacaggcgctggcaaagggcttggaagagcgtgttcaattgctttagctgaggccggagcaactgtaattggtttaagcagaactcagtcagatcttgataaacttcaaacagatataaaaagagtaaaaggtagattaattaaaatcaattgcgatgtaatgaactacaatgatcttaaatttaagattgaaaaaataaaaataatagacgtcctggttaataatgctggtacaaatattccagaaccttttgaaaaaatacaacaaaaaagtatgaattatatagtagacttaaatttaaaagctgcatttaacgttgctcagttagtagtaaaaaaaatgttaaaaaataaaaaaagaggtggttctataatcaatatgtcttctcaacttggtcatgtgggaatgataggaagaaatgtctacaatatgacaaaatttggcatcgaaggtttaactaaaggaatgggcgtagaactcgcaacaagaaatattag

SEQ ID NO: 199217 - DNA, 433 bp, Unknown
  Bacterial polypeptide expressing nucleotide sequence isolated from the Sargasso Sea
atgtatcttcagaaaataaatctcaaaaaaaaatatgcattagttactggtgcaggaaaaggacttggaagagcatgctctattgcgttggcagaggcaggagcaatagtagttgcactaagtagaactaaatctgatttaaataagttagaaaaagatattaaaaaagttaaaggaaaaattataaagataacttgtgatgttatggattacgaggatcttaaaaaaaaattagaaaaaattaaaattattgatgttttagtaaataatgctggaacaaacataccagaaccatttgaaaaagttcaacaaaaaagtatgaattacttgatagatcttaatcttaaagctgcatttaatgtagctcaactcgttgttaaaaaaatgcttaagaataaaaaaagacctggttctataataaatatgtcatctc

SEQ ID NO: 199218 - DNA, 822 bp, Unknown
  Bacterial polypeptide expressing nucleotide sequence isolated from the Sargasso Sea
gaccctggcagatggcagtgtgacgttcacaggttcatctgttatcccagttgcagatgtaaatggaggtgcagttgatggtgttactcttggtaccaacagtgcagtgacccaagcagttgtagacaatatcaatctaaatggaacaactattggacatacagatgatacggatctcatgaccctggcagatggcagtgtgacgtttacaggttcaactgttatcccggttgcggatgtaaatggaggtgcagttgatggtattacacttggtacgaatagtgcagtcactcaggcggtaatagacaatgtgaacattaatggagcaaccattggtcatacatcggacacagatttattaacactttcgtcaggcgtagtgactttagcaggtaatcttacatttgcaaatggtgagagcgtatccaatgcaacagatggagactttttatttacaacagatgtaacagatggagcacttgtactaaaaaactctaacgcaacagatggtactgcaaagattgaacttgtttctgataacgctgataatgctggagatggctatgagataaaatctgtaaatggaacttttacagtcacttcagatcattctagtagtggaacttataatgatacatatctgacaatcgatggtaatgcaacgcccgcatcatccacaacaaagattgcaggagatctattggttgatgggggacagatcgcactcactggagatacggatctaatcactctttcctctggtgttgtgacggttgcgggtgaattatctgcgactacattagatataaatggaacggatat

SEQ ID NO: 199219 - DNA, 677 bp, Unknown
  Bacterial polypeptide expressing nucleotide sequence isolated from the Sargasso Sea
ttatggatctgctggtgaaagatgtatggctcaatcggtggcagttgcagttggaaatattggagataatttagttaatgaattatcaaaaaaagttgaagcattaaaagttggaccaggtatggataagaaatctgaaatgggacccttagttacaaaggaacacttagaaaaagttaagggttacgttgacctaggagttaaagaaggagcaaaattagtagttgatggaagaaatctgaaactgcaaggctatgaaaacggttactatataggtggatgtttatttgatcatgttaaaaaaaatatgagaatttataaagaggaaatttttggccctgtactttctgtagttagagtaaaagattttgatgaagcaactaaactaattaatgatcatgagtttggtaatggaacaagtatttatactagagatggagatgttggaagaacttttgccagcaatattaaaattggaatggttggtataaatatacctatacctgtgccagtggcattccatagttttggtggttggaaaagatctttatttggagatcaacatatgcatggagtagaaggtgtgagattttatacaaaacttaaaactataacttcgagatggccttctggtttaaggtcagatcctgagtttgttatgccaacaatgaagtaat

SEQ ID NO: 199220 - DNA, 885 bp, Unknown
  Bacterial polypeptide expressing nucleotide sequence isolated from the Sargasso Sea
aactaagagaaaattctgaattattaggaaagattgaaacaattgatacaggaaaactgtacagagaaacttatcaacaagcaaaatatattgcagaatattacgattactatgcaggtttagctgacaaagttgaagggacagttcttccaatagataaaccaaatattcaagcgatcacaacaagaattccaataggtgttattgcagctatcattccttggaattctcaaatgtttttaactgcaacaaaagttgctcctgctttagctatgggtaacacagtagtaattaaatgttctgaactagcaccagcaactatgtttgaatttgcaaagttagttgaagaaactggaataccaaaaggtgttgtaaatgtagtttctggttttggagatccatgtggtaaagctttaactactcacaacttagttgagaaagtagcttttacaggaggacctgaaactgcaagacacataattagaaattctgcagaaaatttatctgaagtaagtttagagttaggtggaaaaagtcctgtagctgtttttgatgatgccaaacaagaaaatgcaattaatggaataactgctggaatattcggagcaagtggtcaaagttgtatagcaggttcaagattgtacttacaaaaaggaatttataatgagtttctagataaattagcatctagagcagaaaaaattaaaataggcgctcctatggactctgatactgaaatgggtccactaagtaactttaaacaattagaagtaatagaaaaaaatattaaattaactgttgaacaaggtggaaaaattaaatgtggtggtaaaagacatcctttttcaaatgaaggttattattttcctccaaccaattattgag

SEQ ID NO: 199221 - DNA, 736 bp, Unknown
  Bacterial polypeptide expressing nucleotide sequence isolated from the Sargasso Sea
tgggcgagacgtattgaaggagaaataataactagtgatgttaaaaatgaaaatatttttctttatagagttccaattggtgtagttgctggaattcttccatggaattttcccttttttttaattgcaagaaaagtcgcaccagcattaatagctggtaactcaattattattaaaccaagtgaagaaacatcaaataacgcatttttttttacaaaaataatccatgaacttaatttgccaaaaggattaataaatgtcgtttatggaaagggtgaaacagtaggtagatatttaagtgctcacccaggtatagatatgataagctttacaggaagtgttgaaactggttctttaataatgcaagaagcaggtaaaaatattacaaaagtaaatcttgaattaggaggcaaggctcctgcaatagttcttggtgatgctgatattgataaagctgcaaataaaataaaaaatgcaagagtcattaatagtggtcaagtttgtaactgtgtagaaagagtatatgtccaaaataatattttggatgaatttactgataaactcacaaaaattatggaaaatgtgcaatatggcaatcctaatctttataatgatattgaatatggccctatgataaataatgaaggtttaacaaaggtcgaaggacttgttaaatctgctacttcagaaggtgcagaaatagttactggaggtaaaagtactaaaatagaaaatg

SEQ ID NO: 199222 - DNA, 667 bp, Unknown
  Bacterial polypeptide expressing nucleotide sequence isolated from the Sargasso Sea
gctgcttcacagacctttgatgaagcaagacatgtagaagttttcaataaatatcttcaagataaagtaggcatgcattatccaattaatccttcactaaaattattactagataaaatattaactgatgagagatgggatcttaagtttattggtatgcagattattattgaggggctagcacttgcagcttttcaaatgcttaaagcaattacaaaggatcctttgttaaaacaattacttcattatgttgttcgtgatgaagcaagacatgtaacttttgggataaattatttagaagactatttgaaaacactttcaccagaagaaataaatgaaagagctgaatttgcatatgaggcatgtgtgatatcaagggatagattaataaatacaaaggctgagcaaagattcttaaaaatgactgaagaagaagcaagagaatttcaattaaatactggaactttcgaaatgtttagaaatttcttgtttacaagagtaatgccaaatctaaaaagaattggattgctaactgatgaagttagaccaaaatttgaagcattggggctccttgaatatgaaaatgctcctgatgattttgaatgtgattgggctgaaatgaaaaaaccactagaaaaatttgggcaaattccagaagttgtctaat

SEQ ID NO: 199223 - DNA, 429 bp, Unknown
  Bacterial polypeptide expressing nucleotide sequence isolated from the Sargasso Sea
agtgcttggtatttgcccgcgccgcgtcgcaggatattgagagccaaatgcacaaaattccattaccggggcaaattccggcgtgggacgagagtaaagtctccaactccgatgaagaagtggtgattgcccacaactggcacgaactgcgcctctttatgtgggactatgtggggatcgtccgctctgataaacgcttggagcgcgcgctgcgccgctgcttgatgttacagcaggaaatccaagagtattacagcaacttcagagtcagtaataacctgctggaactgcgtaacttagtgcaagtggcggagctaattatccgctgcgctatggatcgtaaagaaagccgtggcctgcactacaatatcgaccatcccgagaaggtagactcaccgcaaccaacgattctgcaacctgaaaaataac

SEQ ID NO: 199224 - DNA, 670 bp, Unknown
  Bacterial polypeptide expressing nucleotide sequence isolated from the Sargasso Sea
gaagcgtggaataccagatggtgttttaaatgtacttccaggttatggtgatgttggagaggccttaggtagacacaaagatgttgatgcagtttcttttacaggatctaccgaagtaggtggttattttttaaaatactcaagtgaaagtaatttaaaacctgttgcattagagatgggaggaaaaagtccatttatagttttagaagatgctaaaattacagatgatttaattgataatgcaatgaattctgcattttggaacggtggacaaaactgttcagcaaatatgagacagataatacataaaaaagttaaagacgaatttttagataaagttataaaaaaagttaaaaaacttaaagtaggagatccgttagatttaaaatcaaatatggggtctatgatttcaaaaggacatttacaaactgttgatggatatattcaaaaagggatagatgaaggagcaaaacttttatctggaggagtttcaagcaaaaagcaaaaaggtttttatgcaaaaccaaccctatttgatggattaaaagaaaatatgaccatcgctcaagaagaaatatttggaccagtgttaggtgttttaacattaaaaaatgatgaggaagctttgaaaattgctagtaattctaaatacggattacatgctagtgta

SEQ ID NO: 199225 - DNA, 837 bp, Unknown
  Bacterial polypeptide expressing nucleotide sequence isolated from the Sargasso Sea
ctcgctccagcgttagcaatgggtaatactattattattaaggcatcagaagttgccccaactccattattagaatttgctaaaattattgataaagttggaatgccaaaaggtgtagtaaacataataactggttttgcagatacttgtagtaagttacttacttcacatccaaaaattaataaaatagcatttacgggaggcgtccatactgcgaaacatattgttagaaattctgcagaaaatttatctcaaatatctcttgagcttggtggaaaaagtccagtagtagtttttaaagatgctcataaaaacaacgctataaatggaattatggcaagtatatttggggcaagtggtcaaagctgtattgcaggttcaagactttatttacaagaagaaatttatcaagaatatttagaggaattaaaaaatagagttgaagaaattgaaattggcgacccattattaactacaactcaactaggcccccttgctactttaaatcaattacaaaatatagaacaaaaaattaaacaaacaaaagaacaaggtggtaaaataattactggaggaaataaagttagtgagtttaaaaatgggtattatttcgaacctacaataattgagtgtgcaaatcataatttacctgttgcagagaatgaattatttggtccagttctatctgtaatgaaatttaaaaatgaagaaaatgctattgaattgatgaatgataatagttttggacttgctgcaggaatatttactgaaaataatggaatagcaatgagagtttcaaaaaaggttcaagcaggaattgtatttgttaatacttat

SEQ ID NO: 199226 - DNA, 321 bp, Unknown
  Bacterial polypeptide expressing nucleotide sequence isolated from the Sargasso Sea
aatgacaactccaccttttgtatggttgatatctggttgctcaactggatttggtcgagagattgcaatttcagcacttgaggccggtgatatggttgctgtgacttcccgaaatactgaagatataagggatatttgcaataaatatccttcaacttccgttgcattaaatcttgatgttacctatacagatcaaattatagaatgtgttagaaatgtaatatctaaatttggaagaattgatgtgctcgtgaataatgcgggttatgggtatctatctgcaatagaggaaggtgaaggcgaagaagtatcaaaactatt

SEQ ID NO: 199227 - DNA, 107 bp, Unknown
  Bacterial polypeptide expressing nucleotide sequence isolated from the Sargasso Sea
tatgagttcatataaaattatagagcatgagtatgacgtagtcgttcttggagctggtggtgcgggccttagagctgcagttggccttagtgaggcaggtttaaaaa

SEQ ID NO: 199228 - DNA, 757 bp, Unknown
  Bacterial polypeptide expressing nucleotide sequence isolated from the Sargasso Sea
ctaggtggtgctaaaaatcatttggtggtaatgccagattgtgatttagatggagcagttaacggtttaatgggtgcagcttatggttctgcaggcgaaagatgtatggcccaatcagttgcggttgctgttggagatattggagatgagcttgtttctagattatctaaaaaagccgaagctttaaaagttggccctggaatggataaagcatctgaaatgggtcctttggtaacaaaagaacacctagaaagagttagaggatatgtagatttaggtgttaaagagggtgctaaactagttattgatggaagagatcttaaacttcaaggttatgagaatggattttatattggtggttgtttatttgatcatgtcaataaagatatgagaatatacaaagaggaaatattcggcccagtattatcagttgtaagagttaaaacttttgaagaggctgcaaaactaattaacgatcatgaatatggaaatggagtaagtatttatactagagatggagatgctggaagaacattcgctagcaaaattcaggtaggtatggttggtattaacgtaccaataccagtgccgatggcctttcatagttttggaggctggaaaagatctttatttggagatagtgcaatgcacggtatggaaggaataaaattttatacaaaacttaaaacaataacatctaggtggccttctggtatccgttcaaatccggaatttgtaatgccaacaatgaaataaa

SEQ ID NO: 199229 - DNA, 931 bp, Unknown
  Bacterial polypeptide expressing nucleotide sequence isolated from the Sargasso Sea
aaagaaagagcaagatatctgaggatgataggagataactttagagataattctgaacatttggggaaaatagaaacaattgatactggaaaactttatagagaaacatataaacaagccaactacatagctgaatattatgattattatgcaggtcttgctgataaggttgaaggcacagttcttccaatagacaaaccaaacattcaagcaataacgacgagaataccaatcggtgtagttgttgcaattgttccttggaactcacaaatgtttctaactgcaacgaaacttgcaccagcattagcaatggggaatacagttgttattaaatgctctgagttagcacctgcaacaatgtttgaatttgcaaaattaatcgaggaaactggtattccaaaaggagttgtaaatgttatttctggttttggagaaccttgtggtagagctcttacatcgcataatctagttgaaaaaattgcatttactggtggaccagatactgctcgtcatatcattataaattctgcgcaaaatttatctgaagtaagcttagaacttggaggaaaaagtcctgttgcagtatttaatgatgcaaatcaagaaaatgcaattaatggtattaccgcaggaatttttggtgccagtggacaaagttgcattgctggatctaggctttatttgcaggaagagatttatgatgaatttttagacaaactatcaaaaagagctgagaaaataaaaattggagctccaatggatcctgaaactgagatgggtccaataagtaactataaacaattagaggtcattgaaaaaaatattaaactaacgcttgaacaaggtggaagattaaaatgtggtggacaaagacattcattttctaatgaaggttattattttccagcaacaattatagaatgtgataacc

SEQ ID NO: 199230 - DNA, 670 bp, Unknown
  Bacterial polypeptide expressing nucleotide sequence isolated from the Sargasso Sea
tatgggattaatgtctttaccgatattaataaatcaaggatatgagaagagtttctcagcaggattagttgcgtcaacaggaactctaggacaaataattcctccgtcaattgcactagttcttcttggcgatgttatgtccaatgcttatcaaagagctcaaaatgatatgggtatattttcccaacaaaccgttactgttggtgatctttttataggcgcagtaatcccaggaataatgatctgtcttggatatcttctttatactatttataagaataaaaataatttaaatctaaaagattatacaaatgaagttctaattgaaaaaatagaaatatttaaaacgcttgctctgccagttaccttaatttttttagttcttggttctatatttgctgggattgctacacccacagaagcttctgctattggagcatttggtgcattagtaatcgcattaataaatggaaagataaattttaatttcataaaagaaagttctgagaatacagccattgtatctactatgatcttcactattcttataggggcttcaattttttcattaatatttagaggggttggaggagatgaattaataaatattatttttagctctcttcctggtggatcttatactgcttttatttttttgttctacttgtaa

SEQ ID NO: 199231 - DNA, 925 bp, Unknown
  Bacterial polypeptide expressing nucleotide sequence isolated from the Sargasso Sea
gtttgagtttgcaaaactaatagaaaagtcaggaattcctagaggggtagtatatattattacaggatttggagaaccgtgtggaaaagcattaactactcacgaagatgttgaaagaattgctttcactggcggaccagaaacagctaggcatataattagaaactctgccgaaaacttatcacaagttagtttagaattagggggcaaaagccctgttgctgtatttgaagatgcagatcaagaaaatgcactgaatggtatcacagcaggaatttttggagctagcggacaaagctgtatagcaggatctagattatatttacaaaagggtatttataataattttttagataaattagttaatcgtgcaaaaaaaataaaattaggtaatccaatggatgctgatacacaaatgggaccgctgagtagtttaaaacagctagaaataatagaaaaaaatataaaactcactgtagaccaaggtggaaaaataaagtgtggaggtaaaagacacagcttatcaaataaaggttattattttccagctacaataattgaatgtgaaaatcataatcttccaacagctgaaaatgaattgtttggtccaattttatcggtaatgaaatttgaaaatgaagaagaagtcattaataaaatgaacgacaatcaatacggtttatcatctggagtttatacaaaagacttgggaagaggcttaagagtttcaaaagcaatacgcgctggaattacatttgttaacacttatagattaatatcaccttcagcaccttttggtggaatgaaggacagcggatacggtaaagaagcaggaattgaatccataaaagattacacaagaattaaaaccacttggtttaatacttctgacaaacccatgtcagacccatttacaatgggataa

SEQ ID NO: 199232 - DNA, 569 bp, Unknown
  Bacterial polypeptide expressing nucleotide sequence isolated from the Sargasso Sea
attgggggataaggtgagtgtttctattatttctgttgctataattggagctggacctgcgggtttttatgcagctgaggctttaattaaaaaaaaattaaattgtgaaattgatataattgatttattgcctacaccttacgggctaattcgagctggagtagctcctgatcaccaaactactaagaaagttactcgtgcatttgagaaaactgcattaaatgattcgtgtgctttttttggaaatattaatgtaggaaaagatatatcaattgaggaactaaaaaaaatttatgatgttattattttatcaattggtgctgactctgatcgtgaattaggaatccctggacaggaattggatggagttattggttctgcatcatttgtaagctggtataatgctcacccaaattttgttgaccttaaccccaatctagattgcaaaaatgttgtagttctcggaaatggtaatgttgctatagatgttgctagagttcttgttaaaaatagagaagaaatggctgattcagatattccagagtatgctttaaaatctatagaggatt

SEQ ID NO: 199233 - DNA, 245 bp, Unknown
  Bacterial polypeptide expressing nucleotide sequence isolated from the Sargasso Sea
aactttagaatttgataatttaataagacaagcagttgttacagtcgattctgcatataatagaaaagaaagtcgaggagcacacgctagagaagattatccaaaaagagatgatgaaaaatttatgcaacatactcttgcctggtgtaatggtaaagataccaaaataggttatagggaagtgcataaatcaactctaacaaatgaagttcaatattttccacctcaggaaagagtttattaat

SEQ ID NO: 199234 - DNA, 534 bp, Unknown
  Bacterial polypeptide expressing nucleotide sequence isolated from the Sargasso Sea
taacatgtaaagaaaaagtaaaaccaaattctaaaaaaattgaaattagtaaatcaaaaacagataatattattgagagatttgataagattagaaacagcaaaggaaactctacaactggagaacttcgcacttccatgcaacatataatgcagcaaaaatgtgcagtatttagaacacatgatctcatatcaaaaggtattgaagaatattcaaaagttgaaagctcaatggatgacatagatattaaagacaaatcattaatctttaatacagacttggtcgaagctttagagttgcacaatttaatggcacaatcaaaagttactcttcattctgcgttaaatcgaactgaaagtagaggcgcacatgcaagagaagattataaagaaagagatgataataattggttagtccactctttagcctggttgaacgataagggagatgtgagtatgggttctagaggtgttcacatgaatactctaactaatcatgttcaaccaataccacctaaaagaagagtttattaat

SEQ ID NO: 199235 - DNA, 448 bp, Unknown
  Bacterial polypeptide expressing nucleotide sequence isolated from the Sargasso Sea
ggattatttaaaaaaaaattctctgctattaaatgaggttgcaatttcggcatctgaaatagctaaagataaaaaaatcagaaacatagttcataaattccaacaaatatgcgcttacaatcctccaaaaaaatataaaggttctgttttagatggcagagatattataactgtacaagtaagagatgcgatgttcaaattttacattactgcaagcttaggtgtaagggcaaaaagacgttttaatgaatatagaaaattgaataaaaaaattacatataaagaagtcctcaaaagccttagaaatagggatgaatctgacaggaaaaggagatatggaccattaaaaaaaaccaaagattctatcttgattaataccactaaattaagtaagaaagcgtgctttgaaaagataaaagcaattatggacaaaaaactaaataattaa

SEQ ID NO: 199236 - DNA, 898 bp, Unknown
  Bacterial polypeptide expressing nucleotide sequence isolated from the Sargasso Sea
cattcttctcaaactccactttgtgctgaagaattatatgaagcagctaaacaatcttcattacctaaagatatttttcagtatttacatttagatcatgatcaaacatcaagaataatttcagactcaagaattaatcatgttttatttacaggttctgtaagtggaggaaaacaaataaaaaaatctatagataccagatttattggagctggtttagagttaggtggaaaagatcctgcttatgttagagctgattgtgacttagatcatgctgttgaaaatttagttgatggatcatacttcaattctggtcaatcttgttgtggtattgaaagaatttatgttgataaaaaaatatacaatacatttgtagaaaaatttaaagatgtaactgagaaatacattttaggaaatccactagagatggagacaaatttagggccagtagtgaagcaatctgctgcaaataatattagatctgaagttaacaacgcaattagtcaaggtggcaagaacattattgataaaaaaaaatttaatttagacgatggtaaaaattgttatgtaagtccaagtgcactcatcaatgttgatcattcgatgaaatatatgatggaagaaatatttggtccttcagttggaataatgaaagtagaaaatgaaaatgaagctttatctttaatgaatgatagttcttatggattaacagcaagtatttggacaaatgataagtcttttgctgaaaattttggaaaaaatgttgagacaggaactttttttatgaatagatgtgattacttagatcctggtttagcatggaccggtgtaaaagatactggaataagagttactttatctgttctaggatttgatcatttaacaagagcaaaaagct

SEQ ID NO: 199237 - DNA, 633 bp, Unknown
  Bacterial polypeptide expressing nucleotide sequence isolated from the Sargasso Sea
gtgacgaagtggccgatgcgttaatcgcgcagctgcaacaggaaatcagcacattaaaagtaggaccaggcacaggcgtcagcccagaacctcatatgggccctttgatcagccgtcagcatgccgacaaagtgttaagttacatcaatgcaggtgtagctgaaggcgcaactctggtggcggatggacgcaattttgtcgtcagtcagcatcagcagggttattttgttggccctactctgtttgataaagtgacccctgacatgagcatttaccgtgaagaaattttcggccctgtgctggcggtagttcgtgtgccttcttttgctgaaggactggcgctgattaaccagcacgaatttggtaacggcactgctattttcactggcagtggtgaagcggcccgtgaatttaccgcccaggtgcaagtcggtatggtcggagtcaacgtgcctattcctgtgcctatggcctttcacagctttggtggctggaaacgcagcgtatttggcccattgaatatgcatggtccggacggtgtacgattttacacccgcatgaaaaccatcacagctcgctggcctaatggtcaggcccagggtaatcagttctctatgccgactatgaagtaaa

SEQ ID NO: 199238 - DNA, 304 bp, Unknown
  Bacterial polypeptide expressing nucleotide sequence isolated from the Sargasso Sea
tatggatgaaatagatattaaagacaagtcattagtttttaataccgatcttgtagaagctctagaattacataatttgatggcccaatcaaaagtaactcttcattctgctttgaacagaaaagaaagtagaggagctcatgcaagagaagactttaaagacagagatgataaaaattggttagtgcattctttagcatggttaactaataaaggagatgttattatgggatcaagaggagtacacatgaacactctaacaaatcacattcaacctatacctccaaagaaaagggtttattga

SEQ ID NO: 199239 - DNA, 466 bp, Unknown
  Bacterial polypeptide expressing nucleotide sequence isolated from the Sargasso Sea
atggataaaacttcagagatgggacctctagttacaaaagagcatttagaaaaagtaaaaagttatgttgatttaggagttgaagagggagcaaaattagttgttgatggaagaaacttaaagctccaaggttatgaaaatggattttatattggtggttgtttatttgatcacgttaataaagacatgagaatttataaagaagaaatttttggtcctgttctatctgtagttagagttaaaacttttgaagaagctgcaaaactaatcaatgatcatgaatacggaaatggagtaagcatttatactagagatggtgatgcaggcagaacatttgctagtaaaattcaagtaggaatggttggtattaatgttccaatcccagttcctatggcctttcatagttttggtggctggaaaagatcattatttggagatagcggcatgcatgggatggaaggaataa

SEQ ID NO: 199240 - DNA, 787 bp, Unknown
  Bacterial polypeptide expressing nucleotide sequence isolated from the Sargasso Sea
aatgctgagttactttggagaaattgaaactattgatactggaaaattatttagagaaacaaaaaagcaagccaactatattgcagaatattatgactattatgctggtatggcagataaagttgaaggaacagttttgcctatagataaaccaaatattcaagcaataaccacaagagtaccaataggtgttatagcagcaattattccatggaactcccagatgttattaacagtaactaagctggctccagctttggcaatgggtaatactgttgttataaaatcatctgaacttgcacctgcagttttatttgagtttgcaaaattggttgaagaaacaggaataccaaagggtgttgtaaatatcattacaggttatggtgatccatgtggaaaggctctaacaacacacaacctagttgataaaattgcatttacgggcggtcctgaaactgcaagacatataattagaaattcagctgaaaatttatctgaagtaagtttggaacttgggggaaaaagtccagtagcagtatttgaagatgcacatcaagaaaatgcaataaatggaattaccgcaggaatttttggtgcaagtggccaaagttgtattgctggttcaagactttatttacaaaaaggaatttataatgaatttctagataaacttgcttcacgagcagaaaaaataaaaattggtgcgccaatggatcctgaaagtgaaatgggaccgattagtaattttaaacaattagagataattgaaaaaaatattaaatttaac

SEQ ID NO: 199241 - DNA, 856 bp, Unknown
  Bacterial polypeptide expressing nucleotide sequence isolated from the Sargasso Sea
acaggtaaaatcataggagaaatctcttgtgctaaaaagaatgaagtagaccttgcagtatctgctgcaaaagcagcctttaattcaagagtcctggttgacatgccattacttgaaagagctaaactaatgcaccgtattgcagatgaaactagaaaaatagctgatgaaggtggtaaaatactttgctatgaaaatggtaaaatgctgggttcagctattaaagaattcaatgatgttgcggacatgtttgattactatgccggccttactgataaactagaaggaaaaacaattcctatttcaccaacagtttttgattatactgttttagaacctttcggtgtttctgcgcatatagttccatggaattttcctatatcaatggttggtagatctcttgcatgttctttcgcaacaggaaattctacaattgtaaaaacagctgaactaactcctctatctgctactttttttgccaaagctatagaaaatgcaggtgtcccaaatggtatagttaatataatttgtggttatggaaatgaagcaggttcttatttggtatcacatcctgatgtaaatcatgtggtgtttactggttctgtagctactggcaaaaaaatattacattcttgtgctgataaagcaattcctgcagttattgaacttgggggaaagtcagctggtatagtttatgaagatgcagatctggatcaagtaatagaaagtgcacgtcacggtatatttggagttgctggtcaaatttgtacagctatgtcacgattagttgttcataaatcagtaaagaatgaattaattgataagcttgtagatttgagtaaatctctaaaagttg

SEQ ID NO: 199242 - DNA, 856 bp, Unknown
  Bacterial polypeptide expressing nucleotide sequence isolated from the Sargasso Sea
atttgctttgatatgcattccttttggaatatttgatcccactatatttaaaagcatcccaataagaatttttggaattatgaataacataacattgcttgcagtacctttatttatttttatggggaccattttagaaaaatcaggcattgcagcaaaaatgttagaaaatatggctgctgcttttaaaaaaactaaaggtggattatcaatatcaattattattgtgggggctctccttgctgcaagcactggaattgttggagcaaccgttgtaactatgggtttaatgtctttaccaatattaataaatcaagggtatgaaaagagtttctcagcgggattagttgcatcaaccggcaccctagggcaaatcatacctccttcaattgcgttggttttacttggcgatgttatgtcaaatgcttatcaaagagctcaaaatgatatgggtatattttctcaacagacggttacagtaggagatctttttataggcgcagtaataccaggaataatgatatgtcttggatatcttatctatacgatttataaaaatggtaaaaatgcagatttgaaagactactctaatggtgttccaattcaaagaattgagttattaaaaactcttgcccttccaatagtcttaatttttcttgtacttggttctatatttgctggcattgcaacgcctacggaagcagcagcaattggagcttttggagcgatgctaattacatttgtaaatggcaagattgattttcaatttatcaaggaaacctcagagaagacagcaatagtatctactatgatttttactatacttattggagcctcaattttctcattgatcttt

SEQ ID NO: 199243 - DNA, 367 bp, Unknown
  Bacterial polypeptide expressing nucleotide sequence isolated from the Sargasso Sea
ggagagagatgtatggctcaatcagttgctgttgcagtaggtgatattggggatgaattggttacacgtttatctaaaaaagttgaagcattaaaagttggtccaggtatggataaaaattctgaaatggggccccttgtaacaaaagaacatttagaaaaagttaaaggatatgttgatctaggagttaatgaaggtgccaaactgattgtagatggaagaaatctaaagttgcaaggatatgaaaatggtttttatattggaggatgtttatttgatcatgtcaataaagatatgagaatttataaagaagaaatatttggtcctgttttatctgtggttagagtcaaaaattttgatgaagcta

SEQ ID NO: 199244 - DNA, 841 bp, Unknown
  Bacterial polypeptide expressing nucleotide sequence isolated from the Sargasso Sea
actggcatacctaaaggagtggttaatgtcattacaggttttggcgatccttgtggtaaaactttaacaacacataatctagtagagaaaattgcatttactggaggaccagaaactgcaagacgtattattaaaaattcagcagaaaatctctctgaagtaagtttagagcttggtggaaaaagtccagtcgctgtatttgacgatgcggagcaagaaaatgcaattaatggaataactgctggaatttttggagcaagtggacaaagctgtattgcaggttcaaggctttacatacaaaaaggaatttataacgaatttttagataagctttctagtaaagcttccaaaataaaaataggagctccaatggatctggatacagagatgggtcctttaagtagttttaaacaattagagacaattgaaaaaaatataaaagatacggttgatcaaggtggaaaaattaagtgtggtggtaaaagagactccttttcaaacaaaggatactacttcccaccaacaattatagaatgtgataatcacaatctgccaactgcagaaaatgagttatttgggcctatattatcagtaatgaaatttgatacagaggaggaagtaattaataaaatgaatgataatcaatatggattatcctcaggtgtttatacaagcaatctttcaagaggaatgcgagtatctaaggcaataagagctggaattacttttgttaatacttacagactaatttcaccttcggctccatttggaggtataaaggacagtaggtacggcaaagaagctggcatagattctattaaagattatacaagagtaaaaa

SEQ ID NO: 199245 - DNA, 400 bp, Unknown
  Bacterial polypeptide expressing nucleotide sequence isolated from the Sargasso Sea
aatgaccgttagagttgcagtgaatggctttggacgaattggcagaaatgttgttagagcattgtatgaatcctcaaaaagagcggagatggaaattgttgccatcaatggccggggatcgccagagcaaataacacaccttttcaagtatgatagtgcacatggaaagtttcctcatgaagtacgttgcgatggaaaatcattggtcatcgatgataaagataaaattaaatttatctatgatcgagatccgactaagctgccatggaatgatcttgatgttgatgttgttttggaatgtacaggtgcatttagagatcatgaaactgcatcaaaacaccttgatgcagaagcacgtaaagtattaatttctgcaccgggcaagaatatggatgccaca

SEQ ID NO: 199246 - DNA, 397 bp, Unknown
  Bacterial polypeptide expressing nucleotide sequence isolated from the Sargasso Sea
ttccctgtttgatcaggtgaaacctgaaatggatatctacaaggaagaaatatttgggccagtactctcaactgtgcgagctgtcgattatgaagatgcgattaaccttattcattgcaatcctcatggaaacggcgtagcaattttcactcgtgacggagatgctgctagagattttgccagcagaatcgaggttggtatggttggcataaacgtacccattcctgtacctgtaggatttcacagttttggtggttggaaacagtctctttttggtagtcatcatatttatggtccggaaaccatacatttttataccaggttgaaagcaattacttcacgctggccaacaggaattaaagctggggctcaatttaatttccctacaatgaactaa

SEQ ID NO: 199247 - DNA, 841 bp, Unknown
  Bacterial polypeptide expressing nucleotide sequence isolated from the Sargasso Sea
tccagcattagttttgttggttctactccaatagctgaatacgtttatcatacaggtacaaaaaataataaaagagtacaagctttaggtggagcaaaaaatcacatggttattatgccagacgctgatgtaaataaaaccactgatgctatcatagggtcagcatttggatcagcaggagaaagatgtatggctatttctgtagcagtttgtgtaggtaagcaaacaaaggaaaaaattaaaacaaaattgttagaggagactgccaaattaaacgtaggaccttatactgacgaaaaaagcgattttggtcctcttaataatgaagctcattttaaaaaggttttgggatacattgatgctggagaaaaagaaggtgcaaaacttcttactgatggaagaaatttcaaaaaacaaggatatgaaagtggttattttgttgggcctacaattttcgatgatgtaaaacctgaaatgaaaatttataaagaggaaatttttgggcctgtattaagcatgatgactactgaaacttatgaagaagctttaaatctagtaaatgaccatgagttaggtaatggagcagcggtttttactaaaagtggtaatattgcaaaacattttacagaaaatgctaaaattggaatgattggagtaaatgttccaattccagttcctgttgcatatcacagctttgggggatggaaaagatctttgttcggagatcactcgatgcatggacccgaaggagtgagattttatactaaattaaaaacagctacagttacttgggttgaggataacgctggtcctgaatttacaattccagttttatcttaat

SEQ ID NO: 199248 - DNA, 847 bp, Unknown
  Bacterial polypeptide expressing nucleotide sequence isolated from the Sargasso Sea
attagcaatgggaaacactgttgtaataaaatcttccgaactcgctccagcaactatgtttgaatttgcaaaattaatagaaaaaactggaatacctaaaggagtagtaaatgttataacgggttttggcgacccatgcggtaaaaccctaacatctcataaaaatgttgaaagaattgccttcactggtggaccagaaactgcaagacatattattaaaaattctgcagaaaatttatcacaagttagtttagaattaggaggtaaaagtcccgtagctgtatttgaggatgccgatcaagaaaatgctttgaatggtataacagcaggaatttttggggctagcggtcaaagctgtatagctggatctagattatatttacaaaaaagtatttataacaattttttagataaattagttaatcgtgctaaaaaaattaaattgggaaatccaatgtctgctgatacacaaatggggcctcttagtagtttaaaacaattagaaataatagaaaaaaatataaagcttacattagatcaaggtggaaaaataaaatgtggaggaaaaagacatactgtgtcaaataaaggttattattttccagctacaataatagagtgtgaaaatcataatcttccaacagctgaaaatgaactatttggtccagtattatcagtaatgaaatttgaaaatgaggaagaagtcataaataaaatgaatgataataaatatggcttatcttctggagtatacacaaaagatttggcaagaggtctgagggtctcaaaagcaatacgcgcaggaatgacttttgtaaatacttatagattgatttcaccttctgct

SEQ ID NO: 199249 - DNA, 907 bp, Unknown
  Bacterial polypeptide expressing nucleotide sequence isolated from the Sargasso Sea
ggtttcagtgaagaaaatatagaagacgtcgtcgaaatattcaatacacccttaattggccactacaattgggactataccgatgccgatactcgtataaaaaaattatacgaattaggtaagaagcttaattgggatggctctatcgatctagactggtcgaaagctataaaaaaaggtgaacctccagtgaaagcagagttaatagctagaatggaaggccctcttgctgcattacctgaagatgagcgaatagagtatatgcgacatgatagcgcttggtcgttaagtcaatttctacacggtgagcaaggcgcattattagttgcctcgcaactagtatcttgtgctccgacctatcaagctaaactatatgctgcctctcaaacttttgatgaagcaagacatgttgaagtttttgctagatatttaaaagaagtatctggaattgaatatccaattaataaaaatctaaaatccttgatagataaaatcctttcagatccaagatgggatcttaaattcattggtatgcaaataataattgaaggattagcgctagcggctttccagactactaaagaaacttcaaattgccccttgcttagacaactggttcattatgtcattagagacgaagcaagacatgttacctttggagtgaattatcttgaagatttcttaagcacccttactgaagaggaagttgaagatagagcaatgtttgcttacgaagcctgtgtagttatgagagacagaatcatcaacactgaattacccgcaaggtggtttaatataagtgaagaagaaattagagaaatgctgatcaatgatgaaacacaagatatgtttactaatcttttattcagcagagttatgccaaacctgaaaagaattggtcttctta

SEQ ID NO: 199250 - DNA, 756 bp, Unknown
  Bacterial polypeptide expressing nucleotide sequence isolated from the Sargasso Sea
ttgcttgaaaataaaattgtccaagcaataagctttgttggttctacgccaatagctgaatatgtttatcataccggcacgaaaaataataagagagttcaagcattaggtggagcaaaaaatcatatggttataatgcctgatgccgatataaataaaaccacagatgcaattattggttcggcttttggatcagcaggagaaagatgtatggctatttctgtagcagtttgtgttggaaagcaaaccaaagaaaaaatcaaaacaaaactattggaagaaacagctaaactaaatgttggtccttatacagatgaaaaaagtgattttggtcctctaaataataaagcacattttgaaaaagttttaggatatattgatgctggtgaaaaagagggcgcaaaattattgagtgatggaagaaattttaaaaaacaaggctatgaaaatggatattttgtagggccaacaatttttgatgatgtaaaacctgaaatgaaaatttataaagaagaaatttttggaccagtgttaagtatgatgacaacagaaacttatgaagaagctcttaatttagtaaatgaccatgaattagggaatggagcagctgtttttacaaaaagcggaaacattgcgaaacactttactgaaaatgctaaaattggaatgataggagtgaatgtaccaattccagtcccagttgcttatcatagttttggtggttggaaacgatccttgtttggagatcattcaatg

SEQ ID NO: 199251 - DNA, 807 bp, Unknown
  Bacterial polypeptide expressing nucleotide sequence isolated from the Sargasso Sea
ccgtcttgttcaataaaattagctgagctatttaccgaagctggtttgccagaaggagttttaaatattgtaaatggtgacaaggaagtagtagacgccatattaacaaacaaagatattaaagctgttagttttgtagggtcaactcctatagcgaaatatatttatgaaaatgctgcaaaaaatgagaaaagagtccaagcattgggaggagccaaaaaccattgtgttgtgatgccagattgtgatttagatcaagctgtaaatggtttaatgggggcagcttatggttctgctggagaaagatgtatggcacaatcagttgcagtagctgttggaaatattggagataaacttgttaatgaattaacaaaaaaagttgaagttttaaaagttgggccaggaatggataaaaattcagaaatgggacctttagttactaaggaacatcttgaaaaagttaagggctatgtagatcttggagttaaagaaggagctaagctagttgtagatggaagaaatattaaacttcaaggttatgagaatggtttttatataggaggatgtctttttgataatgtaaaaaaagatatgagaatatataaagaagaaatatttggaccagtattatcggtagtcagagctaaagattttgaagaagctactcaactagttaacgagcatgaatttggaaatggtacaagtatttatactagagatggagatgtaggcagaacttatgcaagtaaaattaaagttggtatggttggaattaatattcccatccctgttcctgttgcctttcat

SEQ ID NO: 199252 - DNA, 691 bp, Unknown
  Bacterial polypeptide expressing nucleotide sequence isolated from the Sargasso Sea
ttgacgtttgatcttgatgtggaaaatgaattaaaccttactcctcagcaagtcgaagatgttgctgaaatatttaatactccattaactggtgcttataactgggactacacagttgccgataatagaattaaaaaactttatgaattaggcaaagaactaaactggaacggctctatggatttaaactgggattacaaccatccagcagatgagagaatcatgcaggccgacgaagatctacctcatgagactcttcaagcatatgaaagtttaactgaaaaagaaaagattgaatttgatcgtcatgatgcagccgaacttctcagtcagtttcttcacggagaacaaggagcattgcttgttgcatcgcaacttacagcatgtgcgcctacttataatgcaaaactttatgcagcctcgcaaacttttgacgaagctagacatgttgaagtttttaatcgttatcttcaagaaaaaattggtatgcattatccaattaataaaaatttaaagcttttgcttgacaaaatactcactgatcctagatgggatcttaaatttattggaatgcaaattatcattgaaggtttagcactggctgctttccaaatgttaaaaagtctatcgaaggatccgctattaactcagcttcttcattacataattcgagatgaggctagacatgtta

SEQ ID NO: 199253 - DNA, 159 bp, Unknown
  Bacterial polypeptide expressing nucleotide sequence isolated from the Sargasso Sea
attgattaaaacagacatacttattatagggagtggagctgcaggaatgacggctgctattgagttatctaatcaatttaatgtcaccctcataacaaaaaattctctggtagatagttctacatggtacgcccaaggcggtattgctgctgttattga

SEQ ID NO: 199254 - DNA, 807 bp, Unknown
  Bacterial polypeptide expressing nucleotide sequence isolated from the Sargasso Sea
atttaaaaacccgcccgattatgaaaatcctcaggatactgataaaaataatgattatgtggttattgttcaagcaactgataccagtcgtttagtatcagagcaaacagtaaaagttacggttgataatgttgatgaaataccaccccttattaccggaccggatggagatattgtcgaggtgtgggaaaatacaactgctgttcacacatttactgctaatgaagatgttgagtggagtattagtggtgctgatgcgtcgaaattttcaataaatacagatggagtattgtcttttaaaatagccccagattatgaaaatcctcaggatactgataaaaataatgattatgtagtagctgttaaagcagttgatatcgctgatttagtatcagagcaaacagtaaaggttactgttgtcagggcacctccaattattactgggccgggtgatattaagacgcaggggcagcttcctttcaacttgagctataccgacagtgctatcaatgtcaatgaaaatagaacgtctgttcatacatttactgccaataaagaggttacctggagtgttgttgatgcgaatttatcgaaatttcaaataaatacagatggagtattgtcttttaaaatagccccagattatgaaaatcctactgatagaaataaaaataatacatatccagtaataattagagctagagacatacataatttagtatcataccaaacagtaacagttacggttgttaatgttgatgatacacctccaattattactgggacttctggtggtccaggcgcttc

SEQ ID NO: 199255 - DNA, 394 bp, Unknown
  Bacterial polypeptide expressing nucleotide sequence isolated from the Sargasso Sea
aatgcaaaaaaccatgcagtcgaaatgtgcagtttttagaacagaaaaaaatcttaaagaaggtgttgatgagattaaaaaaacatatgatggtatggactcaatttcggttaaagataggtctttagtatttaatactgatttagttgaaacattagaatttgataatttaataagacaagcagtaacaactgtagagtctgcataccatagaaaagagagcagaggtgctcacgccagagatgactatccaaaaagagatgacgaaaagtttatgcaacatactcttgcttggtgtgatggaaaaaatacaaagattagttacagagcagtacacaaatcaactttaacaaatgaagttcaatattttccaccacaagagcgagtatattaa

SEQ ID NO: 199256 - DNA, 658 bp, Unknown
  Bacterial polypeptide expressing nucleotide sequence isolated from the Sargasso Sea
gcagacattgaaaaagctgtatctgctggcgtctcttcatgtttcttaaatacaggacaatcatgtaatgccccaacaagaatgcttgtgtcatctaagaactatgacaaagcagttgaagttgctgccaatactgcaaatgctatgaaagttggagatccttttgatgcagatacaaaaatgggtccaatttccaataagacccaatatgagaaggttcaaaggatgattcagattggtattgatgaaggagcaacattatctgccggtggcgttggtcttccggaaggttgtgagagcggttattacgtaaaaccaactatattttctgatgtaactaatgatatgactattgcaagagaggaaatttttggcccagttttatgtttaattaaatatgaaaccgaagaagaagccattaagatagcaaatgatactccttatggccttgccggatatatccaaggcgagcatgcacatgcagttgaagttgcctcaaaaataagagctggccaaatcactatcaacaaaggagctagagtcagatcagcaccatttggtggttatggttcatctggtaacggaagagagcatggcacacatggccttgaagaatgtttggagacaaaagctgtaataggtgctttagtcgaataaa

SEQ ID NO: 199257 - DNA, 621 bp, Unknown
  Bacterial polypeptide expressing nucleotide sequence isolated from the Sargasso Sea
aaacggtctggcagatggtcacgcatccgcactggtccctgcgaatgctgcgggcaggcgtgccgcaattcgtcaatctacaaccctatcatcaagatggttattcacacaatatcggtcgatccatcgtagagtccagcaaatatattgaagagcgaatggggctgcacataaccacctcactctttaaggaaattcgggccatgtggcctaataaattgctggcaaaaggggtgcttgatcccaaagaggctcaggcttatctggagttaggcgctgatggtctggtcatttccaatcacggtggccgtcaactcgatgccgcgccatcggtcgtatccctcttgcctggaatccgagctgccgttggtcctgaggccaccctgattgccgatggtggcattcgctctggtctcgatatcattcgaatgttagccttgggagccgattttgttctgatgggccgtcctttcctttttgcggtgggggcgcttgacaggcgaggaggagatcacgtgatgaatctgctcaaagctgagttacagacaacgatgggacagcttggatgcaatacgctgaaggagctcccagagtttctgttctcgaatcctcagtcctaaa

SEQ ID NO: 199258 - DNA, 835 bp, Unknown
  Bacterial polypeptide expressing nucleotide sequence isolated from the Sargasso Sea
ttgtcacaatcacaagttgaagatgttgtagaaatcttcaatactcccctaacgggttcttacaattgggactatacagttgcagataacagaattaaaaaattatatgaattaggaaaagaactcaactggaatgggtcgattgatctaaattgggagtatacacatccagaaaatgagagaattatccagccagatgaggagttacctcatgagtctctcgatgtttatcttaacttgtctgatgaagataagattctttttgaccgacatagtgttgctgaattaatgagtcagttcttacatggcgagcaaggtgctttgttagtagcatcacaattggcaagttgtgctccaacttttaatgcaaaattatatgctgcatcacaaacttttgatgaagctcgtcatgtggaagtattcaataggtacttacaagaaaaaattggtattcattatccaatcaaccccgccttaaaaactcttttagataaaatcctaaccgatgaacgctgggatctaaaatttattggaatgcaaataataattgagggtcttgcacttgcagcattttcaatgttgaaatccatcactaaagatcctttattaaagcaactgcttcactatgttatacgtgacgaagcaaggcatgtaacatttggcattaattatcttgaagattatgtcaaaacattaagtcaagatgaaattaatgatcgtgcaaattttgcctatgaagcctgtgtaatctcccgagagagactgatcaataccaagtctgaacaacgtttcttaaaaatgacagaaagtgaggctcgggattttatctcagcac

SEQ ID NO: 199259 - DNA, 505 bp, Unknown
  Bacterial polypeptide expressing nucleotide sequence isolated from the Sargasso Sea
tttgagtagtcagtttgagacaggaactggatttacaagtgagacacgtccatctcatgtgacagtcggtggttcaggaaccatactcacctcatcggataatgggaccacatggacttcaagaactactgcaacatcaagagatctcaatggaatcatctatgcaaacagtaaatacgtggcggttggtgaagatggtaccatccttactagtttgaatggagcaagtgcttggaattctatgacttctagtacatctagtagtctgaatggagtcacctatgcaaacagtacttttttgacagtgggtggttcaggtaccatccttacctcatctgataatgggacctcatggacttctaggacttctggtacttctaatagtcttagtgccgtcgcttacgggaacagtaccttggtggcaattggacattctggaacaattctcacctcatcgaatgggacctcatggacttctaggacttctggaacttcagataatctc

SEQ ID NO: 199260 - DNA, 672 bp, Unknown
  Bacterial polypeptide expressing nucleotide sequence isolated from the Sargasso Sea
catggaaaaaattgcagttgttacaggtagttctagtggaattggatttgaaacatctttggcgttggcaagagatggatatttcacatacgcaaccatgagagatatgaaaaaagctgacgagatacagagaattacaaatgaagagagtcttccattaaaagtaatagaattagatgtggatgatgaagaatctgctaaaaatgcaataggtacaattattcaagaaaaaggtagaatcgatgtactagtaaataatgcaggatggggcatatggggcactggtgaagacgtttcacttgaggaatttagggaacaatttgagacgaactttttttctgttgtaagaatgatacaaaaagttgcaccgataatgagagaacaaggttctggaaatattgtaaacataagctcagttgcaggaagaataggattaccagcatcaactgcatacgttagttcaaaatttgcaatagaaggtctttcagagtcactgagatatgaactaggaccatttggagtaaatgtaataattattgaaccgggagtaatcaagacaaacttttttgattcaatgaaaactgcaaaaaaagcagatgttggagaaacctatagagacataacattaaaggtaatcacaggagtaaaaatgatggcagaaatgggaacacc

SEQ ID NO: 199261 - DNA, 247 bp, Unknown
  Bacterial polypeptide expressing nucleotide sequence isolated from the Sargasso Sea
gggaaaaaatatttaaataagaaagtttttccatatgaaaaaaaaattaattttaattcagttagaaaaggctctgttatcggcaaacacgaagtctctttttctagtggaaaagaaatagtttctttaaatcatgaggcctttgatagagagcttttttctgtaggtgcattaactgcagcgaaatggattattaataaaaagcctggtctttattcaatgagagaccttttaaattttaagtgaa

SEQ ID NO: 199262 - DNA, 610 bp, Unknown
  Bacterial polypeptide expressing nucleotide sequence isolated from the Sargasso Sea
gtgtttctgtaccggtgcaatagattaggaacaaattcattaatcgatcttgttgtttttggcaaagcagctagtctaacatgcaaagaaaaagtaaaaccaaattctaaaaaaattgaaattagtaaatcaaaaacagataatattattgaaagatttgataatattagaaacagtaaaggaaactctacaactggagaacttcgcacttccatgcaacacataatgcagcaaaaatgtgcagtatttagaacacatgatctcatatcaaaaggtattgaagaatattcaaaagtagagagctcaatggatgacatagatattaaagacaaatcattaatctttaatacagacttggtcgaagctttagagttacacaatttaatggcgcaatcaaaagtcactcttcattctgcgttaaatcgaactgaaagtagaggcgcacatgcaagagaagattataaagaaagagatgataataattggttagttcactctttagcttggttaaacgataagggagatgtgagtacgggttccagaggcgttcacatgaatactctaactaatcatgttcaaccaataccacctaaaagaagagtttattaat

SEQ ID NO: 199263 - DNA, 509 bp, Unknown
  Bacterial polypeptide expressing nucleotide sequence isolated from the Sargasso Sea
cagagatagggtaaagagctatgtagacctgggtgtagaagaaggggcaaaactgattgtggatggtcgttctaaactatccgaagaaacaggtttttttcttgggccctgtttgtttgatgatgtaagacagaacatgcgtatatatcaggaagaaatttttggtccggttctttgcatagttcgtgctaatagtcttgaagaggctgtagagcttattgatgagcatgactatggtaatggtacctgtatctttaccagagatggggaagctgctcgttacttcagtgattatattcaggttggaatggtaggggtaaatgtccctttacctgttccggtagcctattttagctttggtggttggaaacggtctttatttggagatatgcatatatatggcccagaggctgtgcggttctacacacgatcaaaggtaattacccagcggtggccatcaggtggagttcgggagaaagttaagttttcttttccagggagtgattagt

SEQ ID NO: 199264 - DNA, 337 bp, Unknown
  Bacterial polypeptide expressing nucleotide sequence isolated from the Sargasso Sea
aggtagaaaaaagcttaattctctccttactgaatttaaaaatattaaaattagtgacaaaagtacaatctggaatacagaaattattgaagcttacgaactgcaaaatcttttattgcagtcattagctagtattgattcagctttaaataggaaagaaagcagaggggcacacgctagaatggactatcagaaaagagatgataaaaaatggatgaaacatactatgattgctttaaatattgaaggaaaggctgacataaactacaggtcagtcaatcttaaaactaaaaataaagaaataaaaactattgaacctaaggcaagagtttactag

SEQ ID NO: 199265 - DNA, 856 bp, Unknown
  Bacterial polypeptide expressing nucleotide sequence isolated from the Sargasso Sea
aatggaattaatcccccttcttctgcttatatttatatgcggtgctttattaataggctatccagttgcgtttactcttgcaggagtatcaatactctttgctttggtatgtattccttttggaatatttgatccaacaatttttaaaagtatcccattgagaatttttggaataatgaataatgttaccttgctcgcagttccgctatttattttcatgggaactattcttgaaaagtcaggtattgcagcaaaaatgttagaaaatatgtcggctgcatttagaaatacaaaaggtggtttatctatatcaataatttttgttggagcattactggctgcgagcactggtattgtaggtgcgacagttgtaactatgggtcttatgtctttaccaatattaattaaccaaggatatgaaaaaagtttttcatctggtcttgtagcttccacgggaactctaggacaaataatacctccttcgattgctttagttcttcttggtgatgttatgtcaaatgcgtatcaaagagctcaaaatgatatgggtattttttctcaacaaactgtcacagtaggggatctttttataggcgcaataattccaggaataatgatatgtcttggatatcttatctatacaatttatagaaatcataaaaatctaaaccttgaggactattcaaataaagcttctattaagaaaactgaattattaaaaactcttgctctcccaatagcattaattttccttgttcttggatctatatttgctggaattgcgactcctacagaggcttctgcatttggggcttttggtgctcttacgatcgctgctttgatggcaaataaattt

SEQ ID NO: 199266 - DNA, 511 bp, Unknown
  Bacterial polypeptide expressing nucleotide sequence isolated from the Sargasso Sea
gatatagcagctatagtttttgttggatcaacaccaattgcaaaatatatttacgaaaatgcagcaaaaaatgaaaaacgtgtccaggctttagggggagctaaaaatcattgtgttgttatgcctgattgtgatttagatcaagctgtaaatggtttaatgggtgccgcatatggttctgcaggagaaagatgtatggctcaatctgttgcagtagcggtaggtaaaattggtgatccccttgtaaataaacttgctaaaaaagttgaatctctaaaaattggtcccgggttagataaaaattcggaaatgggacctctcgttacaaaacaacatttagaaaaggttaaggggtatgtagatcttggagttaaagaaggagccaagcttgttgtagatggaagaaatattaagctccaggggtatgaaaaaggtttttatataggtggttgtctttttgacaatgttaataaaaaaatgaaaatttacaaggaagaaatttttggtcctg

SEQ ID NO: 199267 - DNA, 559 bp, Unknown
  Bacterial polypeptide expressing nucleotide sequence isolated from the Sargasso Sea
ttaaatacgggccaaagttgtatttcggctaaacgaataatagctacaaaatcattatatcatgattttttaaaaaaacttaagattcagttatctaaaatgataatgggtgatccgatggataatgttgatattggccctatggtgacattaagtgccagagatgaagttcatgatcaggtcatacgttgtataaattctggtgcaaaacctgaacttggtggtgaaataccagatttaaaaggatctttttatccggtaactttattatttaatgttaaaccaggtatgccagcatttgatgaagagatatttgggccagttttttcattaattatggcaaaagacgaagatcatgcaattgcattaggtaatcaaacacaatttggattgggagcagctttgttcacgaaagatataaagaagggtgaagagattgccagagctcaaataaatgctggtttgtgctttgtgaatgattttgtaaaatcagaccctagattaccattcggtggggttaaggaatctggatatgggagagaactgtcaagttatggtt

SEQ ID NO: 199268 - DNA, 667 bp, Unknown
  Bacterial polypeptide expressing nucleotide sequence isolated from the Sargasso Sea
gcaggtgaaagatgcatggctcagtcggttgcagttgccgttgggagtatcggagataaacttgtcgacgctttagctaaaaaagttgaagcacttaaagttggacctggaatggacaaacaatcagaaatgggaccattggtaacaaaagagcatttagcgaaagttaaaaattatgtagatatcggaacgaaagagggggcaaaattagtagtcgatggaaggaattttaaattacaaggttatgaaaaaggcttttttataggcgggtgtttatttgatcatgtagataaaaatatgaaaatttacaaagaagaaattttcggacctgttttatcagttgtaagagtaaaagattttgatgaggctttagaactagttaatgatcatgaattcggaaacggtactagtatatttacaagagatggagactctggaagaactttttccaataaagctaaaattggaatggtaggtataaatattccaattccagttccaatggcttttcatagttttggtggttggaaaagatctttgtttggtgatcaacatatgcatgggccagaaggagttagattttatactaaattaaaaacaattacttcaagatggccgtctggattaagatctgatccagagtttgttatgcccacaatgaaataaa

SEQ ID NO: 199269 - DNA, 508 bp, Unknown
  Bacterial polypeptide expressing nucleotide sequence isolated from the Sargasso Sea
aaaattggtggtggagaaaatcctgatacagaagttacgcctttaatttctaaagatcaaatacaaagagtttctaattatgttaactctggaattcaatctggagctaaacttgttttaggaggtcaaaaaatagaaaatgaaaaaggtaacttttatgaacctactatttttgagaatgtaaaaacagattcaacaattgcacaagaagaaatttttggaccagtcacatctgtatttgattttcaagaaccagaagaagcaattaaaattgcaaattcaacaaattatggtttagcctcaggtgttttcacttctgatgatcaaaaagcaaagtggagtgcagaaagaataaaagctgggataatttggcataatgattggtttgtggatggtgtaaatttaccaggaggtggttacaaaaaatctggttatggcagagatggtggaattgatggtatctatagtcatggacaaactaaaagaataagtaaaagattaacttaat

SEQ ID NO: 199270 - DNA, 865 bp, Unknown
  Bacterial polypeptide expressing nucleotide sequence isolated from the Sargasso Sea
gaaagttgttgtcgttggtggtggcataagcggactagctgcggcttatgagctattaacgaatgggtacgatgttagtgttattgaggcttcatcaactattggggggaagatctctacggtagaaattgccggagtccccatcgacgggggtccggatgccttccttgtccgtgaaccagaaatgaaagaactgtgctcttctctcggtgtcgcgaatgagctcgttgctcccgattctcgttcagcgaagatctgggttgatggaagtatgcaggcgttacctaaaagccagttccttggaatcccgttggacttagatgaactttcctccctcaacttaattagccccgaaggaatagcgatcgctcaaaatgacctaactgctaaagacaatgcccgagatgatgatgaaactgtcggttccctcatcaggagaagattaggacatgaagttatggagaaactagtcgggcctctcctcggtggaatcaatgcaggcgacccagacaaaatcagcctcaaatcaggagttccctacctgtctgctgcggctagcttggaccctagccttattcggtcgattcagaaatttattcgtgcttcaaatcgcaaccccgaaactcctgtttttctgactcaccctgaaggattaggtaaggtcgtagatgctctggggaaagaacttgaaggaaaaataattcttagtgagcgcatcgaatcagttcatgcaaaggacaagcaatggatcttagaaggtcaagggggaagttatgaagcggattcagtaatcctcacaacacctagctacatttcaggttccattattgaaaccacaaatgacaagattgctaaattacttcaa

SEQ ID NO: 199271 - DNA, 835 bp, Unknown
  Bacterial polypeptide expressing nucleotide sequence isolated from the Sargasso Sea
tggtttgttaatgcggcaaagagatctaaaactgctggttttaatttaatttgtttgtacggtgcacatgggtttggaatctttcagcattttttatctacggcaactaaccagagaacagatgaatatggaggaagtttagaaaatagagcaagatttgtaaaagaagtagttgaggaagttagaaatgaagttggtgataaaataggcatcactcttcgcttatcattagatgaaatgattggtgatcttggttttgccaattcagaagtaagagattttgttgaaatgcatcaagacttacctgatttatgggacttggctcacggagcgtgggaagattgttctggtccgtcgcgttttaaagaagaggcggctcaatttgatcttgttacaggaatcagaaaacttacttctaaaccaattgtaggtgttggccgttttacaagccctgatgtaatggccaaacaaattaaatcaggcacacttgattttattggatgtgccagaccatctatagccgatccctttttaccaaaaaaaattgaagaaggacgtatacaagatattagagaatgtattgggtgtaatatttgtattaccggtgatatgacaatgtcgattagtagatgtactcaaaatcctacctttatggaagaatggcgaaaaggttggcatccagaaactattgaacctaaaggtaagacatcaaaagttttagtgattggatctgggccagcaggcttagaggctgctttagcatgctctaataggggttatgatgttacccttactgaagcttctaaaattttaggaggcagagtgcaaaagagag

SEQ ID NO: 199272 - DNA, 892 bp, Unknown
  Bacterial polypeptide expressing nucleotide sequence isolated from the Sargasso Sea
aattgggatgtaattgttgtaggcgctggagctgctggccttatgacttgtcttgaattaccctcaaatttaaaagtgcttcttttaaatagaaatacaagtaaggtatcttccagtagatgggctcaaggaggaattgcatctgttgttagaaaagatgattcatttgatcttcatgctgaagatactttaaaagcaggtgatggactatgtgattttcaggctgtagaaatgctggttaaagaagctccaggttgtgtaaacaggttgcagaatttagggatgatttttgatcaaagttctgatcaactagctactactttggaagcagcccattcacgaagaagagtcttacatgttaaagatcgtactggaagggcattagttgaagttctagaagatcatattgagaatcaaaaaaatattcttcactgtaggggtgtaagagtaactgaacttctcattgaaaataaagaatgtagaggagttcaggttcttgatggagcaaatttatattggattcaatcaagagctgttgttttggctacaggtggtggtgggcacttatttactaatacaacaaatcctgctcaatcctctggtgaagggattgctcttgcatggaaagcaggtgctgttatcgaagatttagagttcgtgcaatttcatccaactgctttaaaattttatggcgcaccttgcttcttaatatctgaggcacttagaggagaaggggcgattttagttgataaaaatggtgaaagtccagttaaaaatcttgaaaatcgtgatttagctactagagatcaggtaagtagagcaattatgaaaaatatgcatgataataatgtagatcatgttggcttagatcttcgatatatgaccccgaaaa

SEQ ID NO: 199273 - DNA, 271 bp, Unknown
  Bacterial polypeptide expressing nucleotide sequence isolated from the Sargasso Sea
gatgcacgccgcgaatacgcggaaggagtcgcgcggcgctcatgcacgtgaggacttcaccgagcgtgacgacgtcgagtggatgaagcacaccctcgcgtactacgaagaccccctcctcggagagtacaaagtcgacattaagtaccgcccagtgcaccacaacacgatgaacattgaggatttggccgaagtggcgggcgagggcaaggcgttcacctacatggatgacggcaatgtgacgctcgcgccgatgaagcggacgtactga

SEQ ID NO: 199274 - DNA, 415 bp, Unknown
  Bacterial polypeptide expressing nucleotide sequence isolated from the Sargasso Sea
agcctctgcttggcctttatcttttggattagcttgttgtgcttttgaaatgatggcaagtgcaatgtcaagatttgatctttctagatttggaatggaagtattcaggccctccccaagacaagcagacctaatcataatagcaggaacagttacttggaaaatggctccagcaattgaaagggtctatgaacaaatggctgaaccaaggtgggtcatttctatgggtgtttgcgcgacaagtggcggtccatattatggatcttacagtgttgttcctggagtaaatcacattattcctgtagatgtttatgtaccgggatgtccacctagaccagacgcattactatatggaattatgcagttacatgaaaaaattaaacgatattctataaaaaataaaaaccggaaataa

SEQ ID NO: 199275 - DNA, 640 bp, Unknown
  Bacterial polypeptide expressing nucleotide sequence isolated from the Sargasso Sea
agttgctgttgtcgttggaaaaattgcagatccattagttaaaaacttatctaaaaaagttgaagcactaaaagttggacctggattagataaaaaatctgaaatgggaccattagttactcaagcccatctagaaaaagttaaaggatacgtagatataggagttaaggaaggggccaaactgttagtagatggtagaaatttaaaattacaaggatatgagaaaggtttttatatgggaggatgtttatttgatcaagttacaaagaatatgcgaatttataaagaggaaatatttggaccagttttatcagttgtaagagttaaaaattatgaggaagctttaaaattagtgaatgatcacgaatttggaaatggtgtgagtatatttactagagatggtgatacgggacgatcatttgctagcaatgctcaaattggaatggttggaataaatattcctatacctgtaccaatggcatttcatagctttggaggatggaaaagatccctctttggtgatcaacacatgcatgggcctgaaggtataagattttatactaaattaaaaactataacttctagatggccatcaggtataaagtctgatccagaatttacaatgccaacaatgaaatag

SEQ ID NO: 199276 - DNA, 893 bp, Unknown
  Bacterial polypeptide expressing nucleotide sequence isolated from the Sargasso Sea
tacaaatgtagaacaaagaattttaaataaaaaatttctagataaagattataattatccatttggatttgctccaatgggtatgactaacttatcatggcctgaagcagataaaatgtttgcaaaagaaagtgctttaaataatattccaacttgtgtttcaatggcttcaagtacaacattggaagatatgcacaaattctcagaagatcatgcatggatgcaaatttatatttttcaaagtgaagagtttattatggaattattagagagagctaaaaatattggttataaaactttaatactaactgtagacgttcctatattatctagaagatcaagagatgatagaaatggatttggttatccttttaagattggtcctaaacaatttatagattttgtccttcatcctcaatggagcttaactactcttctaaaaggagctcccaaaccgatgaattatgtaacatcaaaaagtggtaatcaaatctttagaagaaaagaaagtagagggactacagattgggatacattaaaaagaattagagatcattggaaagataaattaattataaaaggcataatgaactcagatgatgcaataaaaattaaagatgccggtgctgatgcaattcaggtttctaatcacggaggaagacagcttgatagtgctactgcagctataaatgcactacctaatataagaaaaaatttaggtaaagaatttccaattatttttgatagtggaatacgaagtggaagtgacattctaagagctctagcacttggtgcagatttcgtaatgattggcagacctttaatgtatgcagttggcgcagatggtgcaagaggattacgaagactaataaatataataaaagaagaattaa

SEQ ID NO: 199277 - DNA, 937 bp, Unknown
  Bacterial polypeptide expressing nucleotide sequence isolated from the Sargasso Sea
gaaaataatgaaccttgggctatcgttcttgaagcaagcgaaaaagatacgaataaagctgttgaggcagcccataaagcttttgaaggtgaatggtcaaaattatttccaagagatagagctaagtttttaagagcaattgctgaacaattaagaaacaatgctgaacacttaggtaaaattgaaacagtcgatactgggaaactttttagggaaactaaaactcaagcaacctacatagcagaatattatgactactttgctggactggccgataaagttgaaggaactgtactaccaattgataaaccaaacatgcaagtgattacaacaagagttccaattggagttgtcgcggcaatcgtgccttggaattctcaaatgcttttaactgcagttaaacttgcaccagctcttgctatgggaaatacagttgtcattaaagcttcggagttaggaccggcaacattattagagtttgcaaaactagtcgaaaaaactggaattccaaaaggtgtggttaatgttataaccggttttggtgaaccttgtggtaaagctttaaccagtcataacctagttgaaagagtagcatttactggaggaccagaaacagcgaagcatataattaaaaattcagctgaaaatttatctcaagtaagtttagaacttggaggaaaaagtcctgtcgctgtcttcgaagatgcagaccaggaaaatgcgttaaatggaattacggctggcatctttggagcaagcggtcaaagttgtatagcgggatcaagattgtacctccaaaaaaatatatatgaaaattttttaaataaattgataaataaagctaaaaaaataaaaattggcgctccgatggaaccagatactcagatggggccactaaatagtttaaaacaattagaggttatagaaaaaaatatca

SEQ ID NO: 199278 - DNA, 481 bp, Unknown
  Bacterial polypeptide expressing nucleotide sequence isolated from the Sargasso Sea
aggtgaaaaggaaggtgctaaattagttgtggatggaagaaatttaaaattacaaggatacgaaaatggcttttacatcggtggttgtttatttgataatgtgacaaaagatatgagaatttataaagaagaaatatttggcccagttctatcagttgttagagttaaaacttttgaagaagcctcaaaattaattaatgagcacgaatatggaaatggtgtgagcatttatacaagagatggagatgctggaagaacatttgcgagtaaaattcaagttggaatggttggtataaacgtacccatacctgtgccaatggcttttcatagttttggtggctggaaaagatctttgtttggagatagcgctatgcatggaatggaaggaataaaattttatactaaattaaaaacaataacttcaagatggccctcaggcattagatctaacgctgaatttgtgatgccaacaatgaaataa

SEQ ID NO: 199279 - DNA, 524 bp, Unknown
  Bacterial polypeptide expressing nucleotide sequence isolated from the Sargasso Sea
agatgaaagttctgacattggagcaatcatttccgaagaacaactgaaacgaactttacattatatggatattgccaaaaaaaactctacaaccaatgttgtgcatggtggcaatcaaataacaggtggtgattataaaaatggtttcttctatgaacctacattgatgtcaggtgttccagtaagctctccagtttgtcaagaagaaatatttggtcctgttgcttgtgcaataccatttaaaacatttgatgaagtaatgaatagtgcaaatgatacaccatttggattatcagcagtattgtggacacaaaatttatctagagctttacagttcgtagaggaaattgaggcaggttttgttcaagtaaatcaatgtgtggcacctagagcaaatgtttcttatggcggtttgaagatgagtggcttaggaaaagagtacgcatttgatagcatgataaatcattttactcaaagtaaaacagttttgattaatagaggaaaatcaaatatagatatttaaa

SEQ ID NO: 199280 - DNA, 753 bp, Unknown
  Bacterial polypeptide expressing nucleotide sequence isolated from the Sargasso Sea
ctacacagttgccgataatagaattaaaaagctttatgaattaggtaaagaattaaactggaatggttctatggacctaaattgggattacaaccatccagctaatgagagaatcattcaggctgatgaagatttgcctcacgagacacttgaagcatatgagagtttaactgaaaaagagaagattgaatttgatcgtcatgatgcagctgagctattaagtcaattccttcatggagaacaaggagcattgcttgttgcatcgcaactaacagcatgtgcgcctacctataatgcaaaactatatgcagcatcacaaacttttgatgaggctagacatgtcgaagtttttaatcgttatcttcaagaaaaaattggaatgcattacccaatcaataaaaatttaaagctcctgctagataaaattcttactgatccgagatgggatctcaaatttattggaatgcaaattattattgagggtttagcactagctgcttttcaaatgttgaaaagtttgtctaaagaccctctattaactcaactacttcattacataattcgagatgaagccagacatgttacgtttggaataaattacttggaagatttcatcaaaaccttatcacctgaagaaattgaagaaagagctgaatttgcatacgaggcctgtgttatttcaagagaaagacttattaatactaaggctatgcagaaatatttaaaaatgtcagaagaggaagctagaaaatt

SEQ ID NO: 199281 - DNA, 784 bp, Unknown
  Bacterial polypeptide expressing nucleotide sequence isolated from the Sargasso Sea
catggatcctctttttgtattgaatggcaaactgatcctcgtctctggaggcagtcgaggaatcggcaaggcactggtgtcaggtttcgcaaaaagaggggcaagggtggtttttaccggcagggatgaagattcacttgaatctgccaagaaagaattggctgaagattcttctgaagtatttcctgaatgctgtgacgtcagccggattgatgaagtggaagcgttggtgaatcgggttcgaaaacaacacggccctattgatgtcttggtgaatgttgcaggtgtcaaccggagacaacgcgcggagacctatcttccggaagattatgactttgtcatggacatcaaccttaagggagctttctttctttccaccgaggtaggacgggtgatgcttgaaaatggaagcggaatccaaatcaacatcgactcgctgaatagttacgctccggtcaaaggaatggccccttacgcgatgagcaaattcgggatggtcggcatgacccggacgttggctgcagaatggggtccgaaagggatcagggtcaattccattgctccgggattcattctcaccgacctcacccgaaaagtttggtctgatccttccctgcagcaatggggaatcgagaacactcctttgagaaggcttggtgatcccaaagatctcgtgggagcggctgttttcctggccagcgacgcttctgctttcatgacaggacaggttgtaagggtcgatggaggttttagttcagcaatcctatggcccgtcgaattctaa

SEQ ID NO: 199282 - DNA, 451 bp, Unknown
  Bacterial polypeptide expressing nucleotide sequence isolated from the Sargasso Sea
gatgggtggaataaaattttctggtgatattgcaaaagctttggtagcaggggctgatgcagtaatggttggttcaatgcttgcaggcacatccgaggccccaggaaagattataaaaaagaaaggtaaattatttaaggtatttagaggcatgggttccgtaggagccatgaataaaggttcagcagatagatattttcaaaaaaaacaaaaagacaaatctaagtatgtacctgagggagttgaaggcttaattaaatataaaggggaagttagtaaaacaattaataaattagtaggaggccttagatcctcaatgggatatttgggtgctgaacaaataaaaaatctaaataagaaagctaaatttgttaaaataacaaaagctggtttttatgaaagtatggtacatagtatagatgaagtaaaaaaaaatagtgaatatttatga

SEQ ID NO: 199283 - DNA, 929 bp, Unknown
  Bacterial polypeptide expressing nucleotide sequence isolated from the Sargasso Sea
ttcttctcaactccactctgtgctgaagaattaaatgaggcagctaaacaatcttcattaccaaaaaatatttttcagtatttacatttagatcatgatcaaacatcaagaataatttcagattcaagaattaatcatgttttatttacaggctctgtaagtggaggaaaacaaataaaaaaatctataggcaccagatttattggagctggtttagaactaggtggaaaagatcctgcttatgttagagctgattgtgacttagatcatgctgttgaaaatttagttgatggatcatatttcaattctggtcaatcttgttgtggtattgaaagaatttatgttgataaaaaaatatacaatacatttatagaaaaatttaaagatgtaactgagaaatatgttttaggaaatccactagagatggagacaaatttaggtccagtagttaagcaatctgctgctaataatattagatctgaagttagtaatgcaattagtcaaggtggaaagaacattatagataacaaaaaatttaatttagatgatggtaataattgttatgtaagccctagtgcactcatcaatgtcgatcattcgatgaaatatatgatggaagaaatatttggcccttcagtgggaataatgaaagtagaaaatgaaaatgaagctttatctttaatgaatgatagttcttatggattaacagcaagtatttggacaaatgataagtcatttgcagaaaattttggaaaaaatgttgagacaggaactttttttatgaatagatgtgattacttagatcctggcttagcttggactggtgtaaaagatactggaattggcgttactttatctgttctaggatttgatcatttaacaagagcaaaaagttatcatataagaaatattttaggttatggaaaata

SEQ ID NO: 199284 - DNA, 481 bp, Unknown
  Bacterial polypeptide expressing nucleotide sequence isolated from the Sargasso Sea
gagactgagactgaaaaatgtttatcgcggtttgataaattaagaaatgcagatggtgaaaattctacagcagaattaagactttcaatgcaaaaaacaatgcaatcaaaatgtgcagtttttagaactgaaaaaaatcttaaagagggagtagatgaaattagaaaaacctatgatagaatggactttatttcagtaaaagatagatcactagtatttaatacagacttagtcgaaacacttgaatttgataacctaattcgtcaagcgataacaactgtagactcggcttttcacagaaaagaaagtagaggtgcacatgcaagagaagattatccaaaaagagatgatcaaaaatttatgaaacacagtcttgcttggtgtgatggtaaaaatactaaaattgaatacagagatgttcataaatcaactttaacaaatgaagttcaatattttccacctcaagaaagagtttattgat

SEQ ID NO: 199285 - DNA, 191 bp, Unknown
  Bacterial polypeptide expressing nucleotide sequence isolated from the Sargasso Sea
ctcatataggaaagaaagcagaggtgcgcatgctcgagaagactttaaggaaagagacgataaaaactggatgaaacatacactatcctggcttgatgatgaaaaatgtaaattggaatacagatcagttcatgaatataccctttcaaacgaggttaaatacatagaacccaaagcaagagtttattaat

SEQ ID NO: 199286 - DNA, 568 bp, Unknown
  Bacterial polypeptide expressing nucleotide sequence isolated from the Sargasso Sea
atggcaattaccagacgtgattttctcaacggcgtcgcggtgactattgcggcgggacttaccccgctggagtgggtcagggcgacaggaaagggaaacgcatttatagatggaaattattatcctcctgcgctgacggggctgcgaggtaatcatcctggatcgtttgaaatggcgcatgcgctaggccgcgagcagaagcattttgatttaaacgctctgcccgttgaggaagagtacgatctggtggttgttgggggcgggattagcgggttagctgccggttgtttttggcgacaacttgccggacaaaatagccgggtcctgatcctcgataaccatgacgattttggcgggcacgctaaacgtaacgaattcaccagttcgggcaagaaattactcggttatggcggcagcgaagcattccagtcacccgcgcataatttcagccctgaagtacaaaaactgatggaaaccgtgggcgtcagcgtcacgcggttaaaagagagttttgacgtaaacttctaccccgactggcagctcagtcgcggggtttttttcgacaaga

SEQ ID NO: 199287 - DNA, 806 bp, Unknown
  Bacterial polypeptide expressing nucleotide sequence isolated from the Sargasso Sea
aaaatatatatatgagaattcggcaaaaaatgaaaagagagttcaggctttagggggtgctaaaaatcatttagtagtaatgcctgattgtgatttagatggtgcggtaaatggtttaatgggagcagcatatggatctgcaggagaaagatgtatggcacaatcagttgctgtagcagttggaaatataggtgatgaacttgtttcaaggctttcaaaaaaagcagaagctttaaaagtaggaccaggaatggataaaaattctgaaatgggacctctagtaacaaaagagcatttagaaaaagtaagaggttatgtagacttaggagtaaaagaaggcgctaagcttgttgttgatggaagaagcttaaaattacaaggatatgaaaatggtttttatattggtggctgtttattcgatcatgttaaaaaagaaatgagaatttataaagaggaaatatttggaccagttttgtctgtagttagagttaaaacttttgaggatgcagcaaatttaataaataatcatgaatatggaaatggtgtgagtatttacacaagagatggagatgctggaagaacttttgctagcaaaattcaagttggaatggtaggtattaatgtgccaattcctgtaccaatggcctttcacagttttggtggatggaaaagatccttatttggagacagtgcaatgcatggtatggagggtataaaattttatacaaaattgaaaacaattacttcaagatggccctcaggcatcaggtcaaatgcagaatttgtgatgcctacgatgaaataga

SEQ ID NO: 199288 - DNA, 451 bp, Unknown
  Bacterial polypeptide expressing nucleotide sequence isolated from the Sargasso Sea
tgaaggagtgatgaactacattaaatcaggtgttgaacaaggcgcaaaactactcttaggcggagatcaaaacaaatcaggagagctgaaaaacggattttttatcaatgcaactattttttgtgatgttaagccagatatgaaaatagcaaaggaagaaatttttggaccagttatttctgttatagactgggatgattatgatgagatggtaaaaattgctaactcaactcagtatggattaacaacaatgattgtaacaaactcattatcgaatgctatgaaaacagcagaagatgctgaagttggatatgtttgggtaaacaccgcaggtagatattccggtgcgccttatggtggttggaagctcagcggtattggtgttgaagagtgtttcgatgaaatgaaaggctacgcaagactaaaaaatgtaaatatgaaatggaattaa

SEQ ID NO: 199289 - DNA, 499 bp, Unknown
  Bacterial polypeptide expressing nucleotide sequence isolated from the Sargasso Sea
ggctcatgaggaggtttctaactcagaaacagataagtgtttaaatagattcgataaaattagacattcaactggatccactaaaactgcagagttaagattaaatatgcaaaaaactatgcaatcaaaatgtgcagtatttagaactgaaaaaacattaaaagagggcgtggatcaaataagaaaaccttacgaaggaatgaaagatgtttcggttaaagataaatctcttctttttaacactgaattagtggaaacattagaatttgataatctgattagacaagctctaacaactatggactcagcttatagtagaaaagaaagtagaggagcacatgctagagaagattatagtaaaagagatgataaaaatttcatgaagcataccttagcttggcaaaatgacaaaaaagttgaaataaaatatagagatgttcatgcaaaaacactaacaaatgatgtacaatattttcctccaaaggaaagagtttattaa

SEQ ID NO: 199290 - DNA, 526 bp, Unknown
  Bacterial polypeptide expressing nucleotide sequence isolated from the Sargasso Sea
agttaccaaagaacatttagaaaaagtcaaaggttatgtcgatattggagtaaaagaaggcgctaagcttgtggtagatggaagaaatttaaaacttcaaggttatgaaaacggtttttatatgggaggatgtttatttgataatgtaaaaaaaggcatgagaatttataaagaggaaatttttggacctgttctttctgttgtaagagcaaaagattataaggaagcattatctctagtcaacgatcatgaatttggaaatggaaccagtatattcacaagggacggagatactggaagatcctttgcaagcaatgtaaagattggaatggtaggaataaacataccaataccagttccgatggcttttcatagttttggtgggtggaaaagatctttatttggagatcaaagtatacacggacccgaaggagttagattttatactaaacttaaaacaattacatcaagatggccatcaggaatcaaatcagatccagagtttgtgatgccaacaatgaaataa

SEQ ID NO: 199291 - DNA, 819 bp, Unknown
  Bacterial polypeptide expressing nucleotide sequence isolated from the Sargasso Sea
aatgcatgtttttactacaagagtacctgttggtgttattgctgcaatcataccctggaattctcaaatgtttctaaccgcagttaaacttgcaccagctttagcaatgggcaacaccatagtaattaaagcatcagaaattgcccctacgcctttattagaatttgccaaaataattgacaaagttggactgccaaaaggggttgtaaatataataactggttatgcagatacgtgcagtaaaatacttacttcacatcctaacattaataaaattgcttttacaggtggcgtccatacagcaaaacatattgtaagaaattctgcagaaaatttatctcaagtatctcttgagcttggaggaaaaagtccagtagtagtctttaatgatgcgcgcaaagacaatgcgataaatggaattatggcaagtatttttggtgctggtggccaaagctgcattgcaggctcaagactttatttgcaaaagaatatatacgaagaatatattgcagagctaaaaactaaagccgaagcaattaaaataggtgaccccatgtccactacaacgcaattaggacctttggctactttacatcagttacaaaacatagaagataaaatcaaacaaaccctagatcaaggaggcagaataataactggcgggaatagagtaaatgattttaaaagtggtttttattttgaacctaccatcatagcatgtgatcatcatagtttgcctgcagcagagattgagttattcggtcctgttttatcagtaatgaaatttaacgatgaggatgaagcaattaagctaatgaa

SEQ ID NO: 199292 - DNA, 639 bp, Unknown
  Bacterial polypeptide expressing nucleotide sequence isolated from the Sargasso Sea
tcagagcctgtgaacgttcggaacaggcagggtttgactggctggaactgcattgtgcacacggctaccttctctccatgtttctcacccccctgaacaaccagcggaccgatgaatacggaggtagtctggaaaatcgacttcgatttcccattgaagtattccaggcaatgagagcagtctggcctgatcataaaccgatgtcggtcagactatccgcaagtgactggatgccggagggggtcgatatctacgaaagtgcaaaaatggcgaaagcattcatcgatgcaggttgtgacatgatcgatgtctccagcgggcaaactcaccctgacgcccgaccggtttttggaagaatgtatcaaactccacttgcggatcacattcgcaatgaagaaggaataccggtgatggcggtaggaaacatctatgagcccgatcatttgaattcaatccttgccgctggaagagctgacctctgctgccttgctagaccccatttgagtaaccccttctggactttacacgctgctgctgagcagggttatgcagaacaaccctggcctgttcaatacctttctggaaaacaacagttagagcgaaacctggaacgtgcagcccaatcgggaccgatctaaa

SEQ ID NO: 199293 - DNA, 858 bp, Unknown
  Bacterial polypeptide expressing nucleotide sequence isolated from the Sargasso Sea
ttgcacctgcagtactatttgaatttgcaaagttagttgaagaagtaggaataccaaaaggtgttgtaaatgttattacaggttatggtgatccatgcggaaaggctctaacaactcataatttagttgaaaaaattgcttttacaggaggtcctgaaactgcaagacatataattagaaattcagctgaaaatttatctgaagtaagtctggaacttgggggaaaaagtcctgtagcagtatttgaagatgctcatcaagaaaatgcaataaatgggattactgcaggaatttttggagcaagtggccaaagctgtattgctggttcaagactttatttacaaaaaggaatttataatgaatttctagataagcttgctgcaagagcagaaaaaataaaaattggtgcacctatggatcctgaaagtgaaatggggcctattggtaattttaaacaattagaaataatagaaaaaaacattaaattaactgtagaacaaggtggaaaaattaaatgtggaggcaaaagacattcattttcaaatgaaggatactattttcctccaacaattattgagtgtgataatcataatcttccaacagcagaaaatgaactttttggtccagtgctatctgtaatgaaatttgaaaatgaagaagaagtaataaataaaatgaatgataaccaatacggtttatcatctggagtttatactagtgacttctcaagaggcatgagagtttcaaaagcaatcagggctggaatcacatttgtaaatacttataggctaatatctccatctgctccatttggaggaatgaaagatagtggctatggtaaagaagccaggtattgaa

SEQ ID NO: 199294 - DNA, 786 bp, Unknown
  Bacterial polypeptide expressing nucleotide sequence isolated from the Sargasso Sea
gtagctgctataagttttgttggctcaacgcctattgcaaaatatatatatgaaaatgcagcaaaaaatgaaaaacgtgtccaagctttaggaggagcaaaaaatcattgcgttgtaatgcctgactgcgaccttgaccaagccgtgaatggcttaatgggcgctgcctatggttcagcaggagaaaggtgtatggctcaatcagttgcagttgcagtaggaaaaattggaaataaacttgttagtaagcttgcaaaaaaagttgagtcactaaaagtgggtcccggactagataaaaattccgaaatgggtccgcttgttacaaaacaacatttagaaaaagtaaaaggatatgtagatcttggtgtgaaagaaggagcaaagctgattgtagatggcagaaatataaatcttcaaggatatgaaaatggtttttatattggaggttgtctttttgataatgttgaaaaaaaaatgagaatttataaagaagagatttttggacctgttctttctgtagttagagttaaagattttgattcagctattaacttagtaaatgaacatgagtttggtaatggcacaagtatctatacgcgcgatggcgatgtaggaagaacatttgctagtaaagtaaaaattggaatggtaggaattaatattcctataccggtaccagttgcctatcattcatttggtggatggaaaagatccctttttggtgatcagcatatgcatggattagaaggagttagattttacacaaaattaaaaactataacttca

SEQ ID NO: 199295 - DNA, 759 bp, Unknown
  Bacterial polypeptide expressing nucleotide sequence isolated from the Sargasso Sea
actatttgaatttgcaaagttagttgaagaaacaggaatgccaaaaggtgttgtaaatgttattacaggttatggtgacccatgtggaaaggcgctaacaacacataatttagttgaaaaaattgcttttacaggcgggccagaaactgcaagacacataattagaaattcagctgaaaatttatctgaggtaagtctggagcttggaggaaaaagtcctgtagcagtatttgaagatgctcatcaagaaaatgcaataaatggaattaccgcaggaatttttggtgcaagtggccaaagttgtattgctggatcaagattatatttacaaaaaggaatttataatgaatttctagataagcttgctgaaagagcagaaaaaataaaaattggagcacctatggatcctgaaagtgaaatggggccaattggtaattttaaacaattagaaataatagaaaaaaatattaaattaactgtagaacaaggtggaaaaattaaatgcgggggtaaaagacatccattttcaaatgaaggatactatttccctccaacaattattgagtgcgataatcataatctcccaacagcagaaaatgaactttttggaccagtactatcggtaatgaaatttgaaaatgaacaagaagtaataaataaaatgaatgataaccaatacggtttatcctctggtgtttatacaagtgacttttcaagaggtatgagagtatcaaaagcaatcagggctggaatcacatt

SEQ ID NO: 199296 - DNA, 673 bp, Unknown
  Bacterial polypeptide expressing nucleotide sequence isolated from the Sargasso Sea
attgctattggtttgaaagatgcaggttatactgttgtggtaaattataatagtgatgatagcgctgctgaaacatttaaggctaaaacaggtattgctgtttataaatgggatgtaagtgattttgactctgcagagaggggaatctctcaagtaaagcatgatttaggtcctatagatgtattagtaaataatgctggaacagcatcagactctcgatttgaaaatatgagtcttgaacaatggcataaggtacagcgagtaaatatagattcagtattcattatgtgtaagctcgtttattcaggcatgattaataaaaaatggggtcgcataatcaatattggttcaatgaatggtcaagctggtcagcttaatcaagtaaattatgtagcatcaaaggctggcatgcatggtttcacaaaagctcttgcactcgaagccgctaaacacggtataacagtaaatacgattgctcctggctatgttgatacatacttaattagcgctatgcctgatcgcattatgcagaagatacttgatgcttcccctgttcatcgtcttggtttggaggaagagatagctcatgcagtaaaattcttaattgatgaaaattcatcatggacaacaggttctacaataacaatgaatggtggtactcatatgtactaat

SEQ ID NO: 199297 - DNA, 343 bp, Unknown
  Bacterial polypeptide expressing nucleotide sequence isolated from the Sargasso Sea
atttgctaacgtatctaatgacatgactatagcaaaagaagaaatttttggtcctttgctttgcatccttccttttgaggacgaggatgatgctgtaagaatagcaaatgatactctttatggcttatcaggctatgtttcatcttcggatccagatcatgccttagaagtagcaagaaaaataaggagtggaaatgtacacattaataatgctccgacaggaataaacgatccgtttggtggatttaaacaatctggcaatggtagagagtggggaatatttggatttgaagaatttttagaaattaaagccgttatgggatacgctcaagaagaaaaatag

SEQ ID NO: 199298 - DNA, 552 bp, Unknown
  Bacterial polypeptide expressing nucleotide sequence isolated from the Sargasso Sea
ttggtagagcggccgctcaaagagctttaaaaacagttgaaaaaggtagctttcacgcaccacttcctaaacgtgttacagataaaattattgcaagactaaataagattagattttctaaaggggacacttctgttggtgagataagaaactccatgcaaaacgctatgcaaaaacatgcagctgtatttaggtctaacaattcaatgacagaaggtgtaaaaaaagttgatactatttcaaagggaatagaaaatataggtataaaagatagatcaatgatttttaatacagatcttgttgaggctttagaattagaaaacttaatgcaacaggctattgtaacaatgaaatcagctgatcagagaaaggaatcaaggggtgcacattcacatgaagattttcctgaaagggatgacaaaaattggatgaagcatacaattatgtggctcaatgataaaaataaaaccaagctagattacagagacgtacatttaaatactttaactaatgaagttgcaactgtaccgcctgctgccagagtttactaag

SEQ ID NO: 199299 - DNA, 851 bp, Unknown
  Bacterial polypeptide expressing nucleotide sequence isolated from the Sargasso Sea
tccatctccgttgcaagcaatgccttctctgatgctgctggcaacttcaaccaagacggcaacgactccaataactctctctccttctccattgctcctccacctgatacaacacctcccaccattgcaatctctgccaactcctcctcactcaccgttggcgaaactgctctgatctccttcgcgctttcagaagactcttctgatttcaccctcgctgatatctccgtctccaacggttccctctccaatttctcaggtagcggctcctcctattccgctgtcttctcacccgccaacaacggcgcttctcaagcctccatctccgttgcaagcaatgccttctctgatgctgctggcaacttcaaccaagacggcaacgactccaataactctctctccttctccattgctcctccacctgatacaacacctcccaccattgcaatctctgccaactcctcctcactcaccgttggcgaaactgctctgatctccttcgcgctttcagaagactcttctgatttcaccctcgctgatatctccgtctccaacggttccctctccaatttctcaggtagcggctcctcctattccgctgtcttctcacccgccaacaacggcgcttctcaagcctccatctccgttgcaagcaatgccttctctgatgctgctggcaacttcaaccaagacggcaacgactccaataactctctctccttctccattgctcctccacctgatacaacacctccagacgatattaagtacaaggttacctacctaggaaatgccgaatcaaataaaaacgagatatcgttttcaaacggaattcactccattaaacagca

SEQ ID NO: 199300 - DNA, 526 bp, Unknown
  Bacterial polypeptide expressing nucleotide sequence isolated from the Sargasso Sea
atgagcaacagcagaacggtagtcattaccggtgcctccagcggcatcggtttcggcctggccaaggccttcctcgccagcggcttcaacgtggtcggcaacgcccgctccgccgaacgcctggaacaagccagggaacaactaggcagccccaccgccttcgtcggcgtggccggcgacatcgccaggccggacaccgcacgccacctgatccaggccggtatcgaggccttcggtcaggtcgacgtgctggtcaacaacgccggtttcttcctgcccaagcctttcatcgagtacagcccagaggacattgacggcctgctggaaaccaacctcaagggggtggtctacgcctctcaggccgccgccacgcacatgatcgagcggcgccaggggcagataatcaacatcaccgctgccgtggcgctgcagcctaacctcgccgtgcccgccgccctaccagtacttatcaagggcggcctgaatcaggtcacccgcgcccttgcgctggagctgtcgccccaca

SEQ ID NO: 199301 - DNA, 804 bp, Unknown
  Bacterial polypeptide expressing nucleotide sequence isolated from the Sargasso Sea
aaatacatttatgaaaattgtgcaaaaaatgaaaaaagagtccaagctttggggggagcaaaaaatcactgtgtaataatgccagactgtgatttagagcaagcagtaaatggtttgatgggagcagcatatggttctgccggagaaagatgtatggcacaatcagttgcagtagcggttggtaaaattgccgatcctcttgtaaaaagtttatcaaaaaaagtagagtctttaaaaatcggtccaggattagataaaaaatctcaaatgggcccactagttaccaaagagcacttagaaaaagtcaaaggttatgttgatgtgggagtaaaagagggtgcaaagcttgtagtagacggaaggaatttaaagcttcagggttacgaaaatggtttttatatggggggatgtctatttgatcatgttaaaaaagacatgagaatttataaagaagaaatatttggtcctgtcctttcagttgtaagagcaaaggattacaccgaagcattatcattagttaacgatcatgaatttgggaatggtacaagtatatttacaagggatggagatactggcagatccttcgcaagtaatgtaaaaattggcatggtaggaataaatataccaatacctgttccaatggcattccatagctttggtggatggaaaagatctttatttggagatcaaagtatacatggacctgaaggagtaagattttatactaaattaaaaacaataacatcgagatggccatctggaattaaatcagatccagaatttgtgatgccaactatgaaataa

SEQ ID NO: 199302 - DNA, 556 bp, Unknown
  Bacterial polypeptide expressing nucleotide sequence isolated from the Sargasso Sea
aatgaactatgaagatttaaaacaaaaattagataaatttaaaattattgatgtgctagtaaataatgcaggaactaatattccagaaccctttgaaaaaattaaacaaacaagcatgaattatctagtagatttaaatctaaaggcagcatttaatgttgcacaacttgttgtaaaaaagatgcttaaaaataaaaaaagacctggttcaattataaatatgtcatcacaacttggtcatgtaggcatgggaggtagaaatgtttacaacatgactaaattcggaattgaaggattaacaaaaggaatgggagtagagttagcaaaaaaaaatataagagttaacactgtagcacctacttttgttgaaactcctatggttaaaaatttttttaaaaataaaaaatttaaaaaattagtacttggaaatattcctatgggaaaagcggctaccgaaagtgatattgccacaacagtatgttttttagcatcatcggcatcttcaatgataactggaacatcaataattatagatggtggatggacagctcaataa

SEQ ID NO: 199303 - DNA, 361 bp, Unknown
  Bacterial polypeptide expressing nucleotide sequence isolated from the Sargasso Sea
atgtatcttcaaaaaataaatcttaaaaacaaatatgctttagttactggtgcaggcaaaggacttggaagagcgtgttcaattgcattagcagaggcaggtgcaactgttatagctttaagcagaacatcttcagatcttaataaattagaaaaggatataaaaaaagttaaaggtaaaattattaaggtatcatgcgatgtaatgaactatgaagatttgaaacaaaaattagataaaattaaaattattgatgtgctagtaaataatgctggaactaacattccagaaccctttgaaaaaattaaacaaaaaaacatgaattatttagttgatttaaatctaaaggcagcatttaacg

SEQ ID NO: 199304 - DNA, 435 bp, Unknown
  Bacterial polypeptide expressing nucleotide sequence isolated from the Sargasso Sea
aatgtatcttcaaaaaataaatctaaaaaacaaatatgctttagttacaggtgcaggtaaaggactaggaagagcatgttcaatcgcattagctgaagcaggagcaactgttatagctttaagcagaacatcttcagatttaaataaattagaaaaggatataaaaaaagttaaaggtaaaattattaaggtttcatgcgatgtaatgaattatgaagatttaaaacaaaaattagaaaagattaaaattgttgatgtgttagtgaataatgctggaactaatattccagaaccttttgaaaaaataaaacaaaagagtatgaattaccttgtagatttaaatctaaaagcagcatttaacgtggcacaacttgttgtaaaaaaaatgcttaaaaataaaaaaagacctgggtcaattataaatatgtcatcaca

SEQ ID NO: 199305 - DNA, 703 bp, Unknown
  Bacterial polypeptide expressing nucleotide sequence isolated from the Sargasso Sea
aagggtttgtttagaattagggggcaagggcggcaatattgtttttgcagattcttatcctaatgcagttagagacggaattagaaatgtaatgagtaattctggacaatcatgcgatgccccaacacgaatgcttgtggaaaaatctatttatgaaaaagcaattaaagaagcagcggatgaagctagtaaaattaaagtagatattgcattaaaaaaaggagatcatataggtcctgtagtttcaaaagttcaatatgataaaattattaacctaattaaaagtggaattgacgagggcgctacgttagccactggaggtcctgaacttccaaaaaatttagacaaaggttattttattaagccaacaattttcacaaatgttacaaacgatatggaaattgcaaaaaaagaaatttttggaccagttctttcaataattccattcgaaacagaagaagaagcaattaaaattaccaatgatacagaatatggcctcggaaactatttgcaaactgaagataaagaaaaagcaaaaagagttgcaaaaaaattaagatcaggaattgtttatattaatggaaaaggcgcagaccccgggacaccttttggtggatatagacaatccggaaacggtcgtgaaggtggtacttggggattggaagagtacctagaggtaaaaaccatcactggctggaaataa

SEQ ID NO: 199306 - DNA, 406 bp, Unknown
  Bacterial polypeptide expressing nucleotide sequence isolated from the Sargasso Sea
agttacgaagttactgcttctttatcattgccaatttttaacaagggacataacttttacaatttagaaaaatcaaaaaattcagcaatttcttcttttaaatctcttgaatctaagaagcttgacttaatttttcaaattcagtccacatggaaaaaaatagaaagtacaaagtcaagtattggttcattggaattgtcagtagaatctaatgtaatggcagtagagggggtaacaaaagaagctggcgtaggaacacgaacaactttgaatattcttgatgcagagaaagaacttactcaatcagagtcaaacttggttaacgctcaatttcaattaattgtttcttcatttgacttacttaatcaatgtggtctccttaattttcagtatttaggtttataaa

SEQ ID NO: 199307 - DNA, 811 bp, Unknown
  Bacterial polypeptide expressing nucleotide sequence isolated from the Sargasso Sea
agaagttgcttttacaggaggacctgaaactgcaagacatatcattagaaattctgcagaaaacttgtctgaggttagtttagaattaggtggaaaaagcccggttgcagtatttgatgatgcgcatcaagaaaatgctatcaatggaattactgcaggtatatttggtgctagtggacaaagttgtattgcaggttcaagattatatttgcaaaaaggaatttatgatgagtttcttgataaacttacaaaaagagctgaaaaaattaaaattggtgctccaatggatcctgatactgaaatgggccctttaagtaactttaagcaactagaaattatcgaaaaaaatataaaaaaaacaatagagcaaggtggaaaggttagatgtggaggaaaaagacatccattttcaaatgaaggttattattttcctccaacaataattgagtgtgataatcacaatcttccaactgctgaaaatgaactatttggaccagttttatctgttatgaaatttaatgatgaaaaagaagtcatagaaaaaatgaatgataatcaatatggattatcttctggtgtatacaccagtgactttgctagaggtttaagagtatctaatgctattagggcaggaataacatttgttaacacgtacagactaatttcaccatctgcaccttttggaggaattaaagatagcgggtatggaaaggaagcaggaatggaatcaattaaagattatactagagttaaaactacttggtattatacctctgatgaaccaactttagatcctttctcaatcagataa

SEQ ID NO: 199308 - DNA, 906 bp, Unknown
  Bacterial polypeptide expressing nucleotide sequence isolated from the Sargasso Sea
tgaggctttagacgaagaaattgatcttgcctttaatgcggcttcaacttccgttaaaaacagagtacttcaggacatggatgctgttcataaagcaaacatgatgagagcaatagctgcaaagctgagagaatacaaaaaatctggatcacaaatattgagtaaagaaaatggtaaaaccattgatcagtgcgccggcgaatttgaaggagcagccgcaatatttgattactatgccggtttaactgataaaatagagaacaagctcatcccctctggtcaagatacttttaactatatcgttcttgaaccatttggtgtcagtctgcagatagtgccgtggaattaccctatttccctatttgcaagatcagtagctgctagttttgtagtcgggaattcagtcgtaattaaacctccagagctctgtccaatatcatccaatatttttgggacgattcttacagaagtaggagctccaaaaggaatcgtaaacatagtgcatggtcagggggagatcacaggaaaaaaactggtgaaccacaaatctgtggatcaagttgtttttacgggatctcccgaagtcgctgcggaaatattgaaagcaacggcagatagaataattccatgccatctggagcttggaggaaagtcagctgcaataatttatcctgatgccaatgttgatcaagcagtgagtagcactataaagggaatttttgagccaaatgctggtcaaatttgtgtcgcgatgtcacgtgtgataattcatcctaaaatcaaagatgaatatgtgtccaagttgaaactaaaggccgaagcgttaaggatcggtccaggtaacgataaaaattcacaggttacgcctctgatctccaaaacccaacttaagcgtgtttctaatta

SEQ ID NO: 199309 - DNA, 680 bp, Unknown
  Bacterial polypeptide expressing nucleotide sequence isolated from the Sargasso Sea
atatggatctgcaggtgaacgctgtatggcagttgcggtacctgttccggtcggaaaggaggttgcggacaacctgatggaccgcatggttccgttggtggaagaactgcctgtcggcccacctgatgacagcaaagccgcgatgggtccgattatcactaggcaaagccttgaaagaattacatcactgctccaaagcggagtggaccagggagcagccctactggttgacggcagagaccttacagtacccggctttgaaaaaggctttttcattggaggatccctgtttgatcaggtgaaacctgaaatggatatctacaaggaagaaatatttggcccggtactctcaaccgtgagggctgaagattatgaagatgcaataaacctaattcacagtaacccgcatggaaatggcgtggccattttcacccgtgacggagatgctgctagagattttgcaagcagaatcgaggtaggcatggttggtataaacgtacccattccggtgcctgtgggctatcacagtttcggcggttggaaacagtcgcttttcggtactcatcacatttatggtccggaaactattcatttttatacaaggttgaaagcaattacttcgcgctggccagcaggaattaaatcaggagcccagtataatttcccgacaatgaactagt

SEQ ID NO: 199310 - DNA, 598 bp, Unknown
  Bacterial polypeptide expressing nucleotide sequence isolated from the Sargasso Sea
caagtcgcttacttacaggctcagagtcagcctcaagctcaagatgcgccacaagcgtatccaagacttgaagactacgactatgacgaagcaaggcaccaacaagcagttctacagtacacctcaaaccttaatgctcagaacgtgcaacaggtcatgcaacagcagcaacaagctcagattgctcaattacaagctcagaaggcacaaattgcgtctcaagagtttgtagagaaaagcaatgcatttgctttggactacaaggattttaacgcaactgttactaatcctaattttcatcaaagtgatatggtggcaaggacgattgttgaattgccgaatggccctgatgttgcttactaccttggcaaaaacttaaagattgccaacgctctgaacaataaaagcgagagggacgccagagatgatttaataagaatctcaacagcgttacaagtgaactctcgaaaacgtcgtgctaatactactaacgctcctacgcccggaaagacggtgacgcctaaaggaaaagtctctaaggacttggacaagatgtctcctgaagaatatcgaagagcgaggggctatattaaatagg

SEQ ID NO: 199311 - DNA, 847 bp, Unknown
  Bacterial polypeptide expressing nucleotide sequence isolated from the Sargasso Sea
ggctcaacactaacgggtagtaagattatgggggcttgtgccccgaaactctctcaggtcgcccttgagttggggggcaagtcggcgttggtagtttttgatgacacggatctcgacaaagctgtagagactacaatgaaaggattcctcactaacggtggacagatttgcaccgcacacacacgtcttgtagtccaagagagtatcaagtctcctttattgaacaagctaaaggaagaacttgagaagctaccattctgtaatgacccgatcaccgaaaaagatcgaggtgatagggcctgggagagtggaatgacagacgtggtccagcctgtagtctgcgattcgcaacacaagaaaattatgggattccttcatgaggccaaggctactggtgttgaggttttaactggtggcgacgttccagatgacgcaacagttggaaattccggtgggttttttattcagcctactgttctgatcaacgtggagcgagatgcagacgtatggcaaaaggaggtttttggtccagttctctctgtgcgatcgttctcgactgaagaagatgctgtgctcgaggcaaactccacatcttttggactggcatcgacggtcatgtcctcggacccagccaaggcaatgagagttgccaaccgtatacgggcgggtgccgtcttcgctacttccaatggtgagggtttgttggcagagcacccggctgtttcgcgtggtggttttggtttctctggggttggtcgggagcttgggattggtggcttgcacgaatacaccgaactaaagagcgtaaactacacgggcttttcacttgccgatgccaagaagtagc

SEQ ID NO: 199312 - DNA, 394 bp, Unknown
  Bacterial polypeptide expressing nucleotide sequence isolated from the Sargasso Sea
ttgcggttaaaaggtaagaaatgcattgttactggcggatcaagtggtattggggaagcaactgttagaagatttatcagcgaaggggcagaagtcttaattgcagatatcaatcttgaagattcaaaaaaattatcagaagaaattggcgaaggcgttgattatatcaaatgtgatgtaaggcttgaggatgatattatttctgtttcagaaaaagcttatggtatgtgggatcaggttgatgtgttagttaacaatgctggatctgaactcaatcagtcctatgataagatgacagaggcagaatgggataatgttcttaacacagatctaaaaggcccttggttaatgtgtaagcaccattgtaccaaaggaatggtagaggcaggatcag

SEQ ID NO: 199313 - DNA, 623 bp, Unknown
  Bacterial polypeptide expressing nucleotide sequence isolated from the Sargasso Sea
gggagatattgcagataaaatggttgaaagtataactgataaagctgaaagtcttaaagtagcgccttggactgactcttcagcgcaaatgggacccgtaatatcaaatgagcacaaacaaaagatagaaaattatatcaactcaggagttgaggagggtgctaagcttgtacttgatggtagaaatttgaaaattcaaggatatgaaaatggttattttgttggcccaacattatttgataaagtaaataaagatatgaaaatttacaaagaagaaatttttggtcctgttttatcagttataagagctaaaaattataatgaggctttaaaattagtcaatgatcatgcttttggaaatggaacaagcatttatacctctgatggagaaatatccaggcattttacaacaaattctaaaattggcatggtaggtgtaaatgttccaattcctgttcccatggcttttcatagttttggtggttggaaacaatctttatttggtgatcattcaatgcacggtgtagaaggagttaggttttttacaaagctaaaaactgtcacgtcaagatggcctaaaagcatacaaaaaggtccagaatttaaaatgcctacaaactagc

SEQ ID NO: 199314 - DNA, 784 bp, Unknown
  Bacterial polypeptide expressing nucleotide sequence isolated from the Sargasso Sea
atggaccctctttttgaattgaatgacaaactgatcctcgtctctggaggcagtcgaggaatcggcaaggctctggtatcaggtttcgcaaaaagaggggcaagggtggtttttaccggcagggatgaagtctcacttgaatcagccaagaaagaattagctgaagattcttctgaggtatttcctgaacgctgtgacgtcagccgggttgatgaagtggaagcattggtgaatcgggttcgaaaacaacatggacctgttgatgtcttggtaaatgttgcaggtgtcaaccggagacaacgcgcggagacctataagccggaagattatgactttgtcatggacatcaaccttaagggagctttctttctttccaccgaagtaggacgtgtgatgctggaaaatggaagcggaatccatatcaacattgactccctgaacagttacgccccggtcaaaggaatggccccttacgccatgagcaaatttgggatggtcggcatgacccgggcgctggctgcggaatggggcccgaaagggatcagggtcaattccattgctccgggattcattctcaccgatctcacacgaaaagtttggtccgatccttctctgcagcaatggggaatcgaaaatactccattgagaaggcttggtgagcccaaagatctcgtgggagcagctattttcctggccagcgacgcttctgcattcatgacagggcaggttgtaagggtcgatggaggttttagctcagcaatcctatggcccgtcgaattctaag

SEQ ID NO: 199315 - DNA, 545 bp, Unknown
  Bacterial polypeptide expressing nucleotide sequence isolated from the Sargasso Sea
cacgacaagattagtcgcaggtattggtgtgcctcaactcagtgcattattagatgttaaaaaaggtttagcaaaaaatattaagatgatttcagatggtggtataaaattttctggtgatatcgcaaaagctttagcaactggtgctgatgcagtaatggttggatcaatgttagctggaacatcagagacacctggaaaaataataaaaaaaaaaggtaaattgttcaaaatctttagaggcatggggtcagttggagctatgaatagaggatcagccgatcgatattttcaaaagaaacaaaaagattcctcaaaatatgtgcccgaaggtgtagaaggattaattaaatataaaggagacgtgagcaaagttatcaataaacttgtgggtggtttaagatcatcaatgggttacttaggtgcccaaaaaataaaagatttaagcaaaaacgcaaaatttgtaaaaattacaaaagccggcttttacgaaagtatggtacatagtatagatgaagttaaaaaaaatagtgagtatttatgaa

SEQ ID NO: 199316 - DNA, 652 bp, Unknown
  Bacterial polypeptide expressing nucleotide sequence isolated from the Sargasso Sea
tatggcacaatcagttgctgtagctgttgggaaaattgctgaccccttagtaaaaagtttatccaaaaaagttgagtctcttaagattggtccagggttagataagaaatctcaaatgggaccattggttactaaggagcatttagaaaaagtgaaaggctatgtagatattggagtcaaagaaggagcaaagcttgtagtagatggtagaaatttaaaactccagggttacgaaaatggtttttatatgggaggatgtttatttgataatgttaaaaaaaatatgaggatttataaagaggaaatttttggtcctgtactttctgttgttagagcaaaagattacagtgaagcattatctttagttaacgatcatgaatttggaaatggcacaagtatattcacaagagatggagacacagggagatcatttgccagtaatgtaaaaattggaatggttggtataaatataccaataccagttccaatggctttccatagttttggtggatggaaaagatccttatttggagatcaaagcattcatggacctgaaggtgttaggttctacacaaaattaaaaacaattacgtctagatggccatcaggaattaaatcagacccagaatttgtgatgcctacaatgaaataa

SEQ ID NO: 199317 - DNA, 700 bp, Unknown
  Bacterial polypeptide expressing nucleotide sequence isolated from the Sargasso Sea
aatgagtgatgcagatttagatattgcaattcaaggggttattgatggaatgagatatactagacaaggacaagcatgtactgctggatcaagagtttacattcaggaaaaaatttatgacaaagtgctaaatggagctgttgaaaaattaagtaaattaaaaatgggaaatgctctagatgaaaattctgatattggagcaattatttctgaagaacaacttaaacgaactttacattatatgaatattgcaaaaaaaaactctacaaccaaagttttacacggtggcaatcaatcaacaggtggggattataaaaatggtttcttttatgaacctacattgatgtcaggtgttccagtaagctctccagtttgccaagaggaaatatttggtcctgttgcttgtgcgataccatttaaaacatttgatgaagtaatgaacagtgctaatgatacaccgtttggattatcagcagtattgtggacacaaaatttatctagagcgttacagtttgtagaagaaattgaggcaggttttgtccaagtaaatcaatgtgtagcgcctagagcaaatgtttcatatggtggtttaaaaatgagtgggctaggaaaagagtacgcctttgatagtatgataaatcattttactcaaagtaaaacggttttgattaatagggggaaatcaaatatagatatttaa

SEQ ID NO: 199318 - DNA, 688 bp, Unknown
  Bacterial polypeptide expressing nucleotide sequence isolated from the Sargasso Sea
aggggcaagggtggtttttaccggcagggatgaagattcacttgaatctgccaagaaagaattggctgaggattcttctgaggtatttcctgaatgctgtgacgtcagccgggttgaagaagtggaagctttggtgaatcgggttcgaaaacaacacggtcctattgatgtcttggtgaatgttgcaggtgtcaaccggagacaacgcgcggagacctatctgccggaagattatgactttgtcatggacatcaaccttaaaggcgctttctttctttccaccgaggtaggacgggtgatgctggaaattggaagtggaatccaaatcaacatcgactccctgaacagttacgccccggtcaaaggaatggccccttacgcgatgagcaaattcgggatggtcggcatgacccgggcgttggctgcagaatggggtccgaaagggatcagggtcaattccatagctcctggattcattctcaccgacctcacccgaaaagtatggtctgatccttcccttcagcaatggggaatcgaaaatacacctttgagaaggctgggtgatccaaaagatctcgtgggagcggctattttccttgccagcgacgcttctgctttcatgacaggacaggttgtaagggtcgatggcggttttagctcagcaatcctatggcccgtcgaattctaa

SEQ ID NO: 199319 - DNA, 817 bp, Unknown
  Bacterial polypeptide expressing nucleotide sequence isolated from the Sargasso Sea
tatcaagctctctcagaagaagaaaaaatactttttgatagacataatactgcggaattaatgagtcaatttcttcatggagaacaaggtgccttacttgtagcatctcaattagcaagctgcgcaccaacttataatgcaaagctttatgctgcctctcaaacattcgatgaagcaagacatgttgaagtattcaatagatatcttcaggacaaaattggaattcactatccaatcaatccatcattaaaattattacttgataaaattcttactgatgaaagatgggacttaaagtttattggaatgcagatcataattgaaggattagctcttgcagcatttcaaatgcttaaagctattacaaaagacccacttttaaaacaactacttcactatgttgttcgtgatgaagcacgtcacgtaacatttggaataaattatcttgaggactacttaacaacattgtcaaaagaagaaataaatgaaagagctcagtttgcttatgaagcatgtgttatttctagagatagacttgtaaatactcaggctgaacaaagattcctcaagatgactgctgaagaagcaagagaatttcaattaagcacaggtacttttgaaatgtttagaaacttcttattttcaagagtcatgccaaacttaaagagaataggtttattaacagatgaagttaggccaaagtttgaggctcttggattgctagaatacgaacatgcgccagatgattttgaatgtgattgggcagaaatgaaaaagcctcttgaaaaatttggacaaataccgaccaatctataac

SEQ ID NO: 199320 - DNA, 826 bp, Unknown
  Bacterial polypeptide expressing nucleotide sequence isolated from the Sargasso Sea
aatgagtaaacttaaacaatataaaatgtttattaatggtgagtgggttgactctgaaagtaaaaaaacatttgaaactctaaatccagaacataatgagccttgggcaattgtaccagaggcaagtgctaaagatgttgataatgcagttaaagctgctcaaaaagcatttgatggagaatggccaaagctacttcccagagaaagagctaaatacttaagagctattggagatcaattgagagagaatgcagaaatgctaggagaaatagaaacaattgatactggaaaactctatagagaaacaaaaaagcaagcagtttatatagcagaatattacgactattatgctggtttagcagataaagttgaaggaacagttttgccaatagataaaccaaatgttcaagcaataacaactagaatacctataggtgttatagctgcaataattccttggaattcacaaatgtttttaactgctactaaagtagcaccagcgcttgcaatgggtaacacagttgtaattaaatcctctgaacttgcccctgctgttctgtttgaatttgcaaaattaattgaaaaaactggtatacctaaaggtgtggtgaatgtaattacaggatttggaaatccttgtggtaaaagtttaactactcataacttggttgaaaaagttgcttttactggtggtcctgaaacagcgagacatataattagaaactcagcagaaaatttatcagaggtaagtttagagctaggtggaaaaagtccagttgcagtgtttgatgatgcggaacaagaaaatgcaataaatgggattaca

SEQ ID NO: 199321 - DNA, 409 bp, Unknown
  Bacterial polypeptide expressing nucleotide sequence isolated from the Sargasso Sea
tttaatctaaaccaaggtgaggtttgtacttgtccaagtagagctttagttcaagaatctatctatgataaattcatggaaagggctgtagcaagaacaaaagctgttgttcaagacaatcctttaaaaatggaaactatgattggagctcaagcctcagttgaacagatggagaaaataaaatcttatcttgaactaggtaaaaaagagggcgctaaagttctaacaggtggaagtgttggtaaacttaatagtggattggaaaaaggtaattacattcaaccaactatttttgaagctaacaaccagatgagaatatctcaagaagagatctttggaccagttgtatcagtgatcaaatttaaagatgaagcagaagcattaaaaattgctaatgatactctttatg

SEQ ID NO: 199322 - DNA, 573 bp, Unknown
  Bacterial polypeptide expressing nucleotide sequence isolated from the Sargasso Sea
atgtcaccgatagcgcgagctgtcaaaacgccgtgaaggaaaccctagggcgtttcggcaggcttgatgttctcgtcaacaatgcgggcgttgtcgcaagcggtccaatcagccagtttgaggaaaaagactgggatagaatctttgacgtcaacgtgaaaggtatctacttaatgacacgcgcggcactcaaggcattgtccgattccaatgatgcggccgtcatcaatactgcgtctatcggcggtaaaaaggggagcgcaggactctctgcctattgcggatccaagttcgctgctattggtatcacacagtcactggctcttgagtttgcccctgcgggcatacgggtgaacgccctatgtccaggtattgtcggtaccgccatgtggcacgatcacctgatggccggtcagggagaagcgcagttcaaggagtggatgacaacgcttattccgcttggcagaccccaggagacttccgacatgggcgatgcagcagtctatctcgcaacagcgcacaacgtgactggcgtagcactgtcggttgccggtggcatggaaatgaattgag

SEQ ID NO: 199323 - DNA, 936 bp, Unknown
  Bacterial polypeptide expressing nucleotide sequence isolated from the Sargasso Sea
tgttgcttgtaacgagtgccttgacgaggcaacggtccgagaacgaactgtccgttgtttagtaaacccgcgtgcgggccgccactcggaaatagagccgatagaaattgtcaaaaacccaaagaaggtaattataattgggggcggatgcattggactgcaggcagcactaacggctgcacaacgaggccacaacgttcatatttttgagaaaaaaccatatcttggtggtaaatggttggtgtcttttgctccgccgggtcgcgaaccgttgcgactatttcttacgtggctggttaacgaaacaaaacacgcgggggtaaaatttcatttggaaacagaggttacgtcggaattactaaaattggaggacccagatgaggtaattgttacaatcggtgcaattccaataatgccagatattccaggaatagatcttcctcacgtagtgactggagaacaagtgcttatgggagaggttgaattaggtaagcgtgttttggttattggtgccggaggagcgggagtagaagttgcccattttatcgcgatgcgtaatcacataaatcgggaccttaaggctcatcttcaggcttatgggggctatgacgcaattgcgggggtaatcagagaaagcggccatgacatcactctagtaggtcgtaatccgaaattaggaacagggttggggccggcaacccgttgggttcttgttgaagagcttggccatgatggagttactagtatcccgagttccaaggttagtttaattggcaaaagctctgtttggattgattcagcggaagatgatcaagaacgagaaatccaagcagattctgttgttatctgcaccgggtacaaaggagatgagaccaagattgaatggttgaggatgggcgcccggaatctcaagtttgtgggtgatgccaaacaaat

SEQ ID NO: 199324 - DNA, 265 bp, Unknown
  Bacterial polypeptide expressing nucleotide sequence isolated from the Sargasso Sea
aatacggaccttgtagaggcgcttgagcttcataacttaatggcccaatcaaaagtaacactacactcagctctcaatagaacagaaagcagaggagctcatgctcgtgaagattacaaagaaagagatgataaaaattggttagtacattctttagcttggttaaatgataaaggagatgtaagtatgggttctagagcagttcatatgaatacattaacaaatcatgttcaaccaattcctccaaaaaggagagtttactaat

SEQ ID NO: 199325 - DNA, 714 bp, Unknown
  Bacterial polypeptide expressing nucleotide sequence isolated from the Sargasso Sea
aatgcgtgacccactctatgatattttatttgaacccgtgaaaatcggacctgttacagctcggaatcgtttttatcaggtaccccactgcaatggaatgggatatgttcgtccaaacagccttgctaaaatgcgagaaataaaagctgaaggaggctggagcgtggtatgtacagaggaggtatggattcatcatagttctgaaatcgttcctcatgctgaaggtattttatgggacgacggcgatatccctgctctagcaaaaatgacagaagcagttcataaacatggttcgcttgcaggcatagaactccagcatgggggatattgcagcacaaataattatagcagaatacctccaattgctccaagttcgattgtatccagcagctacaatcctttgcaggcacgcgcaatggacaagacagatattgccaactttagaaaatggcacaaaaaagcagcaaaaaggtccaaacaagctggttttgacctgatttatgtctatgctgcacacagcgggacacttctgacacatttcctttcccgcaggatcaacagacgtactgacgaatatggtggaagcctagaaaaccgtgtacgcctctttcgtgagttaattgaagagacaaaagacgcagtgggtgatagttgtgctgttgcagttcgattcgcagttgaggagtttctaggtccaatgggaattacttcaga

SEQ ID NO: 199326 - DNA, 915 bp, Unknown
  Bacterial polypeptide expressing nucleotide sequence isolated from the Sargasso Sea
gagaaaagatctcttaagaaaaaagtattaggttatgaatttgattttccatttgggtttgctccaatgggaatgactaatttatcatggcctggggcagactctatgttggctgctgaaagtgcgaggaataatatacctacttgtgtttctatggcttctactacaactttagaaaaaatgtatgaactttcagaaggtcactcatggatgcagctatatatatttcaggatgaaaattttgttatggaacttttagatagagctaagaatactggatacgaagttgcaatattaaccgtagatgttccggtactatccagacgaactagagatgataaaaatggtttctcttatccttttaaaataggtccaaaacaattttttgattttgcaactcaccctacttggtctctttctactttactcagtggcattcccaaaccaatgaactatgtaacatctaaaagtggagacggtatttttaaaagaaaagaaagtagaggttctacagattgggatactttaaagagagtaagagataaatggaaaggtaaattgataattaaaggagtaatgtctccagacgatgcaacacaaataaaggaagctggtgctgatgcaattcaagtctcaaatcatggaggcagacaattagatagtgctacagcagcaataaatatgcttccaataatcagaaaatcagtgggaagtgattttcctttaatctttgatagcggaataaggagcggaagtgatatcgtgagagcgcttgcatttggtgccgattatgcaatgattggtaggcctgtaatgtatgcgatgggcgctgatggaagaaaaggattaaggagaattgtggaaataattaaagaagaagctagcactacactcgggttagtaggattaaatgat

SEQ ID NO: 199327 - DNA, 256 bp, Unknown
  Bacterial polypeptide expressing nucleotide sequence isolated from the Sargasso Sea
ttaattgagacactcgagctagagaatcttttgggtcaagcaatcatcacaatgaaaagtggccaggttagaaaagaaagcagaggagcacatgcaagagatgattatcccgatcgtgacgatgagaactggctgattcatagtatgggttggatggatgagagcaatgatgtaaccattggatcttcgcctgttcatttagatactcaaacagatgaggtagaatcaatacctctcaaggcaagagtttactaga

SEQ ID NO: 199328 - DNA, 505 bp, Unknown
  Bacterial polypeptide expressing nucleotide sequence isolated from the Sargasso Sea
aataggtgccttaatttctaaagggcatattgaaaaagttcataagtatgtcttggatgggatttctgagggggccgaactattaataggcggagaaaagctcaataatctgtcaggatatttttatccacctactgtattaaaattgaagagcactgaaaatattttgttcaaagaagagatttttggtccagttgtagcaattttaccttttgatagcgaaatagaggttattgagcttgcaaataagacacattacgggcttgctgggggaatttggaccaaagatatctctaaagctattcgagtagctaaaagcattgaagcaggctacttatggattaatacatatggtggaataataccagagactccatatggaggatttaaacaaagcggttatggtaaagaattaggccatgaaggcctagacgaatatttacaaataaaaaatatatcaatttttacaggagaacaaattcctaagtggtatggagacaattag

SEQ ID NO: 199329 - DNA, 467 bp, Unknown
  Bacterial polypeptide expressing nucleotide sequence isolated from the Sargasso Sea
gtctatttatgataaattcatggaaaaatgtatcgctagaacaaaagctgtaatccaagataatccattaaaaatggagacgatgattggtgcacaagcttcagttgagcaaatggaaaaaatcaaatcatatcttgatcttggtaaaaaagaaggtgcaaaagttcttgcaggaggagatgttggtaagctaaatagcggtctggaaaaaggaaactatatccaaccaactatttttgaagctgataactcaatgagaatttctcaagaggaaatttttggacctgttgtatctgtaatcaaatttaaagatgaagcagaggcattagaaattgctaatgatacactttatggtttaggtgcaggtgtttggactagaaatggaaacattgcttacagaatgggtagagcaatacaagcaggaatagtatggacaaattgttatcatgcttatccagctcactctc

SEQ ID NO: 199330 - DNA, 793 bp, Unknown
  Bacterial polypeptide expressing nucleotide sequence isolated from the Sargasso Sea
atgtcagagaatgatgttacagatgttgttgaaatttttaatacgcctttaacgggatcatataattgggactatacaatccaagataatagaataaaaaagctttacgagttagggaaagagcttaactggaattctaatatggatattaactgggatagacccgttgttcatttagatgaaccaccgccaatcttttgggatgattatgagccttatataaagatgtcagacaaagaaaaattgagatttcttagacatagacaggcatggagcatgagccagttcctgcatggtgagcagggagctttacttgtagcatcccagcttactagctgtgcaccaacttataatgcaaagctttatgcagcttcacaaacttttgatgaagctagacatgtggaaagctttaatagatatgttcaatcgagaatggagctcatgtatccaattggtaatgcccttaaatcaattttagataaaatccttacagatccaagatgggatctaaagttcattggaatgcagttaattattgaaggactggcactagcagcttttagaacctcaagggacttaacaccagatcctgtcttaaaagatatgctcgatttaataatccgagatgaagcaaggcatgttacttttggtattaattatttagaagagtttgtaacaactttatccgaaaaagagattgaagaaagagctcagtttgcctatgaggcatgctacttaagtaaagaaagacttgtttctatagaagtctatgaacactttggtggaacgtgaa

SEQ ID NO: 199331 - DNA, 813 bp, Unknown
  Bacterial polypeptide expressing nucleotide sequence isolated from the Sargasso Sea
accctcctggactggttttacgccaggtcagcatctgctggtgactttgttgcatcaggggcgttatatcagtcgtagttttagtatcagctcatcatcggggttatttgcacagcaaaagcaaattcgtattagttgtcgaattcagcctcagggtcagttcacgaaagccttagcggcagacattgctaagctgactcatttaagtatcagcgctgcaacaggcgactttgtgctggagccccagacagatggtgcgccgcaacaaagtatagtgatggtggctgcaggctctggcataacgccactctggtccatgttaaatagtttgcgttgctggacttcgcctgttgtgttgttttattgcgttaaaaatgcagcacaggccgctttcttgactgagctgagactactggcggcaaaacaacccctgtttgaactgcagctgattgaaacagcaagcacgggccggctgaacttagttcagcagttaaaagaaaacactaaggtttctctgaccaatgctctttactacctctgtggtcccgctgctatgagtcgtcagtacaaggatgacttgatacaacaaggtgtgccatcagatgctgttcatgcagagctgtttggcttagaactggctgcaacaaaaggagctgttaagcaagccttgctcatagagcagggaaaagtaacaactatagaagccgctgccggagtgccgttattgcaggctgcggaacaacaaggcttgagtccgcgttttggttgccgtattggcgtgtgttatcagtgtgtgtgtcagaaaaaatcagg

SEQ ID NO: 199332 - DNA, 874 bp, Unknown
  Bacterial polypeptide expressing nucleotide sequence isolated from the Sargasso Sea
attgggaaaagattcgtttattattggaacaaaaaaaattggtaacgagattttagtaaaggcaacaaactctccaaaaaaaacaacacattcaaaacaaaatttaaataaaacattcaataaaatgatttcaaaagagttgaatcaaagttcagtttcatctttaggaaataatcaccataatagtattgatagtaaagaagaaaaattttcaataaataattttagcgaaaaggcgcttaaagaatttagattggaatttcaagatttaagagatcaattgaatggaatggtacttactgatatggcaggattaagtccaaatttaaaaagtactgttaagataaatttacaaaaaattggtttttctgattacacattagttaaattcaaagataaaatagaaaataaaaatacaaaagaaggtattgaaaattttattaatgaactagcagataaattgacttttgacgatccaatcaacagtttacttgatagtaagtatgtttttgtagttggattgagtggaagtggtaaaacatcattttctgccaaaatagctgcaactatcgcacaggatattaaaaatagtaatattgcattaggtaagttgggtaagcaaaatgaatttttgaatgataatcttaaatcttactctaggcttataaatgtacctaatttaaatattttacctgaaaatgcacaaaagaaacttgaaagtatagaaaaaaaattaattattgatgtatcaactgatatagcggatactttaaatattgttaaaagcattaaggaaaaggttggatcaaataaagtcttaactattgcagtaattccccatctggtcagtaaacattatttaaaaaattattag

SEQ ID NO: 199333 - DNA, 457 bp, Unknown
  Bacterial polypeptide expressing nucleotide sequence isolated from the Sargasso Sea
agtagttgatggaatgaatttaaaactgcaaggctatgaaaatggttactacataggtggatgtttgtttgaccatgttaaaaaagatatgagaatttataaagaagaaatttttggtcctgtgctttctgtggttagagtaaaagattttgatgaagctactcagctaattaatgatcatgagtttggtaatggaacgagtatttatactagagatggagatgttggaagaacgtttgctagtaatattaaaattggaatggttggtataaatatacctatacctgtgccagtggcatttcatagttttggtggttggaaacgatctttatttggagatcaacatatgcatggagtagaaggtgtgagattttatacaaaacttaaaacaataacttcaagatggccatctggattaagatcagatcctgaatttgttatgcctacaatgaagtaa

SEQ ID NO: 199334 - DNA, 961 bp, Unknown
  Bacterial polypeptide expressing nucleotide sequence isolated from the Sargasso Sea
ctggaactctcagatgtattaactgctgtaaatttagctcccgcacttgcaatgggaaatactgtggttattaaatcttctgagctagcacctgcaacactttttgaatttgccaaattaattgaaaaagttggtatgcctaaaggtgttgtaaatattgtttctggttttggtgaaccttgtggaagagccttaacatctcacaaattagtagaaagagttgctttcactggtggacctgaaacagcaagacatataattagaaactctgctgataatttatcacaagtaagcctagagttaggaggcaaaagccctgttgctgtttttgaagatgcagatcaagaaaatgcattaaatggaattactgctggtatatttggagcgagcggacaaagctgtatagcaggatcaagactttatatacaaaatagtatctatgataattttttagaaaaaattgtaaatcgagcaaataaaattaaactaggtcctccaatggattccgaaacacaaatgggtccattaagcagtttaaaacaattagaagttattgaaaagaatatcaaacttactttagatcaaggtggaaaacttagatgtggtggaaaaagacatactatgtcaaataaaggatattattttccagctactataattgagtgtgataaccataatttgcctactgcagaaaatgaattatttggacccattctttcggtaatgaagtttaatgatgaaaaagaagtaataaataaaatgaatgataatcagtatggattatcttctggagtttatacaaaagatataaatagaggtttaagagtctcaaacgcaataagagctggaattacatttgtgaatacttatcgattaatttctccatctgcaccctttggtggaatgaaagatagcggatatggtaaagaagcaggagttgaatctatcaaagactatacta

SEQ ID NO: 199335 - DNA, 883 bp, Unknown
  Bacterial polypeptide expressing nucleotide sequence isolated from the Sargasso Sea
caacaggggaactggagcaagtcatacaaaatcttttataagatatttaaaagagtttgaatttgaaaaaccattaggtgatcatgcaaaaaatcaaagattaatatatgagccaaaaggtgtttgtgcgttaattactccttggaactggccaatgaaccaggtcaccttaaaggtaattccagctttatcatctggctgtactatgattttaaaaccatcagaattagctccactttcagctatgatacttgcagaattaattgacgaagcaaaatttccaaaaggtgtgtttaacttagtaaatggagatggtgcaacaactggtgatgctttaactagtcatccagacgtaaatatgatctcatttacaggatcaactagagcaggtgcattaatatctcaaaatgcagcaaaagattttaaaagagttagtttagaacttggtggcaagggagcaaatattatctttaaagatgcagatccagaagccatagaaagaggagctttaagatgttttagaaactcaggtcaatcttgcaatgctccaacaagaatgttggttgaaaaatctatttacaatgaagcaatagaaaaactaaaaaattacacaaatgaatttaaagtagatgatccaaaaaaagagggtgaacacataggacctgtaatttctgagtcacaatttaataaaattcaaacattaatccaaaaaggaatagacgaaggtgcaaaattagttgctggcgggccaggaaaaccagatggcatgaataatggttattatgtaaaacctactgtatttgcagatgtcaataatcaaatggaaattgctcgcacagaaatatttggtccagttttatctgtaataccatttgaaaccgag

SEQ ID NO: 199336 - DNA, 301 bp, Unknown
  Bacterial polypeptide expressing nucleotide sequence isolated from the Sargasso Sea
tggaaatattcaagttaaagatcaatcacttatttttaatacagatttagtagaaacattagaacttcacaatctaatggagcaatctaaagcaacattatattctgccctaaatcgcaaagaaagtaggggggctcatgctagagaagactatccagaaagagatgataaaaattggcttgttcatagtttagtgtggctggataaagaaggaaatataaaattagataagaaacctgtaaacttaaataccttaaccaatcacgttcaaccaatcccacccaagaaaagagtgtactaa

SEQ ID NO: 199337 - DNA, 841 bp, Unknown
  Bacterial polypeptide expressing nucleotide sequence isolated from the Sargasso Sea
cctgggcgaccgccgctgctaccgaaaggcacggcagtgtaccggcgtgacgtcgatgggctgcgtgcagtggcggtgctctccgtgatggcgtaccaccttgaccacgcgtacctgcctggcggcttcaccggtgtcgacatcttcttcgtcatctcggggtacgtcgtctccggctccctgctatctcggccgagcccctcggtccgagagtacctggtggcgttctactcacgccgcgtcaagcgcctgacgccagcgctgctgctcatggtgagccttacggccatcggcatgtcgatgctgctgccgccacgcacacgcgacctccggggctattacggcacggcgcagctcgccctcgtcggctgggccaacaaccagttcgtgctcgagagccacggctactttgagcagggcgcgaacgcactcgagtacaaccccttcacacattgctggagcctgggggtggaggagcagttctatctgctcacgccgctgctcaccgctctcgcacatggcaggcgcgtcgcggccaacgcgccggagcgctcgctgcgcccaccggctgctctgctcgtcggtgggtttgcactctcctttgcaacctcgacggcgctctccatgctcatccccacgtcgagcgccgcgctcggagccttctactcgctgccctctcgctactggcagctgactggtggcgccatgctctctcaccttgagctctttcatggcccatgcgggatggcggccgccgggagcgatatggacggtggtgcggcgacaacgcccaggagcaatccgccgcggtggctccaagcgtcgctagtgccgcttgagg

SEQ ID NO: 199338 - DNA, 735 bp, Unknown
  Bacterial polypeptide expressing nucleotide sequence isolated from the Sargasso Sea
tatccacatggcgtcattgcggcatttacaccatttaacgcgccatccaaccttctaatgcagaaagtggcccccgcaatcgctatgggcaactcggttgtcatcaagccagcttttgaaggtgttggggaagccttattgattgctgagtgtttcacgcgtgctggtgttccagatggcctggtaaatgttgtggcttgtaggcgcgatgtcacgggacatttagttgcgcatcgagatattgcggtagtgacgctcacgggaggtactgcggcaggcgaggcgcttgctagtgcggccggagctaaacccttcatcggcgagttaggcgggaactccgctaacatcgtatgcgcagacgctgatgttcgggacgcggcattgcgaattacgccatctgcttttgaagctagcggacagcaatgcatatcagcgcagcgcatcattgttgaagaggctgttttggaggaatttctggaatactttgttaatgcggcgaaagcgatgaaagtcggcgacccaacaaaagaggatacggatgttggccccatggtcaatgttgaggccgctgaccgggtagaaaagatggttgaggaagctgttgctggtggagccaaagcaccccttccactaaaacgagagaatgcaattatctatccaacaattcttgtcactgaattacctgatgagcgcgttgtttgtgaagaaatttttggccctgtagctgtggttatt

SEQ ID NO: 199339 - DNA, 850 bp, Unknown
  Bacterial polypeptide expressing nucleotide sequence isolated from the Sargasso Sea
acaaacttgcaccggcattagcaatggggtaacacttgttgttattaaatgctctgagttagcacctgcaacaatgtttgaatttgcaaagttaattcaagaaactggtattccaaaaggagttgtaaatgttatttctggttttggagaaccttgtggtaaagctcttacgtcacataatctagttgaaaaaattgcatttactggtggaccagaaacagcacgtcatatcattagaaattctgcagaaaatttatctgaagtaagtttagaacttggaggaaaaagtcctgttgcagtatttaatgatgcaaaccaagaaaatgctattaacggaattactgctggaatttttggtgccagtggacagagttgcattgctgggtctaggctttatttgcaggaaggaatttatgatgaatttttagacaaactatcaaatagagctaagaaaataaaaattggagctccaatggatcctgaaactgagatgggtccgataagtaattataaacaattagaggttattgaaaaaaatatcaaactaactcttgaacaaggtggaagattaaaatgtggtggacaaagacattcattttccaatgaaggttattactttccagcaacaattatagaatgtgataatcataatttaccagttgctgagaatgaattgtttggacctgttttatcagtgatgaaatttaaaactgaagaagaagttgtttcaaaaatgaatgataatcagtatggattatcatcaggtgtatacacgtccgactttgcaagaggcatgagggtttcaaaagcaattagagctggaattacttttgttatacttatagactga

SEQ ID NO: 199340 - DNA, 547 bp, Unknown
  Bacterial polypeptide expressing nucleotide sequence isolated from the Sargasso Sea
aattcagaaatgggccccttgattacaaaagaacatttagaaaaggtaagaggatacgttgatataggtgtaaaagagggcgcaaaacttttagtagatggaagaaatttaaaacttcaaggttatgaaaatggattttttataggtggttgtttgttcgataatgtaaaaaaggatatgagaatttataaagaggaaatttttggtccagtgctatcagtaataagggctaaagattttcaagaggccacagaattagtaaatgaccacgaatatggaaatggggtaagtatttttaccagagacggtgatgcagctagaacattttcaagcaagataaaggttggaatggtaggtataaatattccaataccggtacctatggcttttcatagtttcgggggatggaaaagatctctttttggtgaccagcacatgcatggtcctgaaggagtaagattttatactaaacttaaaacaataacttcaagatggccttcaggcattagaactaatcctgaatttataatgccgacaatgaaatagt

SEQ ID NO: 199341 - DNA, 723 bp, Unknown
  Bacterial polypeptide expressing nucleotide sequence isolated from the Sargasso Sea
tatgaaaataaaaaaacaaagcggaccacctgaagatctaatatattttgatgatgatcttcctctttcacaatcacaagttgaggatgttgtcgaaatctttaaaactccattaactggttcatataactgggactacacagttgcagataacagaataaaaaaactttatgaacttggtaaagaattaaactggaatggatcaattgatctgaattgggattatacacatcctgcagatgaacgaattcttgagaccgatgatgagctgcctcatgaaacactagaagcctatgaaaatctttcagatgaagaaaaaatcctttttgacagacatgatgtcgcagaattaatgagccaattcttgcatggtgagcaaggcgcccttcttgttgcttctcaactggcaagttgtgcacctacctataatgctaagctatatgcagcatcacaaacatttgatgaagcaagacatgttgaagttttcaatagataccttcaagaaaagataggtattcactaccctattaatcctgcattaaagttactgctcgataaaatacttacagatgagaggtgggacctcaaatttatagggatgcaaattattattgaaggtcttgctcttgcagctttctctatgctgaaatctatatcaaaagatcctcttttaaagcagctacttcactacgttattagagatgaagctaggcatgtaacttt

SEQ ID NO: 199342 - DNA, 767 bp, Unknown
  Bacterial polypeptide expressing nucleotide sequence isolated from the Sargasso Sea
tatgtttgaatttgcaaaactaattgaaaaaactggtatacctaatggagttgttaatgtaattagtggatttggagatccttgtggtaaagcgctaacctcacatgatttagttgaaaaagttgcttttacaggtgggcctgaaacagctagacatataataagaaactcagcggaaaatctttcagaagtaagtcttgagctaggaggaaaaagtcctgtagcagtttttaatgatgcacaccaagaaaatgcaattaatggaattacagctggaatatttggagcaacaggtcaaagttgtattgctggttctagattatacattcaaaatgaaatctatgacgaatttttagaaaagttagttaatagagcaaaaaaaattaaaataggttctccaatggatcctgatactgaaatgggaccaataagcaattttaaacaattagaaactattgaaaaaaatattaaattaactgtaaatcagggtggtaaaattaaatgtggaggaaaaagagactccttttcaaataaaggatattattttcctccaacaattattgaatgtgaaaatcataaacttcctgctgcagaaaatgaattgtttggtcctgttttatcagtaatgaaatttaaaaatgaagaggatgtaattaaaaaaatgaatgataataaatatggattatcctctggaatatatacaagagacttggcaagaggcatgagggtttccaaggcgatccgagcaggaattacttttgttaaca

SEQ ID NO: 199343 - DNA, 600 bp, Unknown
  Bacterial polypeptide expressing nucleotide sequence isolated from the Sargasso Sea
caagactatcaaaaaaagctgaagcattaaaaattggacccggtatggataaatcatctgagatgggccctttagtaaccaaagaacatttagaaaaagtaaaaggctatgtagatctaggagttaaagagggagcaaaacttgttcttgatggaagaaatttgaaattacagggatatgaaaacggtttttatattggtgggtgtctttttgatcatgtgactactgatatgagaatttataaggaggaaatatttggaccagttttatctgtagttagggtaaaaacatttgaagaggctacaaaaatgattaatgagcacgaatacggaaatggagttagtatttatactagagatggagatgcaggtagaacattcgcaagtaaaattcaagttggaatggtaggaataaatgttcctataccagttccaatggctttccatagttttggaggatggaaaaggtcattatttggagatagtggaacgcatggtatggaaggtgtaaaattttatactaaattaaaaactattacttctagatggccatcaggaattagatctaatcctgaatttatcatgccaacaatgaaataaa

SEQ ID NO: 199344 - DNA, 622 bp, Unknown
  Bacterial polypeptide expressing nucleotide sequence isolated from the Sargasso Sea
ttgtcaggaaccattgcttacaacagtaaatttattaaatctgagctaaagaacaataaacatatctcaacaattcttaatgaggataatgaaattaaaattgagtcttcaattttaattaatgcagcaggtctttatgctgaagaagtagcaaaatcaatttctgcactagataatactttaattcctaaaactttctttgctaagggaaattattttgagaccagcaaggacttaaatattaggcacttaatttatccaataccaaatgaggcaagccttggcttacatttaggtttagatatcggcatgcaagttcggtttggtccagatgtagagtggatcgatgcaataaattatgatgtggatgagaacagacttgactctttttacaatgatattcgaaaatatatccctacttttgataagagtttattaaaaaaaggttactccggagtaaggccaaaattaaaaaattgtggagagggaaaaagtgatttcatgattcaaggtgaagaagttcacaatactagaaatttgattaatctttttggaattgagtctccaggtttaacatcatccctagttctgggagaacatattcttgaattggttagctgaa

SEQ ID NO: 199345 - DNA, 894 bp, Unknown
  Bacterial polypeptide expressing nucleotide sequence isolated from the Sargasso Sea
ggagtaaaagccgaagggggctgggcagttgtttgtactgaggaagtagaaattcacgccaactctgacaacggatctgcagtggagggcagactctgggatgaaggagacattcctgcactggcaaaaatggcagatgcagttcataaacatggtgcgctggctggaattgaattagtacacgggggctattcaaatgccaatcactacagtcgcattccaccgattgcacccagtttaacctctgttaattcctacgatcccgtgcaagcaagggcaatgacaaaatctgacattagggacttccgcagatggcatcgtcaggcagcaatccgttcaaggcaggcaggctttgacctcgtttatgtgtatgcaggacacaacctcacgcttctgatgcacttcctttcacgtcgcttcaaccaacgcactgacgaatacggaggttcgcttgaaaaccgcacgcggctttttagggaagtgctggaggagacaatagatgcagtaggagacagttgtgcagtagcagtacgttttgcggtagatgagctgttgggatcagagggaatcacatgtaaaagcgagggacgtgaagtggtggagatgcttgctgaactacctgacctttgggacgtaaacataagtgaatgggaaaacgattccgccacatcccgctttgaaaaggaaggctatcaggaaccgtatatcagtttcgtcaaatccctgacctccaagcccgtagttggagttggacgctacacctccccggacacaatggtctccctgattcagcgtggtgttatggacatgatcggagctgcacggccatcaattgccgatccgtttttacctaagaaagttgaggagggacgacttgatgaaatccgggagtgt

SEQ ID NO: 199346 - DNA, 495 bp, Unknown
  Bacterial polypeptide expressing nucleotide sequence isolated from the Sargasso Sea
acgaagaggtctctaactcagaaacagataaatgtttggatagatttgataaaattagaaattcaagcggatctactaaaacttctgaactaaggttgaagatgcaaaaaaccatgcaatctaaatgtgcagtatttagaaccgaaaaaacgttaaaagaaggtgtggaggaaataagaaagccttatgacggcatgaatgacatttctgttaaagataagtcattattattcaatacggatttagttgaaacattagaatttgataatttaattcgtcaagcattaactactatggattctgcatataatagaaaagaaagtagaggagctcatgctagagaagattttagtaaaagagatgataaaaactttatgaaacatactttagcttggcagaatgaaaataaagtagagataaaatatagagatgttcactcaagaacattgactaatgatgttcagtactttcctccgaaagagagagtatattagg

SEQ ID NO: 199347 - DNA, 732 bp, Unknown
  Bacterial polypeptide expressing nucleotide sequence isolated from the Sargasso Sea
cgctgtgtgcatcaggtccgcaaagcattacaagcactattaccagtgtaaatgcgttgtcggacacaaccattgaattaaatgtcgctttgtctgagccacttgatttcttgcccggtcagtacattaatttggggctgccaaactctgatgagacccgtgcgtattcatttagctcttgcccgggaagcaaagatgcaagcttccttattcgcaatgtgcctaatggcttgatgagtacttacttaagcaaaaacgccaatgcaggtgacgtgcttccggtaaccggtccactcggtagtttttacttgcgcgcagtagagcgcccagtacttatgctagcaggcggaacagggcttgcacctattctttctatgctggcgtcgcttgtgcagaacccaaccagtcaacctgtgtatttactctatggtgtgaccaatgtagatgacttggtgaagcttgaagccatacaagaatatgccgatgcattggacaactttagctacgctacagtcgtcgttaacccagatagcgcacatgagaagttgggttttgttactgatcatatggaaagtgttccatttgcacttgctgatgccgatgcatatttatgtggacctccgccgatggttgatgccgtgcgtcaatactttaaagatgcgggtacaaacccatattcgttccactacgaaaaattcaaccccagccagcctaaagaggaagccgcatgag

SEQ ID NO: 199348 - DNA, 383 bp, Unknown
  Bacterial polypeptide expressing nucleotide sequence isolated from the Sargasso Sea
agtttatataaaagaaaaaatttatgaaaaagttttagatggcgttgttgatagattaaaaaatcttaaaatgggaaatgctttagatgaaaattcagatgtaggagcaataatttcagaggatcaaatgaaaagaacattacattatatgaatattgcaaaagaaaactcatcaacaaaagttctacatggaggtaatcaaaaaaaaggcggtgaataccaagaaggttttttttatgaacctactttattgtcgggggttccagtaaaatcacctgtgtgtcaggaagaaatatttggtccagttgcttgtgcaattccatttaaatcatttgacgaagttattgaaagtgcaaatgatactccttttggattgtcagcag

SEQ ID NO: 199349 - DNA, 727 bp, Unknown
  Bacterial polypeptide expressing nucleotide sequence isolated from the Sargasso Sea
tatgccagactgtgatcttgatcaagccgtaaatggtttaatgggggctgcctacggttcagcaggagaaagatgtatggctcagtctgtggttgtagcagttggaaaaattgcagataagcttgtaagcaatctatcaaaaaaagttgaaaatcttaaagtaggaccaggattagacaaaaagtctgaaatgggtcccctcgtaacaaaagagcatttagaaaaagtgaaaggttatgttgatttaggtgttaaagagggagcaaaattagttgttgatgggagaaatataaaacttcaaggctatgaaaaaggcttttatattggtggctgccttttcgatcatgtaagcaaaaaaatgagaatttataaagaagagatttttgggcctgttctttcagttattagagtaaaagattttgaatcagcggttagtttagtaaacgagcatgaatttggaaacggtacaagtatatatacaagagacggtgatgttgggagaacttttgcaaacagaataaaaattggaatggttggaattaatattcctataccagtgcctgttgcctaccattctttcggtgggtggaaaagatctttatttggagatcagcatatgcatgggatggaaggtgtaagattttatactaaattaaaaacaataactgcaaaatggcccaagggtttagttgaagatcctgaatttgtaatgcctatactaaaataa

SEQ ID NO: 199350 - DNA, 811 bp, Unknown
  Bacterial polypeptide expressing nucleotide sequence isolated from the Sargasso Sea
gttttgtttgaatttgcaaaacttattgagaaaactggcatacctaaaggagtggttaatgtcattacaggttttggcgatccttgtggtaaaactttaacaacacataatctagtagagaaaattgcatttactggaggaccagaaactgcaagacgtattattaaaaattcagcagaaaatctttctgaagtaagtttagagcttggtggaaaaagtccagtcgctgtatttgacgatgcggagcaagaaaatgcaattaatggaataactgctggaatttttggagcaagtggacaaagctgtattgcaggttcaaggctttacatacaaaaaggaatttataacgaatttttagataagctttcaagtagagcttccaaaataaaaataggagctccaatggatctggatacagagatgggtcctttaagtagttttaaacaattagagacaattgaaaaaaatataaaagatacggttgatcaaggtggaaaaattaagtgtggtggtaaaagagactccttttcaaacaaaggatactacttcccaccaacaattatagaatgtgataatcacaatctgccaactgcagaaaatgagttatttgggcccatattatcagtaatgaaatttgatacagaggaggaagtaattaataaaatgaatgataatcaatatggattatcctcaggtgtttatacaagcaatctatcaagaggtatgcgtgtttctaaggcaataagagctggaattacttttgtaaatacttatagactaatttcacctttcggctccatttggaggtata

SEQ ID NO: 199351 - DNA, 550 bp, Unknown
  Bacterial polypeptide expressing nucleotide sequence isolated from the Sargasso Sea
gaagggtttgtaatgttcaatctaaaccaaggagaagtttgtacatgtccaagtagagctttaatacaagaatctatctacgataaattcatggaaagagctatcgcgagaactaaagctgttgtacaagacaatcctttaaaaatggaaaccatgattggagctcaagcgtcagtagagcagatggagaagattaaattttatcttgaacttggtaaaaaagagggcgctaaagttctaacaggtggaagtgttggtaagcttaatagtgggttggaaaaaggtaattatattcaaccaactatttttgaagctaataacagtatgagaatctcacaagaggagatttttggtccagtggtatctgtgattaaatttaaagatgaagcagaagcattaaaaattgctaatgatactctttatggtttaggagcagctgtgtggactagaaatggtaacatagctcacagaatgggtagagaaatacaagccggaattgtatggactaattgctatcatgcttatccagctcattcaccatttggtggtt

SEQ ID NO: 199352 - DNA, 876 bp, Unknown
  Bacterial polypeptide expressing nucleotide sequence isolated from the Sargasso Sea
atcctctgcagaattttcagacgtttatcttgcggatggcgcagtgatcaatctgggtaacaatcaggatgtaaccctaactcatatagatgatgaagggataagattaaatagcgtgaatcaacttcagtttggagattcaggtacaaaaatttcccaaagtgcggatggagtattagatctggtatcagataatgaagtagagatcaatggaacaacgatcgatataaatggtaatgcagaactagagaatgtaacaattgattatgtaaagatcgatggcacttacattggtcacgcagacgatacagatctaatgaccttggcaaatggaactctcacggtttctgggacacttgcagcaacaacattaacaggggatggttcaaatttaaccggtatatctgcatcctcgatcatggcagatgatattagtcagggtaatgcagcagtgacaatagggacgtcttcaggtgcgataaatatcaatccggcagctggttcaccgattcttttagataatacgatcaatgttgatggtagtttaatcggccatgcagatgatacagacctcatgacgttagcaaatggcagtgtgacctttacgggttctactgtgatcccaacagcggatgtgaatggaggtgcgatcgatgcagtcacactaggaacgaatagtgcggtgacccaggcggtcatcgataatgtgaatatcgatggagctgtaataggtcatacatctgacacggatcttatgaccctagctgatggtagcgttacttttacaggctctactgtgatcccaacagcggatgtgaatggaggtgcgatcgatgcagtgacgctaggtacaaacagtgccgtgacccaggcggt

SEQ ID NO: 199353 - DNA, 775 bp, Unknown
  Bacterial polypeptide expressing nucleotide sequence isolated from the Sargasso Sea
aatggagttgggacttaatgataaggtagttctaattactggtggagcaaggggaatcggagccgcagcagttagggcttttcttaatgaaaaatgtaaagttgtatttgttgaccatgattatgaatctggatctgagctggccaaatcatcgaaaacccgcttaagattcattgaagctgatcttaatactcaggaatcttgcaagcaagctgttaaaaagacggtatccttttttggtggaattgatgtcctagtaaataacgctggatttaacgatggcctgggtcttgagactccacccgaagaatttatggattctgtccgtaaaaatctattgcatgtttattccatgactcattattctctgccacaactgcgaaaaagtcagggatgcttggttaacctcggatcaaaggtttctgaaacaggtcagggaaacacttctgcctatgctgctgcaaaaggtgcaataaatgctcttacccgagaatgggcagttgctctagcacctgacaacattagggtaaattgcgtaatgcctgcagaatgtcatactgatcagtacgaaaaatttttccaaaccaggaaaaatcctgaagctaccagacaagcaataggcaatcttgttcccctttcgcgcagacttactacgcctgatgaaattgccctgactattgtctttctgtcctccaactgttcttcccatacaaccggtcagcatatttttgtggatggtggttatactcattttgaccgcgcagtaagtcatgaa

SEQ ID NO: 199354 - DNA, 841 bp, Unknown
  Bacterial polypeptide expressing nucleotide sequence isolated from the Sargasso Sea
gatgttgatttttttaataattgggtcaggtgtagccgggttacttacagcattagaacttgctgattatggatctgttcttattgtttcaaaacaagcgtttggagaaagtaatacgcgttatgctcaaggaggtattgcggctgcttggaatcgtttggattcgtctgactctcattttaaagatacgctcaaggcaggttgttatcacaatgttgagtctcatgttcagcttcttacagataaaggtcaagatgccattcaaacgttattggattacggtgtgtcttttgatcgcgatgaatcagattttatgctggctcaagagggagcgcattcccagccacgtgttttacattttcaagataaaacaggcatagcaattatggaaccgttattaaggcgtgttcagcaacatcaatctattcagtgtttagaatttacagctgttgttgagctggttatgcatgaacaacgttgtgtcggtgcttatgcagtaacagggcaaaaggaatcgttagttatttcttctaaggttacgtgtttggctacgggcggtgctggacagctttttgaacatacatcaaaccctaagattgctacaggagatggtgtgatgcttgcctataatgccggggctagtttaaaagatttagaatttgttcagtttcatcctaccagtgtcttgatagataaaactaagccagaatatatgttgttatctgaagcgttgcgcggagatggcgcaacattggtagatgcagatggggtaagtattatggggaacaagctttcgaatctatcgtcccgtgataaagtttctagagcaatttatacggaa

SEQ ID NO: 199355 - DNA, 394 bp, Unknown
  Bacterial polypeptide expressing nucleotide sequence isolated from the Sargasso Sea
atgaagccaattccaacagtagcaacatccaataattttaaatataattttaaaaaccaagttgtattagtcacaggagcaagcaaaggacttggatacgaagctgcaaaatattttttgaaatatggttcaaatcttatgatttgttcaagaaatcaaatccaaattaagaaagcttatgaaaaattaattaaaattaagaaaaaaaaccaaaaaatattttactcagctacagatgtatcgtcctatcaacaagtaaaaaaattaattgatattacaataaaaaaattcaaaaaaattgatgtattagttaataatgcaggagtctatggtcccaaaggacatattgaaaaagttaattgggatgaatgggtaaagacatttcaaataaatt

SEQ ID NO: 199356 - DNA, 889 bp, Unknown
  Bacterial polypeptide expressing nucleotide sequence isolated from the Sargasso Sea
gtaaattatcttaatgaaatagctaaatcaaaaaatttaaaaactaatcttttatcttcaataaaaccaagtaatgaaaatcataaaaagtggatttaccatcatttagaaaaattaattttaaataaaaaaattaaaaaagtaactatttggggtttaacttataaagaaaatacagatacacttaggagatcttttgctattgaggtttctacttggttaaaaaactatggtataaaagttacaggttttgatagcaatataaaaaaatttacaactaagttaaatgaaaaaattcaacaattgtccactccgctttcaaaaattaaaagtatagatacattgattatactgggaaaatctgaggattttttacgtatatcagcaactgctataaaaaaactaaacaaaaagctttttattattgatccaaattacttttgtaatcattttaaaaaaacttataaagatagatacttgtatgttggaaagccaatgaagccaattccaacagtagcaacatccaataattttaaatataattttaaaaaccaagttgtattagtcacaggagcaagcaaaggacttggatacgaagctgcaaaatattttttgaaatatggttcaaatcttatgatttgttcaagaaatcaaatccaaattaagaaagcttatgaaaaattaattaaaattaagaaaaaaaaccaaaaaatattttactcagctacagatgtatcgtcctatcaacaagtaaaaaaattaattgatattacaataaaaaaattcaaaaaaattgatgtattagttaataatgcaggagtctatggtcccaaaggacatattgaaaaagttaattgggatgaatgggtaaagacatttcaaataaatt

SEQ ID NO: 199357 - DNA, 741 bp, Unknown
  Bacterial polypeptide expressing nucleotide sequence isolated from the Sargasso Sea
atcattgtgtggttatgccagattgtgacttagatcaagcagttaatgggttaatggggtcagcatatgggtcagcaggagaaagatgtatggctcagtcagtggcagtagctgtaggaaaaatagcagatcctcttgttaaaaatttatcaaaaaaagttgagtcgttaaaagttgggccaggtctagataaaaaatctcaaatgggcccattagtaacaaaacaacatcttgataaggtaaaaggctatgttgatatcggagttaaagaaggtgcgaagttagtagtggatggtagaaacttaaaattacaaggacatgaaaaaggattttatatgggaggatgtttatttgatcatgtaaaaaaagatatgaaaatttataaagaagaaatatttggtcctgttttatcagtggttagagcaaaagattacaatgaagctttaaatttagttaacgaccatgaatttggtaacggaacaagtatttttacaagagacggtgacacaggcagatcatttgcaagcaatgtaaaaattggaatggttggcataaatattcctattcctgttcccatggcttttcatagttttggcggatggaaacgatctttgtttggagatcaacacatacatggtcccgagggagttcgattttatactaaattaaaaacaataacgtctagatggccatcaggtataaaatcagatccagaatttattatgcctacaatgaaataaa

SEQ ID NO: 199358 - DNA, 637 bp, Unknown
  Bacterial polypeptide expressing nucleotide sequence isolated from the Sargasso Sea
aatgatatcggaaaagaaagtcgcaatcgtcacgggttctgcccgtgggatcggcgaatctacggcgcgtatgttgtcggagcgtgattacaatgtggtggtcaattacgccagcagtgcggacgaagcgaaagaaacggcggatacttgcgagagtgctggagcggacgtgcttctgatccaaggggacatcgcgttggacgttgattgtcggcgcatgattgatgagacgatggctaagtggggccgcctcgatgtgcttgttaacaatgcgggtacgacgacatatgtcaatcacgataacctggaaggcctaacgcctgaggtttgggagcgcacgttttcagtcaatgtgtttggtaccttccaaatggtaagggcggcggagaaacctctgcgcgcatctggtaatggcaatattgtaaatgttggctcgattgcgggcgtcgctggtattggcagctcaatcgcctatgcagcgtccaagggagcggtcaatacgatgaccttatccctagcgcgtgtactggcacctgaggtccgtatcaacaccatttgtccgggctttgttggcactaagtggcagcgcgacgggcagggagatggttacgatgcctatgtagagcaagtgaaaatt

SEQ ID NO: 199359 - DNA, 607 bp, Unknown
  Bacterial polypeptide expressing nucleotide sequence isolated from the Sargasso Sea
acttgttagcgaactagcaaaaaaggttgaatctttaaaagttggaccaggaatggataaaaattcagaaatgggccctttagtaacaaaggaacatttagaaaaagttaaaggttatgtagatttaggagtaaaagaaggggctaagttaattgtagatggaagaaaaattaaacttcaaggttatgataaaggattttatataggaggctgtctttttgaccatgtaaaaaaagatatgagaatttataaagaggaaatatttggacccgtattgtcagtagtaagagctaaagattttgatgaagccacacaaataatcaatgatcatgaatttggaaatggtacaagcatttatactagagatggtgatgtaggtagaacttttgcaagtaaaattaaaattggtatggttggaattaatattccaattccagtaccagtcgcatttcacagttttggtggctggaaaaggtcattatttggagatcagcatatgcatggtccagaaggagtaagattttatacaaaattaaaaacgataacttcaagatggccttcaggtgtaagatcaaatccagaatttataatgccaactatgaaataa

SEQ ID NO: 199360 - DNA, 479 bp, Unknown
  Bacterial polypeptide expressing nucleotide sequence isolated from the Sargasso Sea
gatcggacctttgatcgatgaaggggcagccgataatgtttgtggattcattgaagaagcggtttctaaaggtgcgaaggttgcgattggcggaggaaaatcgcccctagggggtgcctttgtagaaccaacgatcctcaccaatgttaataaagatatgcgagtctttagcgaagaaatttttgggcccgtagcccctctcttcaagttttcgactgaagaggaggcgattgagatggctaatgatacggagttcggtctggcggcttatttttattcgcgagatatcggccgagtatggagagttagcgagggtctcgaatatggcattgtaggaatcaatgaaggtagtgtctctactgaggtagctccatttggaggggtaaaagagtctggcagtgggcgagaaggatcaaagtatggtctagatgacttcacggaaatcaagtatctctgtatgggtggtatcgacgaatagt

SEQ ID NO: 199361 - DNA, 385 bp, Unknown
  Bacterial polypeptide expressing nucleotide sequence isolated from the Sargasso Sea
attgaatatcgaaaataaagttgcactcatcaccggaggtgcttccggtttaggtcttgcaactgccaaaaatttacacgcaaaaggagcaaaattagttttgttggatttaaatgaagacaatctcaaaagtgcacaagaagaattgaaaaccaatgtcacaggagtggtgactaatgtagcagatgaagagagtgtaaaaaacgctattaagagtgcaatcgacgaattcggtgcgatacatattttagttaattgtgcaggtattgggagtgcctcaaaaacagttggcagagatggtgcacaccctttagatatttttaaaattgttatagacgttaatttggtcggaacttttaatacccttagacttgcagccgaagaa

SEQ ID NO: 199362 - DNA, 217 bp, Unknown
  Bacterial polypeptide expressing nucleotide sequence isolated from the Sargasso Sea
caagcaatcacaactatggaatcggcttattatagaaaagaaagtcgaggtgctcatgctagagaagattttccaaaaagagatgatgaaaattatatgaaacatactttaagttggcacaatggaaaagaagttaaaattaattatcgcaaggttaatttatcaacattgacaaacgatgttcaaacttttccaccaaaagaaagagtttattaat

SEQ ID NO: 199363 - DNA, 871 bp, Unknown
  Bacterial polypeptide expressing nucleotide sequence isolated from the Sargasso Sea
gcaggcaggattcgatctaatttatgtttatgccggtcacaatcttacgctgcttatgcactttctatcccgacgcttcaaccatcgcactgatgaatatggaggttcgcttgaaaaccgtgtccgccttttcagggaagtgatagaagaaacaatagaagcagtgggtgacagttgtgctattgctgtacgttttgcagtagatgaactgctgggtgctaagggaatcacctgcgaaagtgaaggacgtgaagtagtagagatgcttgctgaactgccagacctttgggatgttaacataagtgaatggagaaatgactccgcgacttcacgctttgagaaggagggctatcaggaacagtatattggctttgtcaaatcactaacttccaaacctgtagttggagttggccgttacacctccgctgacactatggtctccctgattaagagaggtgtaatggacatgataggagctgcaaggccctcaattgccgatccgtttttacctaagaaaatcgaagagggaagacttgatgaaatacgggagtgtatagggtgcaacatttgcgtagcaggtgactggctgtccgtaccaatacgctgcacacagaaccctacaatgggcgaggaatggcgtcggggttggcatccagagcggattgaaccttgcaaaagcaatgaaggagtattaatagttggcggaggtccagctggacttgaatgtgccttatctcttggcaaacgcgggtatcggttaattttggcggaggctgcagaagtattaggcggaagggttaacagggaaagtagactaccaggtttagcagaatggggacgtgtacgttattacagggaaactctgcttgaa

SEQ ID NO: 199364 - DNA, 850 bp, Unknown
  Bacterial polypeptide expressing nucleotide sequence isolated from the Sargasso Sea
tttgaacacgatgctaaaaacaatattcatgcacgtatagatagaaaaagaaaattccctgttactacattgtttaaatgtcttcttagtcagagatcggaggattatcttgaagattgtgataaaaataaagtagagcctgatcaaaaaagaattttaggcatgactgctgaagaaattttatctattttttatgaaaatattctttacaaaaaaaatgattttggatggcaatttaaggaggatttaaaattttataaaggcaaaatcttaaactacgatcttttagattcaaaaaatggaaaaattcttattactaaaggaacaaaagtaaatcaaaagataataaatgaaataaagaaaaaaaatatcaacactatatctatagaagaaaactctctaataggtttgtatttagcatcagatataatagatgaaaaaaatggtaaaatttattttgaagcagggcatgaaatagatgaagagtttttaagtttcattaattcaaataagactaataaattggatattttaaaagttgataacatagaaattggttcatatattagaagtacacttcagttagataaagctagatcaagagaagaagcattatttgaagtatttaaaattttaagacctggagaacccccaaccatagaaactgctgagcttttatttaataatttgttttataatgcagacagatatgatctgtcttcagtaggaagactaaagattaattcaaaatttaaaaaagaaacttcaatagaaaaaagaattctagataaaagtgatattaatgatgttgtaaaacacatgcacaatttgattgatggcaaaggtggac

SEQ ID NO: 199365 - DNA, 774 bp, Unknown
  Bacterial polypeptide expressing nucleotide sequence isolated from the Sargasso Sea
cctgggagtattcaatgtggtcaccggtcatggggaagaggctggacaatcattggctcttcatcaggatgtttccaagatcggattcactggatcgaccgaagttgggaaactactcttgcaatatgccggtcagtccaacatgaaaaaagtcagccttgagactggtgggaaatcacccatgatttattttgctgatttacccgatatggaacttgctgtttctacggcctatgattccatttatgcaaacatgggcgaagtctgtaatgcaggctctagaatctatgttgaaagggcaatttatgcagatttcgttgatcaattcattgcagaaggccaaggcgcatacacgcctggcgatccattggatccagaaacaaacatgggaccattgatgtcagcacaagctcaaaaaagagtactgggctttattgaatctggcaagaatgaaggcgcgaaactcaaatttggtggaaacattcctactggtcttgagtcaggatgttttgttgaaccaaccatgtttgcagacgtgaacaatgacatgaccattggtcgtgaagaaatcttcggacccgtggcttccattattccatttgatactgaagaagaagccatcgaaatggccaatgatacgatctatgggctttgtgcatcggtatggacgagcaatgtcagcagagcgcacaacatggctaaagccattgagtctggcatggtttatgtcaattgctacgacgtgggtgatatgacctttgagtttggtggata

SEQ ID NO: 199366 - DNA, 735 bp, Unknown
  Bacterial polypeptide expressing nucleotide sequence isolated from the Sargasso Sea
gtgttgtcatgcctgattgtgatttagatcaggctgttaatggtttgatgggtgcagcttatggatctgccggcgaaagatgtatggctcaatcggttgcagtcgcggttggaaatattggagataatttagttaatgaattatcaaaaaaagttgaagcattaaaagttggcccaggtatggataaaaaatctgaaatgggacccttagttacaaaagagcacttagaaaaagttaagggttacgttgatctaggagtcaaagaaggagcaaaattagtagttgatggaagaaacctaaaactccaaggctatgaaaacggttactatataggcggatgtttgtttgatcatgttaaaaaagatatgagaatttataaagaagaaatttttggccctgtactttctgtagttagggtaaaagattttgatgaagctactaagctaattaatgatcatgagtttggtaatggaacgagtatttatactagagatggagatgttggaagaacatttgccagcaatattaaaattggaatggttggtataaatatacctatacctgtgccagtggcattccacagttttggtggttggaaaagatctttattcggagatcaacatatgcatggattagaaggtgtgagattttacacaaaacttaaaacaataacttcaagatggccatctggaataagatcagatcctgaatttgttatgccaacaatgaagtaaa

SEQ ID NO: 199367 - DNA, 313 bp, Unknown
  Bacterial polypeptide expressing nucleotide sequence isolated from the Sargasso Sea
acttacgacggtttagattctttaaatgttaaagataaatccttagtatttaatacagatttagtcgaaactttagaatttgataatttaattagacaagcagttgcaactgtagactctgcttaccatagaaaagagagtagaggagctcatgcaagagaagatttcccaaaaagagatgatgaaaagtttatgcagcatactctagcttggtgtaatggaaaagagacaaagataagctatagagaggtccataaaactacattaactaatgaagtacagtattttcctcctcaggaaagaatttattaat

SEQ ID NO: 199368 - DNA, 384 bp, Unknown
  Bacterial polypeptide expressing nucleotide sequence isolated from the Sargasso Sea
aatatgaatcaatgtgtgaagaaatttttggacctgttctaacaatatatttatacgactcagataaatgggatgaaactttaaaactagtaaatgaaacgtcgccatacgctcttactggatgcgtttggggaaatgacagaaatgcaattaatgatgcaactgaaaaactaactcatgctgctggtaatttctatattaatgacaaacctactggagcagtggtagggcaacaaccttttgggggcggcagagcatctggtacaaatgataaagctgggtctatttttaacctaattcgctgggtctcgcaacgcactataaaagaaacttatgatccaccaactgaattcagttatccatttatggaaagctcaaaataaa

SEQ ID NO: 199369 - DNA, 790 bp, Unknown
  Bacterial polypeptide expressing nucleotide sequence isolated from the Sargasso Sea
gtaaatattggagataaagttgtaatgcactggcgaccaggcacaggcatagaatctgatttcccaaactataaacttaacaacaaaataataagtagtggcaaagtaaccacttttaatgaatattctattgtctcagaaaatagacttacaaaggtcccttctgaaactccttcagaactttgtgcgatactcgggtgtgccttaactacagcattaggaataattgataatgaaattgaactaaaatttggagaatctatcgcagtaataggttgcggaggagtaggactaaatttaatttatgcagcaagcatgaaaggtgcttctgagattattggagtagataataatacagaaaaaaaatctcttgcaaccaattgcggggcaaacatctttcttaaagatttaaatgattacgaagaaaaaattgacatcattattgataccactggcattgctgaagtgcttaccaacgcagtagaaaaattatcaggaacaggtcgtttaattttagttggccaaccacaacctggaagatcattcgaaatatttaatgctgtaaatttattctctggctctggtcaaatgattagagctactcagggaggcagaacaaatccagaaaatgatattccaagatatatcaaactatttcaattgggtaaactaaatataagcaatatgattacaaattcatttgaactggatgacatcaataaggcattcgatttacttaagactggtaatgctggtaggatcctcatcaatatcaataaaaatgaatgaa

SEQ ID NO: 199370 - DNA, 685 bp, Unknown
  Bacterial polypeptide expressing nucleotide sequence isolated from the Sargasso Sea
tgacgacgccgatctggatcgcgcgctcgatgccgcgatcttcatgatctactctctaaacggcgaacgctgcacatcttcctcgcgcctgctcattcaggacagcatcgccgacgactttgagaccaaactgatccaacgtgtaaacagcatcaaggtcggccacccgcttgatcccaaaaccgaggtcggccccctcattcacaaggtccacttcgacaaggtgacctcctatttcgacatcgcgcggcaggacggcgcaaccgtcgccgcaggcggcagccgccacggcgacaccggctggtttgtgacgcctacgcttttcaccggggcgaccaatcagatgaccatcgcccgcgaggaaatcttcggcccggtcctcaccgccatccgcttcaccgacgaagacgaggcgctgaacatcgccaatgacacccaatacgggctcaccgcctatgtctggaccaacgatgtgacccgcgccatgcgcttcaccaaccagctcgaggccgggatgatctgggtgaactcggaaaacgtccgccacctgccaaccccctttggtggcgtcaaagcatccggcatcgggcgtgacggcggcgactggagttttgagttctacatggaacaaaaacacatcggctttgccaccgggcaccacaagatcccccgcctcggcgcctga

SEQ ID NO: 199371 - DNA, 440 bp, Unknown
  Bacterial polypeptide expressing nucleotide sequence isolated from the Sargasso Sea
tagaaattctgaaggaaatgttggcactgctgaattaagactgtctatgcaaaagactatgcaatccaaatgtgctgtatttagaacagaaaagacccttaaagagggtgttgacgaaattaaaaaaacatttgatggtctaaactctatatctgttaaagataaatctttgatatttaatactgatttagtagagaccttagaatttgataatctaattagacaagctgttgtaacggttgactctgcctataatagaaaagaaagtagaggtgcacatgctagagaagattatcccaaaagagatgatgataaatttatgcaacatactctagcttggtgtgaaggaaagaatagtaaaataagttatagagacgtccataaatctacactaactaatgaagtacaatattttccaccccaggaaagagtttattaat

SEQ ID NO: 199372 - DNA, 321 bp, Unknown
  Bacterial polypeptide expressing nucleotide sequence isolated from the Sargasso Sea
ttaaaaaaacttatgatggtatggattcaatttcagttaaagataggtcattagtatttaatactgatttagttgaaacattagaatttgataatttaataagacaagcagtaactactgtagaatctgcatatcatagaaaagagagcagaggtgctcacgcgagagatgactatccaaaaagagatgacgaaaagtttatgcaacatactcttgcttggtgtgatgggaaaaatacaaaaattagttacagagcagtacacaaatcaactttaacaaatgaagttcaatattttccaccacaagagcgagtatattaat

SEQ ID NO: 199373 - DNA, 940 bp, Unknown
  Bacterial polypeptide expressing nucleotide sequence isolated from the Sargasso Sea
aatcaatcaaggatatgaaaggagtttttcaacaggtttggtagcatctaccggaactctcggtcaaataatacctccatcaattgctttggttttgcttggtgatgttatgtcaaatgcttaccaaagagctcaaaatgatatgggtatattctctcaacaaactgtaacagtcggagatctttttattggagcaatagttccagggataatgatatgtttaggctacttaatttatacaatttataaaaataaaactaatccacatttaaaagattacacgaatagctcaaatgttaagaatttagtgttatttaaaactttaatgctaccaattattttaatttttcttgtgcttggttcaatatttgcaggaattgcaacacctacagaagcagcagcaattggagcctttggtgctttaataatagctctgatcaatcaaaaagttgatataagttttatcaaagaaacatctgaaaaaactgcagttgtgtctacaatgatctttacaattcttattggggcctcaatattttctcttatattcagaggtgttggtggtgatgatttaatagatttaatttttaactctcttcctggtggctcttatacagctttaatatttgttctcttagtaatattcttattaggatttattctagattttattgaaatttgttatgtcattattccattagttgctccgcctcttttgatgatgggttttgatcctgtgtggctcgccattttatttgcaataaacttgcaaacttcttttttaactcctccttttggattttctttgttttatctccgcggagttgcagatgaaagcattcagacaaaagagatatacaaaggagtgattccctttatatttattcaactattgattcttttcttagttattctattttccactattattattaaatag

SEQ ID NO: 199374 - DNA, 740 bp, Unknown
  Bacterial polypeptide expressing nucleotide sequence isolated from the Sargasso Sea
atggtgaccgagggcacacagatcgaacctcgaggacagggttatgcctggacacctggcattcatagcccggaacagatacaaggctggcgtaaggtcaccgacgctgttcacgccgaagggggggtgatctttgctcaactttggcatgtgggccgcgtgtcgcacacgtcgctgcaacccggtggtgaagcgcccgtcgcgccatcagccatccgcgcggacaacgtcaaggtgttcatcgaaactggccccggcacgggtacactggccgacccttcgaccccacgagccctgtccaccaaagaggtaaaggaactggttgagctctacgcccaagcagcccgaaatgctttggacgcaggttttgacggggtggagcttcactgcgcgaatgggtacctggtaaaccagttcatttcggcgcataccaaccagcgtgatgatgaatatggcggttcgctgcagaaccgtcttcgcttcctgcgcgaaatcaccctcgccgttgctggtgtcgtcggcaaggagcgcgttggcgttcgcttcgccccgctgttcgcgaccacagacgaagaccgcgtctaccttggcctggtcgaagaagatcctcaccaaacctacatcgaggcagtgaagatcctcgaggaagtaggcattgcctacctgtcgctcgccgaagccgattgggaaagcgcacccgagctgcctgagacgttccgggaagctgttcgtaagacctc

SEQ ID NO: 199375 - DNA, 835 bp, Unknown
  Bacterial polypeptide expressing nucleotide sequence isolated from the Sargasso Sea
tctgaattagcaccagcaactatgtttgagtttgcaaagttagtcgaagaaactggaataccaaaaggtgttataaatgtagtttctggtcttggagatccatgtggcaaagctttaactactcacaacttagttgagaaagtagcttttacaggaggtcctgaaactgcaagacatataattagaaactctgcagaaaatttatctgaggtaagtttagagttaggtggaaaaagtcctgtggctgtttttgatgatgctaaacaagaaaatgcaattaatggtataaccgctggaatatttggagcaagtggtcaaagctgtatagcaggttcaaggttgtacttacaaaaaggaatttataatgaatttttagataaattagcatcaagagcggaaaaaattaaaataggcgctccaatggactctgatactgaaatgggtcccttaagtaactttaaacaattagaggtaatagaaaaaaatattaaattaactgttgaacaaggtggaaaaattaaatgtggtggtaaaagacatcctttttcaaatgaaggttattatttcccaccaacaattattgagtgtgaaaatcataatttaccagctgctgaaaatgagctttttggacctattttatcagtgatgaaatttgatactgaaaaagaagtaatagaattaatgaacgacaatcaatatggtctttcttcaggtgtttataccagtgatcttgcaagaggcatgagggtatctaatgctatccgagcaggaataacatttgtaaatacttatagattaatttcaccatctgcaccattggaggcattaaagatag

SEQ ID NO: 199376 - DNA, 582 bp, Unknown
  Bacterial polypeptide expressing nucleotide sequence isolated from the Sargasso Sea
agcagaaacttttaaaagttgcaccctggactgattcattatctcaaatgggaccagttatttcaaaagaacacaaagaaaaaattgaaaattatattgcatctggagttgaagatggcgctcatttagttttagatggtagaaatatgaaaattcaaggatatgaaaatggttactttgtaggacctacattatttgatcatgttaaaaaagatatgaaaatttataaagaagaaatatttggtcctgtattatcagtcattagagctcaaaattatgatgaagccttgagattagtaaatgatcactcatttggaaatggcactagtatctatacttcagatggagaaatttctagacactttacaactaattgtaagattggaatggtgggtgtaaatgtaccaatccccgtaccaatggcttttcatagttttggtggttggaaacaatcgctttttggagatcattctatgcatggtgttgaaggagtaagattttacacaaagttaaaaactgtaacctcaagatggccaaaaagtattaaaaaaggtgcagaatttaaaatgcctacaaattaat

SEQ ID NO: 199377 - DNA, 633 bp, Unknown
  Bacterial polypeptide expressing nucleotide sequence isolated from the Sargasso Sea
ttgtgtgggctgtagacagtattgctgatgagctctgtgatcttctaaccaaaaaagctgagtcactgagaataggtccaggaaatgaacctgaaaatgaaatggggccgctcataactgatgatcataaaaataaagtcattgattatattcaacaaggcgaagacgctggagcaactatcttattggatggtcgtgatcatgaggtcacaagtaaaccaggatttttcctaggccccacgctctttgatcatgtcaatccagagatgagtatctataaagaagaaatatttggtccggttctagttgtactcagagtgaaagactttaatgctgccattaaactggcgaatgaacaccaatttggaaacggagtcgccattttcaccaatcaaggctcaaaggctagagaatttgttcactcagtcgaggttggaatggttggcatcaatgtcgcaatacctgtgccgctgtctttttatacatttggtggatggaaagattcaatttttggttcatccaatatttatgggatggacgggattaggttttttacaagaacgaaaacagttacagccagatgggttgatgatgatggatcaattaatctctcaatgccaacagttaagtaga

SEQ ID NO: 199378 - DNA, 808 bp, Unknown
  Bacterial polypeptide expressing nucleotide sequence isolated from the Sargasso Sea
gcaaaatatatttatgaaaattctgctaaaaatgaaaaaagagttcaagctttagggggagctaaaaatcatttagtagtaatgccagattgtgatttagatgaagcagtaaatggcttaatgggagctgcttatggttctgcaggagaaagatgtatggctcaatcagttgcagtggctgtaggagatataggagatgagctagtattaaaactatcaaaaaaagcggaaactttaaaagttggccctggaatggataaaagttctgaaatggggcctttggtgactaaagaacatttagaaaaagtaaaaggctatgttgatttaggtgtagaagagggcgcaaaactagttgttgatggaagaaatcttaaactgcaaggttatgagaatggtttttatataggtggttgtttatttgatcatgtaaaaaaagaaatgagaatttataaagaagaaatatttggacctgtcttatcagttgtaagagtaaaatcttttgaagaagccgcaaaattaattaatgaccatgaatatggaaatggagttagcatttataccagagatggcgatgctggaagaacttttgcgagcaaaattcaagttgggatggtaggtatcaatataccaattccggtaccaatggcctttcacagttttggaggttggaaaagatctttgtttggagatagtgcaatgcatggaatggaagggattaaattttatacgaaattaaaaacaatcacttcaaggtggccatcaggaattcgatctaatccagaatttgtgatgcctactatgaaataaa

SEQ ID NO: 199379 - DNA, 904 bp, Unknown
  Bacterial polypeptide expressing nucleotide sequence isolated from the Sargasso Sea
ggtgttgctatttctactgtgcttgtgggtactttattagcagcatccacaggtgttgtaggtgcttcagtcgttgctatgggtgttatttcgttgcctgtaatgatgaagtacaaatacaatacgcctttagcatgtggtactatttgtgcttctggaaccttaggacaaattattcctccctcaattgtactgattattttaggagatgtttttcaagttccagtaggtgacctatttaaagctgccgttggtcctggtcttgccttagttgcagcgtatattctgtttattttagtggtttcatttattaaaaaagatatggctccagccattccatctgattcaagcagaggaagtaaaaagaaacaagtgattcgagctttgattgatattattccatcattaacactgattattttagtacttggttctatttttgcaggagtagcaacaccaactgaatcagcagcagttggatgtattggtgctattggattatctatgttatataaaacctataccaatgcaatggttaaagaagcggcacttgaatcagtaaaaattacttcaatggtatttggtattttaattggtgcaactgctttttctatggtattttcatatacaggtggagaagagcttgttgaacatgccatgatgagtcttccaggtgatgataaatggggattcattatctttaccatgttggctattttagtactaggtttctttattgactttattgaaatctcttatattattgtacctattttagttcccgttgcagatgcgttaggaatctctcctgtttggtttgctattttaattgcaatgaacttacagacatcattcttaaccccaccatttggtttctctttattttatctcaaaaggttgtgca

SEQ ID NO: 199380 - DNA, 277 bp, Unknown
  Bacterial polypeptide expressing nucleotide sequence isolated from the Sargasso Sea
agtcattagttttcatacagaccttgtagaggcgcttgagcttcataatttaatggcccaatcaaaagtaacactacactcagctctcaatagaacagaaagcagaggagctcatgctcgtgaagattacaaagaaagagatgataaaaattggttagtacattctttagcttggttaaatgataaaggagatgtaagtatgggttctagagcagttcatatgaatacattaacaaatcatgttcaaccaattcctccaaaacggagagtttactaa

SEQ ID NO: 199381 - DNA, 957 bp, Unknown
  Bacterial polypeptide expressing nucleotide sequence isolated from the Sargasso Sea
aaaaaatttaaaaattatataaacggagatttcacggaatctaaatctggtaaatcttttaagtctattgatccatcaactgaaaaggaatttgcagaaatttctctcgcggaagagtatgaagtaaacttagccgtagaatcagctcataatgctttttatggagaatggtcaaaaattcttcctagtaaaagagcacactatttaagagcgattggagatcaacttaaagaaaaagcagaattacttggaacgattgaaacaaaagatactgggaaattatttaaagaaacaaaatttcaggcaaattatattgctgaatattattattactatgctggattagtcgacaaaattgagggctcaacacttccaatagacaaagaagatatgcatgtattcaccaccagagttcccgttggagttgttgctgcaataataccttggaactcacaaatgtttctcactgcagtcaaactggctccagccttagcaatgggtaatactattattattaaggcatctgaaattgctcctactccattgttagagtttgctaaaattattgataaagttggaatgccaaaaggtgtcgtaaatataataactggtttcgcagatacttgcagtaagttacttacttcacatccaaaaattaataaaatagcatttacgggaggtgtccatacagcgaaacatatagttagaaactctgcagaaaatttatctcaaatatctcttgagcttggtggaaaaagtcctgtagtagttttcaaagatgctcgtaaaaacaatactataaatggaattatggcaagtatatttggagcaagtggtcaaagctgtattgcaggttccagactttacttgcaagaagatatttatcaagaatatttagaggaattaaaaaatagagttgaaaggattaaaattggtgaccctttatcaactacaact

SEQ ID NO: 199382 - DNA, 937 bp, Unknown
  Bacterial polypeptide expressing nucleotide sequence isolated from the Sargasso Sea
gacgccgtcaggtttagaggaacagcgattggtactaacacagctcatcgaggagctcaaagaggacctggtcaaaaccagattgcgccgattatttccccgattctagatgccgcggctgatgagctgggtgtaagtcgttttgatatacgaaaaataaatactccgatgaccggcgatgtcggtgggcctcagcgaacgccattcacatctgcatatatgccggaaactttggatcttgcagcggaacagttcggatgggaggagcgccaatcgcgccgtcgccgaaccaacggcagtaaagttattggtcttggaattggtcagggttaccacaacgctggccgttcgggcatggatggaatcgtgatgatgggcccagacgggcgtttgaaggtccacaacggtgtcggtaaccttggtacgtactcctacgcctcaacttcgagagctgcagcagaggtgttaaagatgccttgggagcgggttgatattgttacgggtaggactgatttgcatcttccaattacttcacctcaagatggaagcaattctatctttaccaacaccaggactttttatggggcagcccaggatatgttggcgaagatgaaggagatagctgcgggagatctcggaggtacacccgaggattacgatatttctaacgagcgtgtccatcaaatcgccgatgaatcggtgggtatgactttcgggcaagtggcagttcgtgcattggagctgggaggcaagtataccggttcttctgatttgccagaggaactcgctgaatggactcaaatatccgtttctcgacttgctggtacggctttcatgggggttttccacgacccacgccacgagggtaatcctccaggtttcacagttagttgtattgaaatcgaattggatacggaaacgggtaagtatgaaattc

SEQ ID NO: 199383 - DNA, 493 bp, Unknown
  Bacterial polypeptide expressing nucleotide sequence isolated from the Sargasso Sea
gaaaaaatctcaaattctgaaacagacaaatgtttggaaagattcgaaaaattaagaaatagtaatggtgataatagaactgcagatctaagattagaaatgcaaaaaactatgcaatcaaaatgtgcagtgtttaggacagaaaaaactttaaaagagggcgttgaagaaattagaaaaccatatgcgggaatggactcaatatctgtaaaagataaatctttaatttttaacactgatttagttgaaactttagaatttgacaacttaattagacaagcaatagttacattagattctgcttatgaaagaaaagaaagcagaggagcgcatgcaagagaagatcatcctaaaagagatgataataattttatgaaacatacattatcttggtgcgaaggaagtaaaacaaaaatttcttatagagatgtacatagatcaacgctgtcgaatgatgtgcaatactttcctccacaagaaagggtttattaat

SEQ ID NO: 199384 - DNA, 868 bp, Unknown
  Bacterial polypeptide expressing nucleotide sequence isolated from the Sargasso Sea
gcaactgtaattgcaatgggcttaatttcattgcccactatgttgaataataaatatgatagaagtcttgcaagtggaatagtttgttcatctggaacacttggacaaataatccctccgtcaattgttttaattattattgcagaccaattagctagtgctgctgatgtagcaaatacaatgagacaggcagactataaattaataacaggtgaatttaatatgcctggcgagtttagagtaggctctactagtgctggcgatatgtttcttggagcattattacctggattagtattagttggtttgtatatgctgtatgtatttgtatatgcaagattaaatcctagagcagctcctcctgttccatttaaaggtcaatttgattttaaattttggatgaaagttataatggtaataattccaccacttgcattaatatttgcagttcttggatctatattaatgggtattgcaacagtgaaccaagctggttctattggtgcaataggtgcaactataatggctgggtatcgtctgcatcaaggtaaaaaggatgcatattatccattactaatatccgttatagctttaattccaattttttttatttcaaataattataatttaaacatcaaagctatagaaactagaaacttaactgcaatttttataacaggtttttttactttattctttttaataggaataatttggagtttttggagatcttataaagttgataacgttttaaaagaagttgttaccgaaacttgtgtaactacttccatggtatttataattcttttgggagcagcgatgttaacctcaggttttagggcctttggaggtgaagaattagtaagag

SEQ ID NO: 199385 - DNA, 712 bp, Unknown
  Bacterial polypeptide expressing nucleotide sequence isolated from the Sargasso Sea
tccaaatataataatgagtgatgcagatttagatattgcaattcaaggggttatcgatggaatgagatatacacgacaaggacaagcatgtactgctggatcaagagtttatattcaagaaaaaatttatgacaaagtcttggatggagctgttgagaaattaagtaaattaaaaatgggtaatgctctagatgaaagttctgatataggagctattatttccgaagaacaactgaaaagaactttatattatatggatattgccaaaaaaaactctacaaccaacgtagtccatggtggtaatcaacgaacaggtggtgattataaaaatggtttcttctatgaacccacattgatgtcaggtgttccagtaagctctccagtttgccaagaagaaatatttggtcctgttgcttgtgcaataccatttaaaacatttgatgaagtaatgaacagtgcaaatgatacaccgtttggattgtcagcggtattgtggacacaaaatttatctagagctttacagtttgttgaagaaattgaagcaggtttcgttcaagtgaatcaatgtgtagcgcctagagcaaatgtttcatatggtggattaaaaatgagtggcctaggaaaagagtatgcatttgatagtatggttaatcattttactcaaagtaaaacagttttgattaatagaggaaaatcaaatatagataactaa

SEQ ID NO: 199386 - DNA, 385 bp, Unknown
  Bacterial polypeptide expressing nucleotide sequence isolated from the Sargasso Sea
acaatgcaagcaaaatgcgcagtatttagaaatgaaaaaacactaaaggaaggtgtaaatgaaattaaaaaatcttttgcgggtatggagtctatatcagttaaagacaggtctttaatttttaatacagatttaatggaaacgcttgagtttgataatcttattaggcaagcaattacaactatggaatcagcatatcacagaaaggaaagccgaggtgcccatgccagagaagattttcccaaaagagatgatgcaaattatatgaaacatactttaagctggcacaatggaaaagaagttaaaattaattatcgtaaggttaatttgtcaacattgacaaatgatgttcagacttttccaccaaaagagagagtttattaat

SEQ ID NO: 199387 - DNA, 274 bp, Unknown
  Bacterial polypeptide expressing nucleotide sequence isolated from the Sargasso Sea
catgtcagaccgagtcgtcctcgtcaccggcgccgcgcgcgggctcggcgccgtcatcgccgaacgttttcatgcggccggctaccgtgtcgcgctggccgatatcgccgccgacgccattgaggcgcacgcacgcgaactcgacccgagcggcgaacgcgcgatcgcgctgccgctcgacgtcacgtcgaaacgcgatttcgaagccgcgcgcgatgcgctcgtcgcgcgctggggcgcgatcgacgtgctcgtgaacaacgcgggcgcatcg

SEQ ID NO: 199388 - DNA, 826 bp, Unknown
  Bacterial polypeptide expressing nucleotide sequence isolated from the Sargasso Sea
tttgtgggatcaacacctgtagcaaaatatatttatgaaacatctgctaaaaatcacaaaagagttcaggcattaggtggagcaaaaaatcatttggttgttatgccagatgcaaatttagatcaggcagttgatggaataatgggagcggcttatggttcagctggagagagatgtatggctgtttctgttgctgttgcagttggaaacattgctgatgaattagtagaaaacatttataaaaaaacacaagaattaaaagtagctccatggactgataatgaatctgatatgggtccactaatatcaaaagatcatttagaaaaagttgaaaaatatatcaacataggcgttgaagagggagcaaaattagttacggacggaagaaattataaattgcaaggatatgaaaatggttattttattggcccttctttgtttgacaatgtcacagacaaaatgaagatttataaagaagaaatatttggccctgttctttctgttgtaagagcaaaagattataatgaagctcttggtttagtaaatcggcataattttggaaatggaactagtatttatacttcaagcggtgatacagctaggcattttacaacaaattgtaaaattgggatggtaggagttaatgttcctatccctgtaccgatggcattccatagctttggaggatggaaacaatctttgtttggagatcatgctgtccacggatctgaaggaattcatttttatacaaaattaaaaacaactactagtagatggcctacaagcattaaatcaggaccagaatttataatgccaactaattaat

SEQ ID NO: 199389 - DNA, 904 bp, Unknown
  Bacterial polypeptide expressing nucleotide sequence isolated from the Sargasso Sea
cattgatctaaattgggaatatacccaccctgctgacgagaaaataatagagccagatgaggaattacctcatgaaatgttagatgcttatcaaaaccttactgatgaggaaaagatactttttgatagacataatacggctgaacttatgagtcaatttcttcacggagaacaaggcgcccttttagttgcatctcaacttgcaagttgtgcaccaacttacaatgcaaagctatatgctgcttcgcaaacatttgatgaggctagacacgttgaggtatttaatagatatcttcaggataaagttggaatacattatccaattaacccatctttaaaattgttactggataaaattcttactgacgaaagatgggatcttaaatttattggtatgcagattattattgagggacttgcacttgcagcctttcaaatgctaaaggctattactaaggatcctttgttaaaacaacttcttcactatgttgttcgtgatgaagcaagacatgtaacctttggtattaattatttagaggactatctaaaaacactttcaccggaagaaattaatgaaagagctgaatttgcctatgaagcttgtgttatatctagagatagattgataaatacaaaggctgaacaaaggttcttaaaaatgagtgaagaggaagcaagagaattccaattaaatacaggtacatttgaaatgtttagaaacttcttatttacaagagttatgcctaatcttaaaagaattggtttattaactgatgaggttagacctaagttcgaagcattaggattacttgaatacgaaaatgctccagatgattttgaatgtgactgggctgaaatgaaaaaacctttagagaaatttggtcaaatacctacatcactctaa

SEQ ID NO: 199390 - DNA, 855 bp, Unknown
  Bacterial polypeptide expressing nucleotide sequence isolated from the Sargasso Sea
tttttatcaacagcaactaaccagagaacagatgaatatggaggaagtttagaaaacagggcaagatttgtaaaagaagtagtcgaggaagttagaaatgaagttggtgattcaatgggtatcactcttcgtttgtcattagatgaaatgattggtgatcttggttttgctaattcagaagtaagagattttgttgaaatgcatcaggacttgcctgatctatgggacttagctcacggtgcatgggaagattgttctggtccatcacgttttaaagaagaggctgcacaatttgacctcgtcacaggtatcagaaaacttacttctaaaccaatagttggcgttggtcgatttacaagtcctgatgtaatggtcaaacaaataaattcaggtacactagattttataggatgtgctagaccatctatagccgatccttttttaccaaaaaaaattgaagaaggacgtatacaagatattcgagaatgtattggatgtaatatttgtattaccggagatatgacaatgtccattagtaggtgtacccaaaaccctacctttatggaagaatggcgcaaaggatggcatccagaaattatagagccaaaaggtaagacatcaaaagttttagtgattggatctggccccgcaggcttagaagctgctttagcatgctctaatagagggtatgacgttacactcactgaggctactaaaattttaggaggcagagttgcaaaagagagaaagttacccggactctctgcttggggaagggttgcagattatagagaatatcaattatctcaaaaatctaacgtagaaacttatttagagtcatctttagatgctgat

SEQ ID NO: 199391 - DNA, 434 bp, Unknown
  Bacterial polypeptide expressing nucleotide sequence isolated from the Sargasso Sea
ttacatttcatctgcaaaaaatgaaggtgcagatttaattaccggaggagaaatccctaaagaggaggaattacaagatggcttttttattcaacctactatttttgacaaagtcacaatggacatgaagatagggaaagaggaaatttttgggcctgtcatgtcagtcattgagtgggatgattatgaatctatgatttctttggctaatggaattgaatacggattaactgcgatgattgtgactgataacttaaaattagctatggaaactgccgaaagggtggaagcaggttatatttggattaattcaacagggagatatttgggtgcgccttatgggggttggaaacaaagtggatttggtcaagaagaatgctttgatgaattattaagttacactcaaattaaaaatgtcaatatgcgctggtgac

SEQ ID NO: 199392 - DNA, 517 bp, Unknown
  Bacterial polypeptide expressing nucleotide sequence isolated from the Sargasso Sea
gtaaaacctaattctaaaaaaattgaaattaataaatctaaaacagaagaaatcattcaaagatttgataagataagaaatagcagaggtagtgaaaccactggaaaacttagaacttcaatgcaacatataatgcaaaaaaaatgcgcagtatttagaacacacaatttaatttccagagggatacaagaatttaatgaagttgaaaaatcaatggaagacatagatataaaagataaatctcttgtttttaatacagatcttgtcgaagctttagagttacataatttaatggctcaatcaaaagttaccctctattctgcattaaataggaaagaaagtagaggagctcatgcaagagaggattttaaggaaagagatgacacaaattggcttgttcactcattagcatggttgaatgataatggagatgttaacatgggctccagagcagtacatatgaatactctaacaaaccacgtccaaccaatacctcctaaaagaagagtatattgat

SEQ ID NO: 199393 - DNA, 754 bp, Unknown
  Bacterial polypeptide expressing nucleotide sequence isolated from the Sargasso Sea
atgactggtcattacaactgggattacacagatgctgacagcagaataaaaaaactttacgagctaggtaaagagcttaattgggatggtgaaattgatttagattggtctaaaggaataggcagagatgaataccctattaaacctgaaatggtagccagactagaaggccctctagctgcactgcctgaagagaaaagacttgaatatatgcgccatgatcaagcttgggcattaagtcaattcctccatggtgagcaaggggctcttttagtagcttcccagctagtttcatgtgcaccaacttatcaagcaaaattatatgctgcttctcaaacttttgacgaggctagacatgtagaagttttttcaagatatttacaaagaattcatggactcgaatatcctgtaaataaaaacttaaaggctctcttagataaaactcttactgatcctagatgggacttaaaatttataggaatgcaaatcgttatagaaggactagcattagctgcattccaaactactaaagaaacttcaaactgccctcttttgagacaattagttcattatgtaataagagatgaagctagacatgtaacctttggaataaactatttaagtgaatttcttcagactctatctgaagaagaacttgaagaaagagcacaatttgcttatgaagcctgtgttgttatgagaagaagaattattaataatgagcttcctgctaaatggtttggcattactgaag

SEQ ID NO: 199394 - DNA, 574 bp, Unknown
  Bacterial polypeptide expressing nucleotide sequence isolated from the Sargasso Sea
ctcactgctggatatagttgtgtttggaagagctgcagcccaaagagcattaaaaactgttgaaaaaggtgcctcacacgctcccttacctaagcatgtgacagataaaattttggcaagactagataaaatgagatatgctaaaggtgacgtctctgtcggtgagataagaaattcaatgcaaaatgcaatgcaaaaacatgcagctgtgtttagatctaactcttcaatgaatgaaggcgtaaaaaaagtcgatacaattgcgaatagtttagatggggttggtattaaagataggtcattgatatttaataccgacttagttgaggcattagaacttgaaaatttaatgcaacaagcaatagttacaattaaatctgcagatcaaagaaaagaatctcgaggtgctcattctcatgaagattatccagatagggatgataaagattggatgaagcatacaattatgtggttaaatgaaaaaaataaaactaaacttgattatagagatgttcatttaaatacgttaactaacgaggtagcttcgattcctccagcaccgagagtatactaa

SEQ ID NO: 199395 - DNA, 871 bp, Unknown
  Bacterial polypeptide expressing nucleotide sequence isolated from the Sargasso Sea
tgacaaaattgagggctcaacacttccaatagataaagaagatatgcatgttttcaccaccagagttccagttggagttgttgctgcaataataccttggaactcacaaatgtttctaactgcggtcaaacttgctccggctttagcaatgggcaatactattattattaaggcttctgagatagcccctactccattattagaatttgctaaaattattgataaagttggaataccaaaaggtgttgtaaatataataactggttttgcagatacttgtagtaggttgcttacttcacatccaaaaattaataaaatagcatttactggaggggtccatacagcaaaacatattgttagaaactctgcagaaaatttatcacaaatatctttagagcttggtggaaaaagtccagtggttgtttttaaagatgctcgtaaagacaacgcaataaatggaattatggctagtatatttggagctagtggtcaaagttgtattgctggttccagactttatttgcaagaagatatttataatgaatatttagaggaattaaaaagtagagttgaggaaattcaaattggagaccctttatcaactacaactcaactaggacctctcgctactttaacccaattagaaaatattgaagaaaaaatcaaacaaacaaaaaaactgggaggaaaaataattactggaggaaataaagttagtgaatttaaacatggttattattttgaacctacaataattgagtgtgataatcataatttgcctgttgcagagaatgaattatttggtccagttttatctgtaatgagatttaaagatgaagaaaatgcaattaaattgatgaatgataatagt

SEQ ID NO: 199396 - DNA, 496 bp, Unknown
  Bacterial polypeptide expressing nucleotide sequence isolated from the Sargasso Sea
atggagcttggactgaacgataaggtagttctgattaccggtggagcccggggcatcggagccgcaacagtccgggcttttattagtgaaaaatgtaatgttgtttttgtagaccaggattctgagtccggatctgaactggcaaaatcttcaggacccaacttaaggttcatcgaagctaaactaaatacaccggattcatgcagacaggctgtggaaaagacggtatccttttttggtggaattgatgtcctggtaaataatgcaggatttaacgacggactgggtcttgaaactcctcctgaaaaatttatgagttctgtacgtaccaatcttttgcatgtttatgccatgactcattattccctgccaaaactcagaaaaagtcagggatgtcttgtgaatctaggctcaaaggtctctgaaacaggtcagggaaacacctctgcttatgctgctgctaaaggagcaatacaggctcttactcgagaatggg

SEQ ID NO: 199397 - DNA, 499 bp, Unknown
  Bacterial polypeptide expressing nucleotide sequence isolated from the Sargasso Sea
aatgggagtcatagataaattcggcctaccaaaacccatatcctcagtattcaactgggccagatcttactcgctatggtattttcaatttggattagcatgttgcgctattgaggttatggctgtaagcgggccaagacatgattttatgaggttaggagttattcctcttccagcatctccacgtcaggcggattttatgattgttgcaggaacagtaacagataaaatggctccttctgtgaaaaggctttatgaccaaatgcctgagccaaaatatgttatttcaatgggatcttgttctaatagtggtggaccttattgggactcttactcagtcaccaagggagtagatcaattaatccctgttgatgtttatgttcccggttgcccaccaagacctgaggcattgcaggaaggaattattcttctacagaaaaaaattcgtggagaagacatgaaagagaagtggttagaagttcaaactgagccaatttaa

SEQ ID NO: 199398 - DNA, 641 bp, Unknown
  Bacterial polypeptide expressing nucleotide sequence isolated from the Sargasso Sea
tattgtaagagcgtcgtttcttaatcaaggacaagtgtgtctttgtggaagccgaatattaattcaagattcaatttttgaggcattcaaaatcaaatttgttgaagcggtaaaaaatctaaaaatcggtgacccatctaaacaagaaacagatttaggatctttaatcagccctgagcacttagaaaaagtaagatcatatgtggatctagcaatccaagaaggaggaacacttcttactggaggagatacgcctaacattgattctcaatttagaggaggaaactggattacgcctacggtagttgaaggattatctccaaattcgagatgctctacagaagaaatttttgggccagtagttactcttcatccattctctactgatgaagaagcaattgcaatttctaacggaacaaaatatggtttggcaggaagcgtatggactggtgattcagcacgtggaactgaaattgctaagcaaatggatacaggaatggtttgggttaacacttggttgcatagagaccttcgagttccatttggaggagtcaaagatagtggcctaggtagagaaggtggaaaatggagtttaggattttattcagaggcctcaaacatctgtattatggatgattaat

SEQ ID NO: 199399 - DNA, 481 bp, Unknown
  Bacterial polypeptide expressing nucleotide sequence isolated from the Sargasso Sea
ggcgtggaagagggcgcgacgctggtctgcgacggtcgcggcatcaaggtcgagggccatgagaacggcttctatgtcggcccgacgctgttcgaccgtgtcacgccgagcatgcgcatctaccgtgaggaaatcttcggcccggtgctggctgtggtgcgggtgaagagcttcgacgaggcgctgcaactgatcaacgaccatgaatacggcaatggcacctcgatcttcacccgcgacggcgacaccgcgcggcagttcgaggaaaacgtcaaggtcggcatggtcggcgtcaacgtgccaatccccgtgcccatggccttccactgcttcggcggctggaagcgctcggtattcggtccgctgaacatgcacggcccggatggggtgcgcttcttcacccggatgaagaccgtaacccgccgctggcccaccggtatccgcgccggtgccgagttcgccatgccgaccatgaagtaac

SEQ ID NO: 199400 - DNA, 580 bp, Unknown
  Bacterial polypeptide expressing nucleotide sequence isolated from the Sargasso Sea
tgggttcaattctttaatcgatttagtggtttttggaagagcagcagcaaaaagagcatctgaaattgttaaacctggtacagctcatgaagaaatacctcaatctgaaacagataaatgtttagatagatttgaaaagttaagaaatggaaatggaagcaatagaactgcagatttaagactttctatgcagaaaacaatgcaatcaaaatgtgctgtttttagaaccgaaaaaactttaaaagaaggtatagaagaaattagaaagccttatgaaggaatagagtccatttctgtaaaagataaatcattaatttttaatactgacttagtagaaacgcttgaatttgataatttaattagacaggctattgttactatagactctgcatatgaacgtaaagaaagtagaggtgcacatgctagagaggatcatcctaaaagggatgacaataattttatgaaacatacattatcctggtgtgaaggaagcaaaactaagattgcttatagagatgtacatagatctaccttatcaaatgatgtacaatattttccacctcaagaaagagtatattaa

SEQ ID NO: 199401 - DNA, 558 bp, Unknown
  Bacterial polypeptide expressing nucleotide sequence isolated from the Sargasso Sea
gtatggataaatcgtctgaaatgggacctttagtaactaaagaacatttagcaagagtaaaagggtatgttgatttgggagtaaaagaaggcgcaaaacttgtcgtagatggtagagatattaatcttcaaggttatgagaatggttattatataggtggatgtttatttgattatgtcaaaaaagatatgagaatatatagagaagaaatttttgggcctgttttatctgtagtgagggttaaaaattttgatgaagcgctccaacttataaatgaacatgagtttggaaacggtacaagtatttatacaagagatggagatgtaggaagaacttttgcaaataaaataaaagtaggaatggtaggaattaatatacctattccagtaccagttgcttatcatagttttggaggctggaagaggtcattatttggagaccagcatatgcatggcccagaaggtgtaagattttatactaaattaaaaactattacttcaaggtggccatctggcgttaggtctaatcctgaatttgttatgccggtgatgaagtaat

SEQ ID NO: 199402 - DNA, 472 bp, Unknown
  Bacterial polypeptide expressing nucleotide sequence isolated from the Sargasso Sea
agagggtgctgaattagttattgatggaagaaactttaatcttcaaggatacgaaaatggatattttgtaggaggatcattttttgataacgtaagtacagatatgtctatttataaagaagagatatttggtccagttatgtcaatggttaggtctaaaagtttaacagaagcacttgaaatggttaatagacatgaatttggaaatggaactgcaatttttacttctgatggtggtgttgcgagaaaattttcgaatgaatgtcaaattggtatggttggagtaaatgtgccaataccagtgcctgttgcttatcattcctttggcggttggaaaaggtccgtgttcggcggtcatggcgtgtatggcatggaagcagtaaggttttatactcgattaaaaacagtaacaggaagatggcctattggaaaatctttgggagctcagtatacttttcctagcaacaattga

SEQ ID NO: 199403 - DNA, 528 bp, Unknown
  Bacterial polypeptide expressing nucleotide sequence isolated from the Sargasso Sea
tatgtctaaagtaattttaattaccggtgcaagtagcggaattggagaagaggcagcaaaatcattagcaaaggccggccataccgttattttaggtgcgcgccgatttgacaggctgcaggcccttgccaaaaccattgaagcgagcggcggcaccgccagagcgcatgcattggatgtaacatctcgctcaaactttaaaacggtagtagacgctaccgttgaggaatttggccacattgatgtgttagttaataacgctgggttaatgccgttgtctcctatctcggcggcgaaagttgatgaatgggaccgaatgattgacgtgaatgtaaaaggggtactgtatggcattgagtcggtacagccacttatggaagcacgtgaacaaggccatattattaatatcgcgtctattgcggctcactcggtatttccaacatcggcggtatattgcgccactaaatacgctgtttgggcattgtctactggccttaggatggagtcgaaaaatttacgcgttactac

SEQ ID NO: 199404 - DNA, 490 bp, Unknown
  Bacterial polypeptide expressing nucleotide sequence isolated from the Sargasso Sea
tatgtaccttaaaaaaattaatttaaaaaacaaaacggctgtcgtgacaggcgcgggaaaaggtattggtaaagcttgcgcaattgcattagctgaggcaggggctgatttaattatcataagtagaacacaaaaagatttagataaagtttctaaaattataaaaaaatataaatcaaagtgtatttcttatacgtgtgacataactaattatgctcaaataaaaaatataataaataaacagagaaaaattgatattttggtaaataatgcaggtacaaatattcctgaacattttacaaaagttcaaaaaaaaaatatggaatatcttgtaaggcttaatactatttcaacattcaatgttgctcaactttgtactttaaaaatgttagaaatgaaaaatagaaaaaaaattgggggttctataattaacatgtcatcacaaatggggcacgttggcggtccaattagaagtgtctataatatgaca

SEQ ID NO: 199405 - DNA, 316 bp, Unknown
  Bacterial polypeptide expressing nucleotide sequence isolated from the Sargasso Sea
gaaatatggcttgaatcaagcgatatctcagtaactgatcaatcacttgtatggaacactgacctacttgaaacattagaatatgaaaatcttatcgcccaggctgttgttacaatgaattctgcgcataatagaaaagaaagtagaggggcgcatgctcgtgaagattataaagaaagagacgataaaaactggatggttcatacgttagcatggactaacgataaagagtgtaatttagattatcgttcagtgcatgaatatacattgtcaaatgaagttaagtatattgagcctaaagcgagagtttactaat

SEQ ID NO: 199406 - DNA, 766 bp, Unknown
  Bacterial polypeptide expressing nucleotide sequence isolated from the Sargasso Sea
tatgtcgactaataaacctcagccattggcagtgattactggcggagcctctggaattggtctaggcgcagtaaaacgttttttaaaagaaggatatgaggtgttgagcatagacgctaataaagaagctggagataaatcaatcaatgaccttaaatcagatacatacaaattaaattttactcattgcgatataacaaatcattctcaaattgagtctatttttaatgccctattagaggaaaaacgccctgctcaagtattaattaattgtgcaggcatcagcccagcattgaatcccttgcatgaatactcagtagatgaatggctcagaaccatagacataaatttacatggaactttttatgcttgtagagaattcttaaagcttgctactgcggtgaacattgaagaaggttccattgtgaatgtggcatcgataatgggaacaagagccagtgcagctcaagcttcgtatggtgcctccaaacatgccgtggttggtctgaccaaatcaattgcgcaagactacgcaacgatgaacataagggcaaatgcaatcggtccaggtgtcatagatacgccaatgaatacagaattgatgaaagatgaaaatgtcatgcaataccttttacaaagagttcctatgaaaagagttgcttctgcagatgaagtggctaatttaatatattttttagcatcatcagaagcatcttatattacaggatcttattaccccattgatggtgggtatcttgcaagctga

SEQ ID NO: 199407 - DNA, 791 bp, Unknown
  Bacterial polypeptide expressing nucleotide sequence isolated from the Sargasso Sea
aaccgcaaagaacagattttatcaagttcctcactgtaacggaatgggctatctaaggccaaatactttagcaaaaatgcgcgaaataaaagcagaagggggttgggctgttgtatgtactgaagaagttgaaatccatgccaactcagacaacggttctgcagcagagggaaggctttgggatgatggagatattcctgcactagcaaaaatgactgaagcagtccacaagcacgatgctttagctggtattgagttagtacatggaggttactctaacgctaacaattatagtcgaatacctccaatagctcccagtaatatttctgttaactcctatgatccagtccaagctagagctatgacaaaaaaagatattagagaatttagaaaatggcatcaaaaagctgtttctagatctatggaggctggatttgacattatttatgtatatgctgggcataaccttactttattgatgcattttatttcccgtcgattcaatcatagaacagatgaatatggtggcagtttagagaatagagttagacttttcagagaggttttggaagaaacaaaggaattggtaggaaataaatgtgctgttgctgttcgctttgcagtagatgaattgctcggtaataaagggattacatgccaaaaagaagggcgtgaagttattgaaatgttagcagaaatacctgatctttgggatgtaaatattagcgaatgggacaatgattctgcaacatcaaggttgaaaaagagggttaccaagaatcttatataag

SEQ ID NO: 199408 - DNA, 859 bp, Unknown
  Bacterial polypeptide expressing nucleotide sequence isolated from the Sargasso Sea
gcaggttttccgatttgctattccaacaattatggcaggtaatggtgccattttaaaacatgcttcaaatgttcaaggatgtggttttgcaatagaatcttgttttaaaagggcaggttttccagaaaatatcttccgtaatgtatcagtaccagggaaggatgtagaacatattataaaagattctagagttgcagcagttacgatcacaggaagcactcctgtcggacgatcagtagcaaaagtcgctggtcaatacttaaagaaaacagtactagagctaggtggaagtgatccctacattattctagaagatgctgatatagataaggccgtaaatgcctgcattaatggtagaatcttgaatgccggtcaaagttgcatatctgctaaaagaataattgcaacaaaatttgtttatcaatctattttagatcgatttagagaaattttaccaaaaaaaataatgggtgaccctagagataatgtagatataggccctatggtatccttaagtgctagggatgaagtgcatatgcaagtaactaattctattaattctggtgcttcactcatacttggtggttttattccaaaattaaaaggtgccttttatccgattacccttcttgcaggcgttaaaccgggcatggttgcatttgatgaggagatatttggaccagttttatcattaattatggcggagaatgaggaagatgctattgcccttgccaataatactccatttggtttaggtgccgcaattttcacaaaggatattgaaaaaggagagattatagctaagacaagaattaatgctggtgcatgttttgtaaacgattttgtaaaatcagatcct

SEQ ID NO: 199409 - DNA, 316 bp, Unknown
  Bacterial polypeptide expressing nucleotide sequence isolated from the Sargasso Sea
tatgtaccttaataaaataaacttaaaaaataaaactgcattagttacaggtgcaggaaaaggtattggcaaagcgtgcgcgatagctctcgcggaagctggggctgatctcattattgtcagtagaacacaaaaagatctcgatgctgtttctaaaattataaaaaaatttaaatcaaaatgcgctgcttacatttgtgatgtgactaattataaccaaataaaaaatattattggtaagcaaaaaagaattgatattttagttaataatgctggaaacaatattcctgagcattttacaaaagtcaaaaaagaa

SEQ ID NO: 199410 - DNA, 532 bp, Unknown
  Bacterial polypeptide expressing nucleotide sequence isolated from the Sargasso Sea
ccaaagagcagcagaaatagttaaacctggcatgaagcatgaagaaatatctcaaagcgaaacagataaatgtttagaaagatttgacagacttagaaattcacaaggtagtaaccccacagcagatctaaggctatcaatgcaaaaaactatgcaatcgaaatgtgcggtatttaggacagaaaaaacattaagagagggcgttgatgatattagaaaaccgtttgagggtatggagaatatatcgataaaagataaatctttaatatttaatactgacttagttgaaaccctagagtttgataatttaatcaggcaagcaataacaacaatggactctgcttatcatagaaaagaaagtagaggggcccatgctagagaggactatccaaaaagaaatgatgaaaaatttatgcaacatactctctcgtggtgcaatggcagtgagaccaaaattaattataggcccgttcacaggagcacgctatcaaatgatgttcaatattttccacctcaagagagagtttattaa

SEQ ID NO: 199411 - DNA, 727 bp, Unknown
  Bacterial polypeptide expressing nucleotide sequence isolated from the Sargasso Sea
aatgcctgatgcagatttagaccaagttgttgatggtctgatcggcgcagggtatggatccgcaggagagcgatgtatggctctttctgttgctgtagctgttggtgatgtgggagataaattaattgaaaaacttactcctcgcgttcaaggacttaaagttgggcctggaacagatccagaagttgaaatgggtccactcatcagtgatgtacatttatcaaaagtaaaaagctatgttgactctggagttgctgaaggagctgatcttatagtggatggaagatcaatatctcttcaaggttatgaaaatggatacttcattggaggctgtttatttgatcatgttaaggaagatatgcagatatatagagaagaaatatttgggccagtattatctgttgtacgtcaacctacttttgatgatgctttaaaaatggttaacgatcatgaattcggaaacggtactaccatttatactcgtgatggtgacacagctagagcttttgctaatcaatgtaaaattggaatggttggagtgaatgttcctatacctgttcctatggcttttcatagctttggtggttggaagcgatccttatttggggatcatgcaatgcatggtatggacggggttaggttctttacgcgtcttaaaactgttacttcgagatggccaactggtatcagaaaaggtgctgaatttaccattccaaccatgaagtaa

SEQ ID NO: 199412 - DNA, 761 bp, Unknown
  Bacterial polypeptide expressing nucleotide sequence isolated from the Sargasso Sea
acaagttagattatcaccagttcctgaaagtgtaatgagtgctgtttgttattttccagatttagactcagcagttaaaactgctcaagaagtaattcaatacggagttccgatagcaagaattgaaatgttaaataaagatcaaatggaaataagcattaaatattctaaattagataatattaaagcctctcctacacttttttttgaatttcatggaagtgaaacatccaataatgaagcaattagtattgtagaagagttatcaaaaaataataatggaagtgattttcaatgggcgtcttcacctgaagagcaaaaaaaattatggaaagcaagacatgatgtttattattctgttaaagctcttggaaataatatgaaaatatattccacagatgtttgtgtaccaatatcaagattagttgaatgtatttcgtgggcagaaaatgaagttaaaaaattaggtcttactgccccgatggttggacatgttggtgatggaaattttcattcaataattttgtatgatcctcaggataaagaaaaacaaaaaaaaattagacagtatagtgatgatttaattaataaagcattagaacttgaaggcactataactggagaacatggaattggtttacaaaaaaaacattatcttttaaaagaacaccttgacaatcttccagttatgaaagctatcaaaagaagtcttgacgtaaataatattatgaatcctggaaaggtttttgacttaaattaat

SEQ ID NO: 199413 - DNA, 505 bp, Unknown
  Bacterial polypeptide expressing nucleotide sequence isolated from the Sargasso Sea
ggtacacctcatgaggaaatttctcaatctgagactgataaatgtttagagagatttgatagacttagaaatgcatctggaacaaataatactgcagatttaagactggcaatgcaaaaaacaatgcaatctaagtgcgctgttttcagaactgaaaagactctaaaagagggtgtaaatgaaattagaaaaccttttgagggcatggatgacctttcggtaaaagataagtctctaatttttaatactgatctagtagagacattagaatttgataatttgattagacaagcaataactacaatggactccgcttatcatagaaaagaaagtagaggagctcacgctagagaagattttccaaagcgaaatgacgaaaaatttatgcagcatacattatcgtggtgtgatggcaaaaagactaaaatcgactatagacctgttcacagatcaacactttcaaatgacgttcaatactttccacctcaagaaagagtttactgat

SEQ ID NO: 199414 - DNA, 865 bp, Unknown
  Bacterial polypeptide expressing nucleotide sequence isolated from the Sargasso Sea
atattatctacaagtattattaaacaaagaagtaaagaaaattacagacgaatctgttgcaaatgctgaaaaaatattaaacagagcaaaagcaactacagaagtaggaactacagccaaaaccgtagaagctgaagctaccgcaagttttgctagagaaaagcaaaaacaaaaatctgccgaaatagatatagaaagagccttgttcaatcttgctatgattcttcagcttaaagattttcaaaattttgacgttcaagagtttcctcttccagacatgttatcaactccgctcaattctacagacagtttcatagaaaaagcttatgataatcaaccacaaataaaagctgcagaaacaagaattctttctgcacaaaaacaagtagaaattactaaaactcaatttttgcctactgtaacagctagcgcaggtattagttcattttattataacaatcttacaacagatattacaggagcaaacacaacaacagggcaaattttttatgaaaataattttgctaaacaatacaaagacaatttcggacaaaatcttggtttgagtgtaaatattccaatttttaataaaggaaataccaaattacaggtagaacaagctaaaatctctgaaaatattgctaaaaatacgctagaccaacaaaaacaatcagtaagacaagatgtacaaaaagcttattttgacgctaatgcaaactacgaaaactttatggcagcagtagaagcagaaaaatctacaaaactagcgctagaatttgcagagaaaagttacgaagctggcagatctaccatttatgatttgaacaacgccagaaacaactatgtaaatgctcaaagcacggtt

SEQ ID NO: 199415 - DNA, 879 bp, Unknown
  Bacterial polypeptide expressing nucleotide sequence isolated from the Sargasso Sea
ttgctgaaatgatagatgaagcaggatttccaccaggagtatttaatttagttaatggtgatggagcaggagttggtacaaatatatccggtcatcccgatatcgatatgatctcttttacaggatcaacaagagcaggaaaattaatttcaaaaaatgcagctgatacaattaaaagagtttgtttagaactaggaggcaaaggtggaaatattgtttttgcagattcttatcctcaagcagttagagatgggattagaaatgtaatgagtaattctggacaatcatgtgacgccccaacaagaatgcttgtagaaaaatccatttatgagagagcaattaaagaagcggcagatgaagcaaataaaattaaagtagattttgcatcaaaaaaaggagatcatataggtcctgtagtttcaaaagctcaatatgataaaattattaacttaattaaaagcggaattgatgagggcgctacattggccactggaggacccgaacttccaaataatttgaataaaggttattttattaaaccaacaattttcacaaatgttacaaacaatatgcaaatagcaaaaaaagaaatttttggaccagtcctttcaataatttcatttgaaacagaagaagaagcaattaaaattactaacgatacagaatatggccttggaaactatttacaaaccgaagataaagaaaaagcaaaaagagttgcaaaaaagttaagatctggaattgtttatattaatggaaaagcagcagattccggaacgcctttcggcggatatagacaatctggaaatgggcgtgaaggtggtacgtggggactagaagaatacttagaggtaaaaacaattactggatgggaataaa

SEQ ID NO: 199416 - DNA, 781 bp, Unknown
  Bacterial polypeptide expressing nucleotide sequence isolated from the Sargasso Sea
aatgtctgaattaaaaaaatataaaatgtttattaatggtgagtgggttgattctgaaagtaaaaaaacatttgaaactttaaatccagaaaataacaaaccgtgggctatagttcctgaggcaagcgctaaagatgttgataaagcagttaaatcagcacaaagggcatttgagggtgagtggcctaaattgttgccaagagaaagagcaaaatatttaagagcaataggaaataaacttagagaaaatgcagaactgttaggcaaagttgaaacattcgatacaggtaaactttatagagaaacgcataaacaagctcattatattgcagaatactatgattactacgctggtcttgcagataaagtagaaggcacggttctcccaatcgataaaccaaatattcaagccataacaactagaattccaattggagtaattgcagcaatcgttccatggaattcacaaatgtttttaactgctactaaacttgctccagcacttgccatgggaaacacagtagtcattaaagcttcagaacttgcgccagcaacaatgtttgaatttgcaaaattagttgaagaaactggaataccaaaaggggttgtaaatgtaattacaggttttggtgaaccttgtggcaaagctcttacctctcataatcttattgaaaaaattgcatttacaggtggacctgaaactgcaagacatattattagaaattccgctgaaaatttatctgaagtaagtttagaacttggtggaaaaagtcctgttgca

SEQ ID NO: 199417 - DNA, 502 bp, Unknown
  Bacterial polypeptide expressing nucleotide sequence isolated from the Sargasso Sea
aactccacatgaggaaatttcaaattcagaaacagataaatgtatagatagatttgaaaaattaagaaatggaaatggaactaatagaacagccgatttaagactagcaatgcaaaaaactatgcaatcaaaatgtgcagtattcagaactgaaaaaactttgaaagaaggagtagaagaaataagaaaaccatttgaaggaatggactcaatatcagtaaaagataaatctttaatttttaataccgatttagttgaaactttagaatttgataacttaataagacaggctatagttacattagactctgcatatgaaagaaaagaaagtagaggagctcatgcaagagaagatcatcccaaaagagatgacaataactttatgaaacatacattatcttggtgtaaaggtagcgaaacaaaaatttcttatagggacgttcataggtcaacgttatctaatgatgtacaatattttccacctcaagaaagagtttattaa

SEQ ID NO: 199418 - DNA, 553 bp, Unknown
  Bacterial polypeptide expressing nucleotide sequence isolated from the Sargasso Sea
atgtcagggataataaaattaggcgtgattggagatccaatcaatcactcgctgtcaccaaacatacacaaattgtttgcagaaagagcaaatatagaaattgaatacttggcctaccgagttgctagttcaaatcttgaaaactttattaagagtttttttaaggatggcggcacaggattgaatgtaacccttcctcacaaagtagattgcttaaattctgttgatgaattttcacttattgtaaaaaaaataggagctgcaaatacattaaggagagaaaaagggaccaataaaatatttgctgattcaacagatgggatgggtttgataaagggtttgcatggagcaaagatcaatgaaattaagtctgatattttaattataggcgctggcggagcggctcaaagtatcatacataatcttcaagatagacacccgagagttattgttatagccaatagaactaaagagaaaatcaagccagttattagcaggtttccccctttggattacgatgacctatatccaaacactcaagtagtgatataga

SEQ ID NO: 199419 - DNA, 820 bp, Unknown
  Bacterial polypeptide expressing nucleotide sequence isolated from the Sargasso Sea
ttatgagttaggtaagaagttgaattggaatgcgaccatggacttagactggtccaaagatcaccaccctcatacagaatggcctacaaacccagaattccaacagcttgcaggctttaagccatacgatgacctgtctgaagaagagaaaatagagtgtgcttggcatttattggcaagtggcttaagtcaaatagtacatggagaacaaggggcaatgttggttgcttctcagttagtttcttgtgccccaacttacaacgcaaaactatacgctgcttctcagacctttgacgaagcaaggcatgtggaggtttttcataagtaccttcgtgaaagaattggaatgacttatcccgtaatgccaggtcttaaattactactcgacaagattctcactgatccacgatgggatctaaaattcatcggcatgcaaataataattgaaggacttgctttagctgcatttgaaagacaaagaattgctgcaatggatccattgcttaaagacattttttatttagtaataagagacgaagcaagacacgttacttttggagtaaattatcttgaagagtttgtgcaaactttgtccgagaaagaaagagaggatagagctgaatttgcatacgaagcttgtgtagtgatgaggaacaggtttggatcaaataatgtgatgaaccattacggttgggatgttgaagaagcacaagaagtcctaaatcagtctgagagcgcaaagctctttaataacctactattttcgaaaattatgcctaacttgaagagaattggtttattaactgaaaagactcaagaa

SEQ ID NO: 199420 - DNA, 572 bp, Unknown
  Bacterial polypeptide expressing nucleotide sequence isolated from the Sargasso Sea
ttctttaattgaccttgttgtttttggaagagcggcagctaaaagagcagtggaaattataaaaccaggtactccacatgaagaagtttcaaatttagaaacagataaatgtttagaaagattcgataaaataagaaattcaagtgggtctacaagaacttcagaacttagattacaaatgcaaaaaacaatgcaatcaaaatgtgctgtatttaggacagaaaaaactttaaaagaaggtgtagagcaaattaggaagccatacgaaggaatgaatgatatctctgttaaagataaatcattgctatttaatactgatttagttgaaaccttagaatttgataatttaataagtcaggcattaactactatggactcggcttacaatagaaaagagagcagaggtgctcacgcgagagaagattttactaaaagagatgataaaaattttatgaaacatacactagcatggcaaagtggaaaaaaagttgaaatcaaatatagagatgttcactctagaactcttactaatgatgtccaatattttcctccaaaggagagagtttattaat

SEQ ID NO: 199421 - DNA, 772 bp, Unknown
  Bacterial polypeptide expressing nucleotide sequence isolated from the Sargasso Sea
tttggtgatccatgttggaaaagcacttactactcataaagacgtggagagaatagcttttaccggaggaccagaaacagcaagacatattattaaaaattctgcagaaaatttatctcaagtcagtttagaattgggtggaaaaagtccagttgcagtatttgaagatgcagatcaggaaaatgcgttaaatggtattactgcaggaatatttggtgcaagcggccaaagctgtattgctggttctagattatatttacacaaaaatatttataataattttttggataaattagttaaacgtgcagataaaattaaattaggtgacccaatgaatcctgatactcaaatgggtcctctaagtagtttaaaacaattagaaataatagaaaaaaatattaaaaaaactattgatcaaggtggaaagataagatgcgggggtaaaagacatagcctttcaaataaagggtattattttccagctacaataatagagtgtgaaaaccataatcttccaacggcagaaaatgaactttttggtcctgtgttgtcggttatgaaatttgaaaccgaaaatgaagttataaataaaatgaatgataatcagtatggtttatcatcgggtgtttatacaaaagacttgggaagaggtctgcgagtttcaaaggcaataagggctggaataacatttgtaaacacatatcgattaatatcaccttcagccccatttgggggaatgaaagatagtggatatggaaaagaagcgggaatt

SEQ ID NO: 199422 - DNA, 775 bp, Unknown
  Bacterial polypeptide expressing nucleotide sequence isolated from the Sargasso Sea
aaagttaaaacctcaaatgtgttatcagaggaagaatttgaaaatgtagtaggtcgcataagcttcttcgttaattctggaatcaaatttattactgagatgtgtaaaatgagagcgtttgtttctttgtggaatgaaattacaaaagagagatatagcgttaaggatcctaaaaacagaagatttaggtatggcatgcaagtaaatagtcttggattaactgagcaacaacctgagaacaacgtatatagaatattaattgaaatgctaggtgttgttctctcaaaagatgcaagagcaagagcagttcaattgccagcttggaatgaagcaatgggattgccaagaccatgggatcaacaatggtccttaagattacaacaaattgttgcgtatgaaacagatcttctacattttgacgatatattcaatggctctgaagtaattgatgaaaaggttagagaccttaaagagactgcgatgaaagaatttaatcacattcaatcaattggtggtgcagtagctgcagttgaaagtggttatttaaaacaggaattggtcaattctcaaaaagaaaggctaaaaagaattaatgataaagagcaaatcgtagttggagttaatgagtatattgaaactgaagagtcacccctcgtatcaaacgatggaggcatagagacaattgatccaaaaattgaaaatgagcaagtaaaagcagttattgattggagacaaaatagagatcaaaaacaggttgataacgctttaaatcact

SEQ ID NO: 199423 - DNA, 917 bp, Unknown
  Bacterial polypeptide expressing nucleotide sequence isolated from the Sargasso Sea
tgatgtcgatagagcggttaaagctgcacaaaaagcttttgaaggtgaatggtcaagattgttgccaagagaaaggggtaattatttaagggcaatttcaaataaacttagagaaaatgccgaactattaggaaaaattgaaacaattgatactggtaaactttttagagaaacaaacaaacaagcaaattatattgctgaatattatgattattatgcaggacttgcggataaagttgaaggaactgttttaccaatagataaaccaaatattcaagctatcacaacaagaatacctataggagttattgctgcaataattccttggaattcacaaatgcttttaactgttacaaagctagctccagcgcttgctatgggaaatactgttgtcattaagtcttcagagttagcgccggctgtaatgtttgaatttgcaaaacttattgaagagactgaaataccaaaaggagtagtaaatgttataaccggttttggagatccttgtgggaaagcattgactactcacaatttagttgaaaaagttgcttttacaggtggtcctgaaactgcaagacatattattagaaactctgcagaaaatttatctgaggtaagtttagagcttggaggtaaaagtccagttgctgtatttgatgatgcacatcaagaaaatgcaattaatggaataactgcaggaatttttggagcaagtggccaaagctgtatagctggatcaagattgtatttacaagatggaatttataatgaatttctggacaagctttctgcaagagcagaaaaaattaagattggagctcctatggatcctgaaagtgaaatgggtccattaagtaatttcaaacaactagagataattgaaaaaaatataaaacttactgtagaatcaggtggaa

SEQ ID NO: 199424 - DNA, 697 bp, Unknown
  Bacterial polypeptide expressing nucleotide sequence isolated from the Sargasso Sea
atgactgataaaatgcttaaatttgtaaaaataggtcaacaaactccacctaaaagagatgttgtttctaggaaagaggattttaaagagatttatgacgaatttattaatcaaaaggcgcaagaacaatcaagcagatgctcacaatgtggggtacctttttgtcaaatccattgtccgcttagcaataatatacccgattggttaaaacttactgcagagggaagattaaaagaggcttatgagttatcacaaagcacaaacaatatgccagaagtttgtggaagaatatgccctcaagatagattgtgtgaaggtaattgtgttatagaacaatcagggcatgggaccgtaacgattggttctatggaaaaatatattacagacaatgcttgggaacaaggatgggttaaacccatagaagtaaaatatgaaagagatcaaagtgtaggtataattggggcaggaccggcaggacttgcagctgctgaacaattaagaaaagatggatatagaattacagtgtatgatcgatatgatcgtgcagggggattattgatttatggaattcctaactttaaattagaaaagcatgtagtagagagaagaacaaaacttttaaaagatgggggaattgaatttattcagaattttgaaataggtaaagatgctacactaggtcaactgagaaaaaaac

SEQ ID NO: 199425 - DNA, 865 bp, Unknown
  Bacterial polypeptide expressing nucleotide sequence isolated from the Sargasso Sea
tcaattggctttgattttggtgatttagaggatataaaagaattagagaacaatatgaaagatttccataataatgagttcaaagcttgttcaattattaatggcttggatgtagctgaagaatatgagatcaagaaagcccctttcgataacaaaaagcatataggtaaagtctcatatgtatctaaagataaattagaaaatattgagttaaatgaatcctggactgaactgaatcttgaagaaaggattaaagttctaaataaagttgcagcagacattcagaacaatagagataagtttttttatcttttagctaatgaagctggcaaaactttgaaagattgtgatgctgaagttagagaatctatagattttattaactattattgccatcaagctaaagagttattcaccaaagaagaattagaaggtccaacaggagaaaagaattatctaatgcatgcaccgaaaggaaaattcttatgtattagtccttggaactttccaatggctatttttgtaggtcaaatttctgcagctttagtaactggtaatagtgttattgcaaaaccagcagaggacacatcaataattgcatatgaaataattaaattattccatgaagctggagttccaggatcagcattgcaactaataattggtggaagagaaataggcaatgaactaacaaaaaatgatcaactaaatggagttgctttcactggttcatcagaagctgcgaagaagattaatgttaatctcgctaattcagatggcccaataaaaacattgattgctgaaacaggtggtcaaaatgtaatgtttgttgattcttcgtctttaaaagagacaagttattgat

SEQ ID NO: 199426 - DNA, 505 bp, Unknown
  Bacterial polypeptide expressing nucleotide sequence isolated from the Sargasso Sea
cgaaacattccgcctctcccaaaaaatgcaacggaacagataatttcccggtttgacggactccgatatgcggatggttctgaatctaccgcttctcttcgactagaaatgcaacgcgtgatgcaaaatcacgctgcggttttcagaaccggggatgttttagaggaaggaaaacaaaagatccgagaaatctataacaaatttaaccacgtaaaagtggccgaccgctctatgatttggaatacagatctagtagaaactctcgaactcgcgaatctgcttggcagttcgttgacaagtatggatgccgcagcgaatcgaaccgaaagtcgcggcgcgcacgctcgcgaagactttcccgaccgcgatgacgaaaactggatgaaacatactttaacctgggtagacgaacagggggaagtctcgtttgactatcgacccgtccacctgtacacactgacagatgaagtagaagtgataccgcccaaagcgcgggtttactaaa

SEQ ID NO: 199427 - DNA, 518 bp, Unknown
  Bacterial polypeptide expressing nucleotide sequence isolated from the Sargasso Sea
aacaaaaccaaattcagctaaatttaatattcatcaaagacataccgaagaaatattaaatagatttgatcttattagacataacaaaggagaaattttttcaggagaagcgcgtaatgaaatgcaaaaaataatgcaaaaaaaatgtgctgtttttagaactgaggatttaattaaaagtggtataaaagaatttgaaactgttgaaagaaaaatggaaaatattcaagttaaagatcaatcacttatttttaatacagatttagtagagacattagaattgcacaatctaatggagcaatctaaagcaacattatattcggctcttaatcgaaaagaaagcagaggggctcacgcgagagaggactatccagaaagagatgataaaaattggcttgttcatagtttagtttggttggataaagaaggaaatataaaattagataagaaacctgtaaacttaaataccttaactaatcacgttcaaccaattccgccaaagaaaagagtgtattaat

SEQ ID NO: 199428 - DNA, 493 bp, Unknown
  Bacterial polypeptide expressing nucleotide sequence isolated from the Sargasso Sea
tttgatacaagataaagttgtagtaattacaggagcatctagcggaattggatattccactgctaaagaacttgcaaaaaaaggtgcaaagatagttgcaggagcacgtagattagatagattagaaacattacaaaaagaaattacagatgatggtggagaaatcgtcatttgtgaaactgatgttaccaaaaaaactgattgtgataatttggtaaaacaagcacttgataaatttggaacagtagatgttttggtaaataacgccggattaatgcctcttagttttgtaaaatcactaaaaattgacgaatgggatcgaatgatagatgtaaacatcaagggtgttctgtattgtactgcagcagtaatccctacaatgactgagaaaaaatcaggccacattatcaacatttcatctgttgcaggaagaattgttttcccagcaggaagtgtttactgtgcaaccaaacatgctgtaactgcattttct

SEQ ID NO: 199429 - DNA, 489 bp, Unknown
  Bacterial polypeptide expressing nucleotide sequence isolated from the Sargasso Sea
ttgatcttggagtaaaagaaggggctaatttagttgtagatggtagaaatattaaacttcaaggttatgaaaatggtttttatataggtggatgtttgtttgataacgtaaaaaaaaatatgagaatttataaagaggaaatttttggaccagttttatctgtagtcagagctaaggattttaatgaggccacacaactgataaacgaccatgaatttggaaatggtacaagtatttatactagagatggagatgtaggtagaacttttgcaagcaaaattaaagttggcatggttggaataaatattcctatccctgtgccagttgcctttcatagctttggtggttggaaaagatcattattcggagaccagcatatgcatggtcctgaaggagtaagattttatacaaaattaaaaacaataacttcaagatggccctctggtgttagatctaacccagaatttgtaatgcctacaatgaagtaaa

SEQ ID NO: 199430 - DNA, 832 bp, Unknown
  Bacterial polypeptide expressing nucleotide sequence isolated from the Sargasso Sea
tatgaataatgtaaccttgcttgcagttccgttatttatttttatgggaactattcttgagaaatcaggtattgctgcaaatatgttgaaaaatatggcattagcttttagaagtgttaagggcggtttgtctatttcaattattgtagttggggctttgcttgctgcaagtacaggaatcgttggagcgacggttgtaactatgggattgatgtctctccccattcttattaatcaaggatacgataaaagcttctctgcgggactagttgcatcaactggaacacttggacaaattattccaccatccattgcattagttttgcttggcgatgttatgtctaatgcctatcaaagagctcagaatgatatgggaattttttcacagcaaacagttactgttggagatttatttattggatcaatagtgcctggtgcattaatttgtattggctatctcatctatactatttataagaaccaaacaaaccaaaatattaacgaccatgctattgattctaaaattaatataattaatttatttaaaactctagctctgccattcttgttaatttttttagtactaggttcaatctttgctggaatagctaccccaactgaagctgcagcaattggagcatttggtgcattaattattgcattggtaaatggaaaaattacttttgcatttattaaagagtcttcagaaaagacagcaatagtgtcaacaatgatatttacaattctaattggtgcctcaatcttttcattaatctttagaggagttggaggagatgaattgataaacctaattttcggctctattcctggt

SEQ ID NO: 199431 - DNA, 936 bp, Unknown
  Bacterial polypeptide expressing nucleotide sequence isolated from the Sargasso Sea
tagtcttccggaggtatgtggcagagtttgtccgcaagataggctttgtgaaggcgcttgcacattgaacgatggatttggtgctgtaactattgggtccattgaaaagtatataactgataaagcttttgagatgggatggaggccagatttatcaaacagatcatggtctgggaaaaaagttgcaattataggagctggtcctgccggactgtcatgtgctgatgttctaacaagagctggagttaagagtcatgtatttgataagcatgaggaaattggtggtttgttaacttttggtataccagaatttaaacttgaaaaaagtgtagttaaaaaaaggagaatggttcttgaagaaatgggagtgaaattcttcttaggtaaggaaataggtactgatataaggttcaaagatatctataaagattatgatgctgtctttttaggtatgggcacatatacatcgcttgagggcggttttaagggtgaaaaacttctaaacgttcacaaagcaatcgactatttagttgaaagcaataaaaaacttcttggaattaatcaaaaaaaagattcctttatcgatttaaaaggaaaggatgtcgttattcttggtggtggagatactgctatggactgtaacaggactgctatcaggcaaggagccaagtcagttacatgtatttacagaagagatgaggataatatgccaggatctagaaaggaagtaatcaatgctaaagaggaaggggtaaattttgtttttaatagccaaccaatagaaatattaggaaatgataaggttgaagctattaaaactatatctaccaggcttgccgatccagaccataacggtaggcgagtaccaataccgattacaaattcagaaaaaatctttaatgcagatgcagtgattgttgcttttggctttcgtgc

SEQ ID NO: 199432 - DNA, 673 bp, Unknown
  Bacterial polypeptide expressing nucleotide sequence isolated from the Sargasso Sea
attgttcgagccacctcacgaacaattagatgcttggaaaaatctatctgatgaagaaaaaatagaattcgacagacacgaaacagctgaactcctatgtcagtttttacatggcgaacagggtgcgttattagttgcctcacaaattgcaagctgtgcaccaacatacaatgcaaaactttatgctgcttcacaaacttttgatgaagcaagacacgttgaagttttcaacagatatcttcaggaaaaaataggttttcattatcctgttaatgcaaacttaaaagctttgcttgataaaattttgactgacgaaagatgggaccttaagtttattggtatgcaagtaattatagaaggtcttgctttagctgcttttacaaacttaaaactagatactaattgcgtacttctcaaacaactacttcattatgtaatcagagatgaagccagacatgtcaccttcgggattaattatcttgaagaatatataaaaactttaagtccagaggaagtagaagacagagcacagtttgcctatgaagcatgtgtcatttcaagagatagaattattaacaccactgctatgcagaaatttttgaaaatgtctcctgaggaagctaggcaatttactttagaatcaggagccatggaaacttttagaaatttctta

SEQ ID NO: 199433 - DNA, 904 bp, Unknown
  Bacterial polypeptide expressing nucleotide sequence isolated from the Sargasso Sea
gtttttaatattgtaaatggagataaagaagttgttgatgctattttagaaaataaagatattccagctgtaagctttgttggatcaacacctattgcaaaatatatttatgaaaatgcagcaaagaatgaaaaaagagttcaagctttaggaggggccaaaaatcactgtgtagttatgccggattgtgatttggaccaagctgtaaatggattaatgggagctgcatatggatctgctggagagaggtgcatggctcaatcagtagcagttgctgtagggaatattggtgatgatttagttaatcaaatgtctaaaaaagttgaggcacttaaagtgggacctggtatggataaatcatctgaaatgggacctttggttaccaaagaacatttagaaagagtaaaaggatatgttgatttaggagtaaaagaaggcgcaaaacttgttgtagatggcagagatattaatcttcaaggttatgagaatggttattatataggcggatgtttatttgatcatgtcaaaaaagatatgagaatatataaagaagaaatttttggacctgttttatctgtagtgagagttaaaaattttgatgaagcgcttcaacttataaatgaccacgaatttggaaacggaacaagtatttatacaagagatggagatgtaggaagaacctttgcaaataaaataaaagttgggatggtaggaattaatatacctattccagtcccggttgcttatcatagttttggtggttggaagaggtcattatttggagatcaacatatgcatggcccagaaggtgtaaggttttatactaaattaaaaactattacctcaaggtggccatctggagttaggtcaaatcctgaatttgttatgccagtgatgaagtgat

SEQ ID NO: 199434 - DNA, 703 bp, Unknown
  Bacterial polypeptide expressing nucleotide sequence isolated from the Sargasso Sea
actggatacgaagttgcaatattaactgtggatgttccagtgctatccaggagaactagagatgataaaaatggtttctcttatccttttaagattggtccaaaacaattttttgattttgcaacgcaccctacctggtctttatcaactttactaagcggtattcctaaaccaatgaactatgtaacatctaaaagtggagacggtatttttaaaagaaaagaaagtagaggttctacagattgggatactcttaaaagagtgagagataaatggaagggtaaacttataattaaaggagtaatgtctcctgacgatgcaacaaaaattaagggtgctggtgctgatgcaattcaagtttcaaatcatggaggaagacaattagatagcgctacagcagcaataaatatgcttccactaatcagaaaatcagttggaagtgattttcctctaatctttgatagtggaataagaagtggaagtgatatagtgagagcgcttgcatttggtgctgattatacaatgattggcagacctttaatgtatgcaatgggagctgatggaaaaaaaggattaaggagaattgtggaaataattaaagaagaagctagcactactcttgggttagtaggattaaatgatattaatgatgtaacttctaatatagtaatagataatactttgaataaggtaaattactaaa

SEQ ID NO: 199435 - DNA, 658 bp, Unknown
  Bacterial polypeptide expressing nucleotide sequence isolated from the Sargasso Sea
atgaagtccccggcttacaacgagtgggccagggagatgaccaaggcggaaatggacgaggtatccgatgcctttgcacagactgccatcagctccaaggcagccgggtttgatggcgtggagctgcactattcccacggttatctgcatcagcagttcctgtcctttgtctacaacaagcgtaccgatgagtacggtggcagtctggacaatatcgttcgttttccgatcgaaaccctggagcgcgtgcgagcggcggtgggtccggattttgttatcggtattcgcgtgtcgatggatgaatgtacggtcgatggcatgcatgccgatgatgcgatcgagatgaccaagcgcatggtcgcgaccggcctggttgattatgtcagcgccaccgccggcacctacgccgcccatgccgatcagattccacccggtgactatgaggaaaactggctggtcgccgatggcgcaagaatgcgcaaagcaattcgcgaggttcgcgatatcccgatgtttatcgttggtcatatcgtcgatgcggataaggccgaggccttagttgcctcgggggccaccgacatggtggccatgacccgcacacagattgccgatccgcactttgccaacaagctgcgcgaaggacgcgaggatgaaatca

SEQ ID NO: 199436 - DNA, 378 bp, Unknown
  Bacterial polypeptide expressing nucleotide sequence isolated from the Sargasso Sea
aaaaggatatgagaatatataaagaagaaatatttgggcctgttttatcaatagtgagagttaaaaattttgatgaagcacttcaacttataaatgaccatgagtttggaaatggtacaagtatttatactagagatggggatgtaggcagaacttttgcaaataaaataaaagttggaatggttggaataaatatccctataccagtaccagttgcctatcatagttttggaggttggaagagatcattatttggagaccaacacatgcatggcccagaaggtgtaaggttctacactaagttaaaaactattacttcaaggtggccatccggtgttaggtctaatcctgaatttgttatgccggtgatgaagtaat

SEQ ID NO: 199437 - DNA, 749 bp, Unknown
  Bacterial polypeptide expressing nucleotide sequence isolated from the Sargasso Sea
gaatgtcaaatattttgatttaataaataaaaaagtttttataagtggaggagctgatggcataggttcttcaatagttgagaatttttgtgaacaaggagccgaagtaatatttgttgatataaatatgataaaagcaaatgaattaattaaaaatattaaaaataaaaaatttaacttaccaaaattttttaagtgtaatgttttagatataaaaaaattacaaaatattattcataaaaatggtccttttgacgttttggtgaataatgctggtaatgatcaaagacactcaattcatgagattacagagaaatattacaaaaatagatttgatacaaatttaaaacattattttttttctgcaaaagctgcaaaaaaaggtatgataaaaaataacggtggctcaataattaatctatcatcaatatgttggattagaggtgcgccaggatttattttatactcatcagctaaatcggcaatttttggattaacaagatctctagctaaagaattaggtaaatataatattagagtaaattcaatatcaccgggatcaattgcaacagaaagacaagttaaattatggttgaagcctaaattaaaaaaagaaattaaatcacttcaatcattaaataaacaacttatgccgaaagatgtatccaacatggtcttgtatcttgcttcagacgtctcttcgggatgcacaaaacaaaattttattgtagatgctggaataacttaat

SEQ ID NO: 199438 - DNA, 108 bp, Unknown
  Bacterial polypeptide expressing nucleotide sequence isolated from the Sargasso Sea
ggcgtatcgatgtgctcgtgaacaacgcaggtggcgtgctggggacaggtaggaaagccagccgaagtggtttcagtttcggagtgggaagcgatcgtagctgttaat

SEQ ID NO: 199439 - DNA, 277 bp, Unknown
  Bacterial polypeptide expressing nucleotide sequence isolated from the Sargasso Sea
tttgcagatacttgtagtaagtttcttacttcccatccaaaaattaataaaatagcatttacgggaggtgtccatacagcaaaacatattgttagaaactctgcagaaaatttatcgcaaatatctttagaacttggtggaaaaagtccagtggttgtttttaaagatgctcgaaaagataatgcaattaatggaattatggcaagtatatttggagctagtggtcaaagttgtattgctcggttccagactttatttgcaagaagatatttataat

SEQ ID NO: 199440 - DNA, 850 bp, Unknown
  Bacterial polypeptide expressing nucleotide sequence isolated from the Sargasso Sea
ccttgtggtaaaagtttaactacgcacaatctagttgaaaaagttgcatttactggaggtcctgaaacagcgagacatataattagaaactctgctgaaaatttatctgaagtaagtttggaattaggtggaaaaagcccagttgcagtatttgatgatgcagaacaagaaaatgcaataaatggaattactgcaggtatattcggtgcaagtggacaaagttgtatagcaggatcaagactttatttgcaaaaaggaatttacgatgaatttttaaataagctttcaaatcgtgcatcaaaaataaaaattggagcaccaatggatccagaaacagagatggggcctttaagtaattttaagcaattagaggtaatagaaaaaaatattaaagatacaattaatcaaggtggaaaaattaagtgtgggggtgaaagacattccttttcaaataaaggatattactttcctccaacaattatagaatgtgataatcacaacctaccagtagcagaaaatgaattatttggacctgtattatcagtaatgaaatttgatacagaagaagaagtcatttcgaaaatgaacgataatcagtatggattatcctctggtgtttatacaagtaatttatccagggggatgagagtctcaaaagcaattagggcaggaattacctttgtaaacacttatagactaatttcaccttcggccccatttggaggtatcaaagatagtgggtatggaaaagaagctggaattgactcaataaaagactacacaagggtaaaaacaacatggttctatacctctgacgaaccttctctagaccctttctcaataagataat

SEQ ID NO: 199441 - DNA, 238 bp, Unknown
  Bacterial polypeptide expressing nucleotide sequence isolated from the Sargasso Sea
tgaatataaaaatctaatagagcaagctgtagttactatgaactctgctctgaatagaaaagagagccgtggagcacacgcaagagaagattacaaagaaagagatgataagaattggatgaagcatactctatcttggttagatgataaatcttgtaaaatagattatagatctgttcatgaatatacactttcaaacgaagtcaaatacattgaacctaaggcaagggtgtattaa

SEQ ID NO: 199442 - DNA, 520 bp, Unknown
  Bacterial polypeptide expressing nucleotide sequence isolated from the Sargasso Sea
aatgtcgaaacatccacttcaatatcttgaattaccccgcaaggatcctgaaaaggatattcctgaggttcgtataaaacactatgatgaaatttatgcatcctatgatggagcagaagccgcatctcaagctggcagatgcatttcttgtggtattccttactgtgaatggaaatgccctgttcataattacatcccaaactggcttgaactgatagaggaggggaaactatttgaagctgctgaattatctcatcagacgaattcgctccctgagatatgtggaagagtttgtcctcaagatagattatgtgaggatgcatgcacacttaataatggagttggagctgtcagtattggcaatattgaaaaatacataacagacgaagccattaagcagggttggcgccctaatatggaacatgtaaaagacacgggaaaaaaagtagcaatcattggagccggtccagctggattatcagctgcagatgtcctagcgagggctggcataagacccgtt

SEQ ID NO: 199443 - DNA, 529 bp, Unknown
  Bacterial polypeptide expressing nucleotide sequence isolated from the Sargasso Sea
gatgaattatgtaacatctaaaagtggagatggtatttttaaaagaaaagaaagtagaggctctacagattgggatacactaaaaagagtaagagataaatggaaaggtaaacttataattaaaggagtaatgtctcctgacgatgcagtaaaaattaaggaagctggtgctgatgcaatacaagtttcaaatcatggaggtagacaattagatagcgctacagcagcaataaatatgcttccactaatcagaaaatcagtaggaaacgattttcctttaatctttgatagtggaataagaagtggaagtgatatcgtgagagcgcttgcatttggcgcggattatgcaatgattggtaggcccgtaatgtatgcaatgggagctgatggtagaaaaggattaaggagaattgtggaaataattaaagaagaagccagcacgacactcgggttagtaggattaaatgatattaatgatgtaacttctaatatagtaatagatagtactgttaataaggtaaattactaa

SEQ ID NO: 199444 - DNA, 594 bp, Unknown
  Bacterial polypeptide expressing nucleotide sequence isolated from the Sargasso Sea
tagccaaaaaagttgaaacattaaaagtcggcccagggttagataaaaaatcagagatgggacctttagttacaaaagaacatttggacaaagtaaaaggatatgtagaccttggcattaaagaaggtgcaaaattagttgttgatggtcgaaatctaaaacttcaaggatacgaaaaaggtttttatatgggtggatgcctatttgataatgtaaaaaaggatatgagaatttataaagaagagatatttggaccagtgttatctgttgttagagcaaacgattataaagaagccctaagtctggtcaatgaccatgaatttggaaacggtgtaagcatttttacacgtgatggagatacggggagatcattctcaagtaatgcaaaaattggaatggttggtataaatattccaattccagttcccatggcttttcatagcttcggcgggtggaagagatctctttttggtgaccaacacattcacggtccagaaggagtaagattttatacaaagttaaaaacaattacatcaagatggccttctggaatcaaatccgacccagaatttgttatgcctacaatgaaataaa

SEQ ID NO: 199445 - DNA, 523 bp, Unknown
  Bacterial polypeptide expressing nucleotide sequence isolated from the Sargasso Sea
atgtatcttcaaaaaataaatcttaaaaataaatatgctttagtcactggtgcaggcaaaggacttggtagagcatgttcaatagcattagctgaggctggtgcaactgtgatagctttaagcagaacttcctcggatctaaataaattagaaaaggatataaaaaaagttaaaggtaaaattattaaagtttcatgcgatgtaatgaactatgatgatttaaaacaaaaattagataaaattaaaattattgatgtattagtaaataatgctggaactaacattccagaaccctttgaaaaaatcaaacaaaaaagtatgaattatctagtagatttaaatctaaaagctgcatttaacgtagcacaactggttgtaaaaaaaatgcttaaaaataaaaaaagatctggctcaattataaatatgtcatcacagcttggtcatgttggtatgggtggtagaaacgtatataatatgacaaaatttggtatcgaaggggttaaccaaaagggatgggtgtaga

SEQ ID NO: 199446 - DNA, 892 bp, Unknown
  Bacterial polypeptide expressing nucleotide sequence isolated from the Sargasso Sea
attgttcgagccacctcatgaacaattagatgcttggaaaaatctatctgatgaagaaaaaatagagtttgatagacacgaaacggctgaactcctatgtcagtttttgcatggagaacagggtgcgttattagttgcctcacaaattgcaagttgtgcaccaacatacaatgcaaaactttatgctgcttcacaaacttttgatgaagcaagacacgttgaagttttcaacagatatcttcaggaaaaaataggtttccattatcctgttaatgcaaacttaaaagctttgcttgataaaattttgactgatgaaagatgggaccttaagtttattggtatgcaagtaattattgaaggtcttgccttggccgcatttactaacttaaaactagatactaattgcgtacttctgaaacaactacttcattatgtaatcagagatgaagccagacatgtcaccttcgggattaattatctagaagaatatataaaaactttaagtccagaagaagtagaagacagagcacagtttgcatacgaagcatgtgtcatttcaagagatagaattattaacaccactgctatgcagaaatttttgaaaatgtctcctgaggaagctaggcaatttactttagaatcaggagccatggaaacttttagaaacttcttattctcaagagtcatgcctaatttatcaaaaattggtcttttgacagactctatcagaccaaaatatgaagaattaggtttacttgaatatgaaaatgctcctagtgattttgaaattgattgggctgagataacaaaacctctcgaaagctcagagcaaatcgtcaaagaatcaaacgagcaagctaaggctgtagcagaaatgctaaaacaagcttaa

SEQ ID NO: 199447 - DNA, 565 bp, Unknown
  Bacterial polypeptide expressing nucleotide sequence isolated from the Sargasso Sea
catgaaaatttactttcttggaatttctggcacatttatgggtaaccttgctcaaatagctaaggctatgggccatgaagtctttggttgtgatagcaaggtttatccaccaatgtcagatgaattgagaaaaagtggtattaatttttttcaaggttatgaagaaaaaaacgttgttgatgctgatatttatgtcataggtaatgctatttcgaaggaaaataatctgctcagagaaattttgaaattagaaaaaaaaattatatcagggcctaagtggttatatgaaaatatactgtcaaacaaaaaagtaattgctgtatctggtacgcacggtaaaacaactgtaacttccatgattgctcatgcgctagttaataataattttgatccaaattttttaatagcaggcattccaaagaaattaaagaaatcatggaacataagtaatgatgaggtatttgttattgaagcagatgaatatgatacctgttattttgataaacgcccaaaattctttcattacagacctaacattttattaataaataatattgagttcgat

SEQ ID NO: 199448 - DNA, 541 bp, Unknown
  Bacterial polypeptide expressing nucleotide sequence isolated from the Sargasso Sea
atgttaaaaagttcagcgaaaaaagagtaccgagagaaaataaaacaatataaaaaatacaataaaaaatactttgaagatagcgctccaatagtatcagatcaagattttgatttattgaaaagagaaattctggatctcgaaaaaaagtttgattttcaagataaagactcgccttcaagaacactaggtttttcaccttcgaaaaactttgaaaaatatccccacagagtaaaaatgctttctttggcaaatgcttttaatgaagaggatttgataaattttgaaaaaaaaattgtaaactttttgaatttacaaaaaaattttgaatttgaatatagtgctgaaccgaaaattgatggtatatcagcctctcttacatataagtctggcaaattagttagaggattatcaagaggtaacggagaagagggagaggatataactttaaatttaaaaacaatatctgacattccactttttataaagcaaaaagattttcctgaagatatcgatataagaggggaggttttcatcaaaa

SEQ ID NO: 199449 - DNA, 854 bp, Unknown
  Bacterial polypeptide expressing nucleotide sequence isolated from the Sargasso Sea
gatgtttccaatggcaattgcttgtggaaatacttttattttaaaaccatcagagaaagatccgtcgtgctcaatgagattagctgagctcttcaaagaagccggacttcctgatggagttttaaatgttgtaaacggagataaagaagtagttgatgcaattttagaaaataaagatatctcagccgtaagctttgttggttcaacaccaatagcaaaatacatttatgaaaatgctgcaaagaatgaaaaaagagttcaagctctaggaggtgctaaaaaccattgtgttgtaatgcctgactgtgatttagatcaagctgtaaatggattaatgggagcagcttatggttcggctggcgaaagatgtatggctcaatcagttgcggttgcggtaggaaatattggagataagttggttgaacaactttcaaaaaaagttgaagcattaaaaataggacctggaatggataaaacttcagaaatgggtcctttgataactaaagaacatttagaaaaagtaaaaggttatgttgattttggtgttaaagagggagccaaattagttgtagatggaagaaatataaagctacaaggatatgaagatggatattatattggtggctgtctatttgatgaagtaaaaaaaaatatgagaatttataaagaggaaatatttggacctgtattgtcagttgtaagagtaaaagattttaatgaggctttaaaattaataaacgaccatgagtttggaaatggaacaagcatctatacaagagatggtgatgttggcagaactttttgcacacaaataaaagttgggatggtaggtatttatatcccaattcccagtc

SEQ ID NO: 199450 - DNA, 468 bp, Unknown
  Bacterial polypeptide expressing nucleotide sequence isolated from the Sargasso Sea
gagcaaaacttgttcttgatggaagaaatttgaaattacagggatatgaaaatggattttatattggtgggtgtctttttgatcatgtgactgctgatatgagaatttataaagaggaaatatttggaccagttttatctgttgttagggtaaaaacatttgaagaggctacaaaaatgattaatgaccacgaatacggaaatggagttagcatttatactagagatggagatgcaggtagaacattcgcaagtaaaattcaagttggaatggtagggataaatgttccaataccagttccaatggctttccatagttttggaggatggaaaaggtcattatttggagatagtggaacgcatggtatggaaggtgtaaaattttatactaaattaaaaactattacttctagatggccatcaggaattagatctaatcctgaatttattatgccaacaatgaaataaa

SEQ ID NO: 199451 - DNA, 589 bp, Unknown
  Bacterial polypeptide expressing nucleotide sequence isolated from the Sargasso Sea
aaaaaaagctgaagcattaaaaattggacccggaatggataaatcatctgatatgggccctttagtaaccaaagaacatttagaaaaagtaaaaggctatgtagatctaggagttaaagagggagcaaaacttgttcttgatggaagaaatttgaaattacagggatatgaaaatggtttttatattggtgggtgtctttttgatcatgtgactactgatatgagaatttataaagaggaaatatttggaccagttttatctgttgttagggtaaaaacatttgaagaggctacaaaaatgattaatgagcacgaatatggaaatggagttagcatttatactagagatggagatgcaggtagaacattcgcaagtaaaattcaagttggaatggtagggataaatgttccaataccagttccaatggctttccatagttttggaggatggaaaaggtcattatttggagatagtggaacgcatggtatggaaggtgtaaaattttatactaaattaaaaactattacttctagatggccatcaggaattagatctaatcctgaatttatcatgccaacaatgaaataa

SEQ ID NO: 199452 - DNA, 791 bp, Unknown
  Bacterial polypeptide expressing nucleotide sequence isolated from the Sargasso Sea
aatgtttaaaaaaatcattttaataacattactatttggaattgttttttcacaagaaaaacagaaagtggtgctaattactggtactgctttggggatcggaaaatcaacagctgaatatttaattgataaaggccatattgtatatggaggtgatattctgattgaggaaaatctttacttaaatgatattggaggaactgcattagaaatggatgttactaatcaaaaccatattgataatgctgtaacacaaattatatctgaacatggtagaatagatgttttagttaataatgctggtttaggtgtttatggtgcaatagaagatgtttctatggaggatatatattatcaatatgatgtaaatctttttggattagccagagttacaaaagcagttttaccatacatgagagataaagaaagcggtttaattatcaatattagctctgtactaggagagacttatggtcctttagccggatggtatctctcaacaaaacatgctttagaaggatggtctgatgcactaagagttgagctaaaaaagtttagtatcgatgtagtcattgttcaacctggggcaataaatacaaatttttcaaatgtaaccaaaacttacattgataaatatcgagagaactctccatatcaacacctttatggtgagccaataactgataccggaaatgatgttttatctaaccagtctgatccaatagttattgcaaaagtaattaataaagcaattgatgctagaaatccaaaaactagatacgctgctggtg

SEQ ID NO: 199453 - DNA, 600 bp, Unknown
  Bacterial polypeptide expressing nucleotide sequence isolated from the Sargasso Sea
cttgcagttcaacttctcgtgttctagtaaataaaaaagttaaagatgaatttctcaaatcactagttaaaaaagcaaaaagtatacctattggattaccgtggattgagacaaatgaaataggaccgattgtatctaaaaatcaatttgaaggagttatgagctatattaaatctggaattgatcagggagcaaaactacttttaggtggagatcaaaacaaatctggtgatcttaaaaatggattttttgttaacgcaactattttttgtgatgttaagccagatatgaaaattgcaaaagaagaaattttcggacctgttatatctgtcatagattgggatgattatgatgaaatggtaaaaattgctaattccactcaatatggtctaacaacaatgattgtaacaaactcattgtcaaatgcaatgaaaaccgcggaagatgctgaagttggatatgtttgggtaaatactgctggtagatattcaggtgcaccttacggtggttggaagcttagcggtattggagttgaagaatgctttgacgaaatgaaaagttatgcacggctaaaaaatataaatatgaaatggaattagt

SEQ ID NO: 199454 - DNA, 363 bp, Unknown
  Bacterial polypeptide expressing nucleotide sequence isolated from the Sargasso Sea
attactttggtgtatatagaaatgaaaaacttatgaaagaaggaatttcaaaacttgaagaaattactaatagaaccaaaaaaattcatttaatggataaatcaaatcaattcaattctgaaagagttgaagtcctagagtatttaaatcttctagatattgctaatgctactgcatattctgctctggaaagaaaagagagcagaggagcacatgcaagagaagatttcccagaaagagatgatcaaaactggctgtgccattcactatttttcaaagaaaaaaatgttgtttcaaaaagagaagtaaatttatctccaaagacaatggacgcatttaaaccaaaggcaagggtatattaat

SEQ ID NO: 199455 - DNA, 871 bp, Unknown
  Bacterial polypeptide expressing nucleotide sequence isolated from the Sargasso Sea
atgagtcaaaccgttagatcacctcatggagttgttggacttattgttccagcaaatactcctattgcaaatattgcttggaaaatatttccagctttaatatgtggaaatactattgttttaaaatcttcagaagactctccatcaattgcaaatatgatcgcaaagattacaaaagaagcagagcttccagacggtgttttaaatgttattcagggtgacggtgaaagtggaaccgcattggtagaaaatgaaaatgtttctttaattagtttcactggatctactagcgtaggtaaattaattgcacaaaacgctggcaaaagactagcaagagtgtcactagagttaggcggtaaaaattcgtttgttgtttgtgatgatgctgatattaatcatgcagttaactgggcggcattatctgttttcagtaatgcaggacaaagatgtgctgctacaagtaggattcttgtatttgaatcaatatatgaagattttgctagtaaattagtcgataaagcaaagagtttaaagcttggtgtttctgatgaaagcgatcttggtcccgtagtcaatagaagacagtatgaaaatattcttaaagccattgatgaagcaaaagaaagaggaggcaaaattctttgtggtggaaattgtaatgatgattctctaaaagatggttactatatttcacctactttaatttcaaatttgccccataatgatgacctaaatagaaaggaaatttttggtccagttgcgacaatacaaatcataagtgatttagaagaggctttaaaaattgcaaatgattcaaaatatggattaaccgcagctattcacactcagaatattaatagagcactatggt

SEQ ID NO: 199456 - DNA, 856 bp, Unknown
  Bacterial polypeptide expressing nucleotide sequence isolated from the Sargasso Sea
actaacaaagatatttccgcagttagttttgttggttcaacacctattgctaaatacatttacgaaaattgtgcaaaaaacgagaagagagttcaagcattaggaggtgcaaaaaatcattgtgtggtgatgccagattgtgatttagagcaagcagttaatggtttgatgggagcagcctacgggtctgctggtgaaagatgtatggcacaatcagttgctgtggcagtaggaaagattgccgaccctttagtagaaagtctttctaaaaaagttgagtctcttaaagttggtccaggattagacaagaaatctcaaatgggaccattagttacgaaggagcatttagaaaaagtgaaaggatacgttgacattggagttaaagagggagcaaagctagtagtagatgggagaaatctaaaacttcaaggttacgaaaatggtttttatatgggcggatgtttatttgataatgttaaaaaagatatgaggatttataaagaagaaatttttggacctgtactttctgttgttagagcaaaagattacagtgaagcattatctttagtaaatgatcatgaatttggaaatggcacaagtatattcacaagagacggagatactgggagatcattcgccagcaacgtaaaaattggaatggttggtattaacataccaataccagttccaatggcttttcacagttttggtggatggaaaagatctttatttggagatcagagtatacatggacctgaaggtgttaggttttatacaaaattaaaaacagttacatctagatggccatcaggaattaaatcagacccagaatttgtgatgcctacaatgaaataac

SEQ ID NO: 199457 - DNA, 637 bp, Unknown
  Bacterial polypeptide expressing nucleotide sequence isolated from the Sargasso Sea
agcagtagcggtaggagacataggtgatgagttagtcttaagactatcaaaaaaagctgaagcattaaaaattggccccggtatggataaatcatctgagatgggccctttagtaaccaaagaacatttagaaaaagtaaaaggttatgtagatctaggagttaaagagggagcaaaacttgttcttgatggaagaaatttgaaattacagggatatgaaaatggtttttatattggagggtgtctttttgatcatgtgactactgatatgagaatttataaagaggaaatatttggaccagttttatctgttgttagggtaaaaacatttgaagaggctacaaaaatgattaatgagcacgaatacggaaatggagttagcatttatactagagatggagatgcaggtagaacatttgcaagtaaaattcaagttggaatggtagggataaatgttccaataccagttccaatggctttccatagttttggaggatggaaaaggtcattatttggagatagtggaacgcatggtatggaaggtgtaaaattttatactaaattaaaaactattacttctagatggccatcaggaattagatctaatcctgaatttattatgccaacaatgaaataa

SEQ ID NO: 199458 - DNA, 607 bp, Unknown
  Bacterial polypeptide expressing nucleotide sequence isolated from the Sargasso Sea
acgacatcatttttcgctcaagcaattcataatgctgaagtcccaaaaggcttaataaatatagtcactggttatggaagtgaagctggagctgcgctaactgcccatccggacgttgctcaaataacttttactggatctgttaaaactggaaaagcaattttacatgctgccgctgaaagagccgtgcctgctgttgttgagttgggaggaaaatctgctgctgttgttttaccagatgcagatattgataaagttgttaatgcgaccaaggttggaatttttagtcaagctggacaaatttgttctgcaatgtcgagaatgatagttcataagtctataaaggatgaagtgctcgagaaattatcaaagttagcagcttcgataaaagtaggccctggtgatgaagaaggtgttgatctaacacctgtaatatctgaggaacagctccaaaaagtagaaaattatgcgcgttcaggtttgcaagctggcgctaaagcagtctcaggtggcaaccgagttgatagaaaaggtttcttctttgaacccacaatttattcagatgttaagcccgatatgacaattgcacaggaagaaatttttggac

SEQ ID NO: 199459 - DNA, 382 bp, Unknown
  Bacterial polypeptide expressing nucleotide sequence isolated from the Sargasso Sea
catgttaattcaaaaatgaaaatttataaggaagaaatttttggaccagtattgagtgtagtaagagcgaaaaattatgaagaggcactaaatttggtaaataatcatcaatttggtaatggcactagtatttatacatctgatggagaaatatctagacatttcactactaatgcaaaaataggaatggttggtgtaaatgttcctataccagttcctatggcatttcacagttttggaggttggaaagattcattgtttggtgatcattccatgcatggaatggaaggaattaatttttttactaaattgaaaaccattacaagcagatggccaaaaagtattaaatctggtccagaatttgtaataccaactaactaat

SEQ ID NO: 199460 - DNA, 823 bp, Unknown
  Bacterial polypeptide expressing nucleotide sequence isolated from the Sargasso Sea
ccggtgcccccaatgttcgcgcctttacagctgcggggaatgcggttgtccaaccgggtcgtagtctcgcccatgtgccaatactgtgcgaccgacggaaacccggacgactggcacttcagtcattacaccagccgcgccatgggcggagcgggtctggtttttaccgaaatgacctgtgtgtcgcctgatgcacgtataactcctggatgtgttggaatctggaccgacgaacaagaagctgagtggaagcgtatcgtcgattttgcccatcaacgcaccgatgccaaaatggcaatgcaaatcggtcatgccggccgaaaaggcgcgaccaaacttgcttgggaagggatcgaccagccgctcgaagagggggcatgggaaatcatcgctgcgtcgccgttgccgtatctgcccaattctgttgtgcccaaagaaatgaaccgtgatgacatggaccgggtgaaagccgatttcgtctccgccttccaacgagcagcgcgcgccgggttcgacatggcggagctgcattgtgcccacggctatgtgctggcgacgttcctttcgccgttcaccaacaagcgtacggatgaatacggtggatcgatcgataaccggatgcgttttccgctggaggtgttcgatgcctgccgcgcagtatggccgaaagaacgtccgatgtcggttcgaatttccgccaccgactgggtcgagggcggcaccaccgcggatgacgcggtccaattcgcaaaggcgttcaaggcgcacggctgcgatttaatcaatgtgtcgaccggtcagacggatgccacggagaggcccg

SEQ ID NO: 199461 - DNA, 554 bp, Unknown
  Bacterial polypeptide expressing nucleotide sequence isolated from the Sargasso Sea
agacaaaagtattgaaatgggtcctttgataacaaaggagcatttaaagaaggtcaaagactatgttgaagttggaaagaaggaaggtgcgaaattaattgtagatggatcagaaataaaactacaaggttatgaacaaggtttcttcatgggcggttgtttgtttgatcatgttaaaactaatatgaaaatatataacgaggaaatttttggtcctgttctttcaattgtaagagtaaaagattttgaagaggcaataaaaattatcaatgaccacgaatacggtaatggagtaagtatctttactagagatggcgatgcagcaaggtcattttcaagtagaataaaggtaggaatggttggaattaatattcctatacctgttcctatggcttttcatagttttggaggttggaaaagatcattattcggcgatcatcatatgcacggaatggaaggtataaggttttacacaaaattaaagacaataacatctaggtggcccacaggtataaaagataataacaatttcacgatgccaacaatgaaatagt

SEQ ID NO: 199462 - DNA, 610 bp, Unknown
  Bacterial polypeptide expressing nucleotide sequence isolated from the Sargasso Sea
atgtacgatttaggcctaaaagataaagtaatattaatcactggtggaagtgatggtttgggttacgcatcagctgaattattatcatctgaagaagcacatgttgtaatttgtggaagaagaggtgattatttaaacgaaaaagctaaaataattacagaaaaaacaggtaatcaagttatcccaattaaagcagatgtaagtattgcagaagattgtaaaaaactagttgaggaaactatcgctaggttcaagaaaattgacgtattagtaaataatgctggagcatctgctgctgcaatttttgaggatgtgactgatagaaactgggaagatgatataaatctaaaattaatgtctacgataagaatgtgtcgtttagcaataccttatatgaaatcaagtaatggtggagttataataaatgccacaattggaggcggaaaagcccctaacgctggatcattaccaactactgttactagagctgctggtataaacttgacaaaatctcttgctaatcaatatgcaaaagatcaaataagagataacacaatatgtattggactaattaaaagtgcgcaatgggaacgtagagctgatcaggaag

SEQ ID NO: 199463 - DNA, 815 bp, Unknown
  Bacterial polypeptide expressing nucleotide sequence isolated from the Sargasso Sea
gtttttacagcacaaaacttgctcctgctctagctatggggaaacaccggttgtaattaaatcctctgagcttgcccctgctgtgatgtttgaatttgcaaaacttatagaagaaactggtattccaaaaggagtggtaaatgtgattacggggtttggagatccatgtggtaaagctttaaccacacatgacttagttgagaaagttgcctttacaggtgggcctgaaaccgcaaggcatattattagaaactctgcagaaaacttatctgaggttagtttagaattaggaggaaaaagtccagttgcggtatttgatgatgcccatcaagaaaatgctattaatggtattactgcaggtatttttggtgctagtggacaaagttgtattgcaggttctaggctatatttgcaaaaaggaatttatgatgagtttattgataaactcataaaaagagctgaaaaaataaaaataggtgcacctatggatcctgagactgaaatgggtcctttaagtaactttaaacaacttgaaattattgaaaaaaatataaaaaaaacagttgaacaaggtggaaaaataaaatgtggaggcaaaagacatcctttttctaatgacgggtattattttcctccaactataattgaatgcgataatcataaccttccaactgctgaaaacgaattgtttggtccagttttatctgttatgaaatttaatgatgaaaaagaagtcatagaaaaaatgaatgataatcaatatggattatcctcaggagtttatactagcgactttgctagaggcttaagagtat

SEQ ID NO: 199464 - DNA, 379 bp, Unknown
  Bacterial polypeptide expressing nucleotide sequence isolated from the Sargasso Sea
aaaaaaaatatgagaatttataaagaagaaatatttggaccggttctttcagttgtaagagcaaaaaattttgaagaagcgctatcgttggtaaatgatcatgagtttggaaacggtgtaagtatttttacgagagatggtgatgttggaagatctttctcaagtaaggcaaaaattggaatggttggaattaacatacctattccagttccgatggcattccatagttttggtggttggaaaagatctttatttggtgaccaacacatgcatggccctgagggtgtaagattttatactaaacttaaaaccatcacttcacgttggccagatggattaaaatcggatcctgaatttataatgccaactatgaaataaa

SEQ ID NO: 199465 - DNA, 709 bp, Unknown
  Bacterial polypeptide expressing nucleotide sequence isolated from the Sargasso Sea
actggtggacctgatgctgcgagacatattataaaaaattctgctgaaaatttatctcaggtaagtttagaactaggtggaaaaagtcccgtagcagtatttgaggatgctgaccaagaaaatgcattgaatggaattactgcaggtatatttggagcaagtggacaaagttgtattgcaggatcaagattatatttacaaaaaaatatttataatcagtttttagataaacttattaatcgtgcgaataaaataaaactgggtagcccaatggatcctagtactcaaatgggtccacttaatagtctaaaacaattagagataatagaaaaaaatataaaacttacagtcgaccaaggaggaaaaataaaatgcggaggtaaaaggcacactttatcaaataagggatactactttccagctacaataattgagtgtgataatcacaatcttccaacagctgagaacgaactttttggccccgtattatcagttatgaaatttgaaactgaaaaagaagtaattaataaaatgaatgataaccaatatggtttatcctctggagtttatacaaaagatttaggtaggggactgagagtttcaaaagcaatacgtgccggaataacatttgtaaatacttatagattaatatcaccttcagcaccttttggaggaatgaaagatagcggatatggtaaagaagcgggga

SEQ ID NO: 199466 - DNA, 618 bp, Unknown
  Bacterial polypeptide expressing nucleotide sequence isolated from the Sargasso Sea
tatgtatctcaaaaaaattaatttaaaaaacaaaacagcattagtcactggtgcagggaaaggtatcggaaaagcttgtgcaatcgctctcgctgaagctggagctgatttaattattattagcagaactcaaaaagatttggataaggtttctaaaattattaaaaaattcagatcaaaatgtatttcttatgtttgtgatgttaccaattataatcatataaaaaatataataaataagcaaaaaaaaattgatattttggttaataatgctggaacaaatattccagaacattttactaaagtgcaaaaaaaaaatatggaatatcttgtaaaattaaataccatttcaacctttcatttggctcaattatgtgcacttaaaatgttagaagctagaaatagaaaaaaaaccggaggttctattattaatatgtcttctcaaatggcgcacgttggtggaccaatcagaagcgtttataatatgacaaaggctggcttagaaggattaaccaaaggtatggcgattgacttagcaaagaataatattagggtaaatactgtatgcccaacttttgtggtaactccaatgactaaaaaatttttaaaaaacaaaaa

SEQ ID NO: 199467 - DNA, 628 bp, Unknown
  Bacterial polypeptide expressing nucleotide sequence isolated from the Sargasso Sea
tatcaaaggtatattcaagcctaatgcaggtcaaatatgtgttgctatgtctagagtaattgttcatcctaagattaaagatgaatatatgtcaaaacttgtatctaaaactaaatcattgaaaattggtggtggagaaaatcctgaaacagaagttacgcctttaatttctaaagatcaaatacaaagagtttctaattatgttaactctggaattcaatctggcgctaaacttgctttaggaggtcaaaaaatagaaaatgaaaaaggaaacttttatgaacctactatttttgagaatgtgaaaacagattcaacaattgcacaagaagaaatttttggaccagtaacatctgtatttgattttcaagaaccagaagaagcaattaaaattgcaaattcaacaaattatggtttagcctcaggtgttttcacttctgatgatcaaaaagcaaagtggagtgcagaaagaataaaagctgggataatttggcataatgattggtttgtggatggtgtaaatttaccaggaggtggttacaaaaaatctggctatggcagagatggtggtattgatggcatatatagtcatggacaaactaaaagaataagtaaaagattaacttaa

SEQ ID NO: 199468 - DNA, 749 bp, Unknown
  Bacterial polypeptide expressing nucleotide sequence isolated from the Sargasso Sea
gatgggcagactggaaggaaaagttgcgctgatcagtggagggtcgaagaaccaaggtgcggccgaagcaaaagtgttcacggcagaaggtgcgaaggtcgtcttcggtgatattgctgatcaagaaggtcgtatagttgaagctgaaattcacgcggatggtggcgttgcccattatatgcatttggacgtcaccaacgcagctgactggcaagccgcggtcggttatgcctgtgagacttatggtaagctcgatattcttattaacaatgcggcaattctggtcccacgggtcctcgtggaagagcggaccgaggaagagtgggaccgtgtcatggctgtcaataccaaaggggtttttctagggaccaagaccgctatccccgcgatgcgtgctgctggcggcggctccatagtcaacatctcctcgatcgccggaattgggcaggcgctgacccaagaaccagcttacgcagcaagtaagggtgcaattcgtgttttctcgaaagttgtagccgctcagcacgctatcgacaatattcgctgcaattctgtccatcccgggccggtagatacggcgatgtttcgtgccgctttcccgacgccagaagcgttggacaggcgtttgtcccgcgttccgatgaaacgcgctggtacgattgatgaggtcgttcaaggcgttttatttttggcttctgacgaagcttcatacatcacgggtacggaacttgtgattgatggcggcgcct

SEQ ID NO: 199469 - DNA, 622 bp, Unknown
  Bacterial polypeptide expressing nucleotide sequence isolated from the Sargasso Sea
atggagaaagttgcagttgtaacaggaagttcaagcgggattggatttgagacatcattggcattagcaagagagggatattttacatatggaaccatgagagatctgaaaaaggcagcggagatacagaaaattgcagatgaagaaagtctttcattaaaagttctagaattagatgtagataacgaggaatctactgaaaatgcgataaatacaattgttcaagaaaaaggtagaatcgacgtactagtaaataatgcaggatggggtctatggggcaccgcagaagatgtttcacttgaggagtttagagcacaatttgagacaaactttttttcggttgtaaggatgatacaaaaagttgcaccaacaatgagaaaacaaggttcagggaacattgtcaacataagttccgtagcaggaagaataggatttccagtatcaactgcatacattagttcaaaatttgcattggaaggtctttcagaatcactgagatatgaactaggtcaatttggagtaaatgtcataataattgaaccaggagtaatcaaaacaaacttttttgattcaatgaagactgcaaaaaaagcagatgaaggagaaacttacagagatataa

SEQ ID NO: 199470 - DNA, 700 bp, Unknown
  Bacterial polypeptide expressing nucleotide sequence isolated from the Sargasso Sea
gttaatggattaatgggtgcagcttatggatctgctggcgaaagatgtatggcccaatcagttgctgtagctgtaggagatataggagatgaattagtttctagactctcaaaaagggtagaagttttaaaagtaggacctggtatggataaaaattctgaaatgggaccactagtaacaaaagaacatttagaaaaagtaaaaagttatgtagatcttggagtaaaggaaggtgcaaatttagttgttgatggaagaaatttaaagctccaaggctatgaaaatggattttttataggtggatgtttgtttgataatgttaaaaaagatatgagaatttacaaagaagaaatatttggaccagtgttgtcagttgtaagagtaaaaacatttgaagaggcaactaaattaattaatgaacatgagtatggaaatggagtaagtatctatactagagatggagatgccggaagaacatttgccagcaaaattcaggttggtatggtgggtgtcaatgttccaatacctgttccaatggcctttcatagttttggtgggtggaaaagatctttattcggtgatagtgcaatgcatggagttgaaggagtaagattttatactaaacttaaaacaataacctctagatggccctcaggaataagatcaaacccagaatttgtaatgccaacaatgaaataaa

SEQ ID NO: 199471 - DNA, 517 bp, Unknown
  Bacterial polypeptide expressing nucleotide sequence isolated from the Sargasso Sea
gagcatttagcaaaagtaaaaggatatgtggacattggtgttgaagaaggtgcaaaattaattgttgatggaagaaattttaaaatacaaggttatgaaaatggctactatattggaggatgcttatttgacaaagtcacaaaagacatgagaatttataaagaagaaatttttggcccagtgttgtcagtagtaagggctaaagattttaatgaggctttgcaattagtcaacgatcacgaatttggaaatggtgtaagcatatttactagagatggtgactcagggagaacattttcatctaaagcaaaaatcggaatggttggcatcaatattccgataccagttcctatggctttccatagttttggtggttggaaaagatctttatttggtgatcagcacatgcacggaccagaaggtgttagattttataccaagctaaagactattacatcaagatggccttcaggcttaaggtctgatccagaatttgttatgccaacaatgaagtaaa

SEQ ID NO: 199472 - DNA, 778 bp, Unknown
  Bacterial polypeptide expressing nucleotide sequence isolated from the Sargasso Sea
aatgaaaaaagagttcaagctttcggggggagcaaaaaatcactgtgtaataatgccagactgtgatttagagcaagcggtaaatggtttgatgggagcagcatatggttctgccggagagagatgtatggcacaatcggttgcagtagcggttggtaaaattgccgatcctcttgtaaaaagtttatcaaaaaaagtagagtctttaaaaatcggtccaggattagataaaaaatctcaaatgggtccactagttaccaaagagcacttagaaaaagtcaaaggttatgttgacgtgggagtaaaagagggtgcaaagcttgtagtagacggaagaaatttaaagcttcaaggttacgaaaatggtttttatatggggggatgtctatttgatcatgttaagaaagacatgagaatttataaagaagaaatatttggtcctgtcctttcagttgtaagagcaaaggattacaccgaagcattatcattagttaacgatcatgaatttgggaatggcacaagtatatttacaagagatggagatactggcagatccttcgcaagcaatgtaaaaattggaatggtaggaataaatataccaatacctgttccaatggcattccatagctttggtggatggaaaagatctttatttggagatcaaagtatacatggacctgaaggtgtaagattttatactaaattaaaaacaatcacatcgagatggccatctggaattaaatcagatccagaatttgtgatgccaactatgaaataa

SEQ ID NO: 199473 - DNA, 880 bp, Unknown
  Bacterial polypeptide expressing nucleotide sequence isolated from the Sargasso Sea
attgatttttccatttggttttgcgccaatgggaatgactaatttatcatggcctggagcagactctatgttagcagctgaaagtgcgagaaacaatatacctacttgtgtttctatggcttctacaacaactttagaaaaaatgtatgaactttctgaaggtcactcatggatgcagctctacatatttcaggatgaaaattttgttatggaacttttagatagagctaagaatacaggatacgaagttgcaatattaactgtggatgtcccagtactatccagacggactagagatgataaaaatggtttctcctaccctttcaagattggtccaaaacaattttttgattttgcaactcatcctacttggtctttatcgactttgctaagtggcattcctaaaccaatgaattatgtaacatctaaaagtggagatggtatttttaaaagaaaagaaagtagaggttctactgattgggatacacttaagagagtaagagataaatggaaaggtaaacttataattaaaggagtaatgtctcctgacgatgcaacacaaattaaggaggctggcgctgatgcaatacaagtttcaaatcatggaggaagacaattagatagcgctacagcagcaataaatatgcttccactaatcagaaaatcagtaggaaacgattttcctttaatctttgatagtggaataagaagtggaagtgatatcgtaagagctcttgcatttggcgcagattatgcaatgattggaaggcccgtaatgtatgcaatgggtgctgatggaagaaaaggattaaggagaattgtggaaataatcaaagaagaagccagcacgactctcggcttagtgggattaaacgatatt

SEQ ID NO: 199474 - DNA, 574 bp, Unknown
  Bacterial polypeptide expressing nucleotide sequence isolated from the Sargasso Sea
atgttagttgaaagatcaatttatgaaagagcagtaaaagaggctgcagatgaagcaaataaaattaaagttggtctagcaagtaaagctggtgatcacataggtcctgtaatatcaaaaattcagtttgataaaatacaaagtttaataaaaagtggaattgaagaaggtgcaaaactagttgcaggtggaccagatagacctgaagattttaagaaaggttactttattaaacccacaatatttacagatgttgataataacatgagagtagctaaagaggaaatatttgggcctgtattatctataattccatttgaaactgaggaagaagcaattcaaattactaatgatactgaatacggtcttggaaattatttacaaactagtgataaagaaaaagcaaaaagagtttccagaaaactaagatcaggaatagtttatgtaaataatcaagcagcggactccggaacgccttttggggggtatagacaatccggaaatggtagagaaggtggtagttgggggcttcacgaatatctagaagtaaaaactattacagaatggcaataat

SEQ ID NO: 199475 - DNA, 693 bp, Unknown
  Bacterial polypeptide expressing nucleotide sequence isolated from the Sargasso Sea
cgcggcgctcgtgcaggaaagcgggttcaagcaatgggcggcgcgaaaaaccacggtatcgtaatgcctgatgccgatcttgatcaggtggtaacggacttggtaggtgctgcctatggtagcgccggtgaacgctgtatggcactaccggttgtggttcctgtcggcgatgaaaccgccgaaaaactcaaagctaaacttgttccggctatcaaaaacatcatggtaagccatagcgaagatcctaacgcccactatggccctgtcgttaccgccgcccacaaagagcgcgttgaaagctatatcgaccttgcgatagaagaaggcgcagagcttgtttacgacggcagaacaagtcaaatcccaagtgacagccacggctatttcatcgggccgacgttctttgatcacgtaactaaaaacatgcgctcataccaagaagagatttttggccccgtgctgcaaatggttcgcgccaaagatttcaatgaagccgttaatttagcaagtgaccatcaatacggtaacggcgttgctatgtacacccgaaacggtcatgcagcacgtgaatttgcacagcgcgttaacgtgggaatggtaggaatcaacgtaccaattccagtgccggttgcctaccatacaatggcggctggaaacgctcagcctttggcgatactaatcaacacggtagga

SEQ ID NO: 199476 - DNA, 475 bp, Unknown
  Bacterial polypeptide expressing nucleotide sequence isolated from the Sargasso Sea
gaaaaagagggtgcaaaattattaacagatggaagaaaatttaaaaaacaaggatatgagaatggttattttgtaggacctaccatttttgatgatgtaaaacctaatatgaaaatctacaaagaagaaatttttggtccagttttaagtatggtaactactgatacatatgaagaggcattaaatttagttaatgatcatgagctaggaaatggtgctgcagtttttacaaaaagtggaaatattgcaaagcattttactgaaaatgccaaaattggaatgatcggagtaaatgtgcctatccctgtacctgttgcctatcacagctttggcggatggaaacgatctttatttggagatcactcaatgcacggaccagaaggtgtaagattttatactaagcttaaaaccgcaacagtaacttgggttgaagacaatgcaggtcctgaattcacaattccagttttatcttaag

SEQ ID NO: 199477 - DNA, 709 bp, Unknown
  Bacterial polypeptide expressing nucleotide sequence isolated from the Sargasso Sea
tatggcatatacaatcgatttaacaggaaaaacagcacttgtcactggtggagcatctggaataggctttgcaattgctgaaggtttccaagaagcaggagcagaagtaattgttacagcgcaatctgatgaaagtttggaaaagtgtgttgataaaacaaaatttggaagcttacgtaagttaaaactagatgttactaatgatatatcaattgaaaaaacttttgatgaaatagatgaattacatattttagttaataatgcggggagaattaagagaggtttggaatatagaattgagcattttgcagatgtaataaatactaatttaatgggggtaatgcgaatgagccatgaagcattgcccaaattagctttaactcatggcaatataattaatatagcgtcaatgttttcattttttggttccccaatgtcgccaggatacactgcttcaaagactggtttagtaggcttaacaaaaagtttagcaaatggttggagtgagcaccatgttagagtaaatgcaatagctcctggatatattaaaacaaaacttactaaagctttaagagaagaagatgaacaaagagaaaaaattacggaacgaacagcattaaaaaagtggggagtacctgaggatatcgcaggggctgctgtgtatttggctagtgatagagcaagttatactacgggaacaactattact

SEQ ID NO: 199478 - DNA, 603 bp, Unknown
  Bacterial polypeptide expressing nucleotide sequence isolated from the Sargasso Sea
gcaaaatgcagaaaacaatgaaaaccctaaaagtgggtgcttacagtgaaagcagtaatgattttggaccacttataactaagggacatcgagataaagttgtctcttacatagatagtgcggaagaacaaggcgcgtctattattgttgatggtcgtggtatagaagttaaaggatatgaaaatggtttttttattggtggcacattaatcgataacgtaacgcctgatatggtttcctacaaagaagagatttttggccctgtgcttcaagttatacgagttaaaaccatgcaagaggctatgaatattattaataaccatgaatatgcgaatggcacttgtatcttcacgcgtgatggtgaggcagcgcgatatttctcagaccatattaatgttgggatggtagggattaatattccactgcctgttccagtttcatatcatagttttggtggttggaaacgttcattgtttggagatctatctgcctatggtccagatggtgtgcgattctatactagacgtaaaactataactcaacgatggccctctgacagtattcgggaagggaaacagttctctatgccaacaatgaagtaat

SEQ ID NO: 199479 - DNA, 634 bp, Unknown
  Bacterial polypeptide expressing nucleotide sequence isolated from the Sargasso Sea
tgtggccataggagatattgcagacaatttagttaatcaattatccaaaaaagtcgaagccttaaaaattggcccaggaatggataagagttctgaaatggggccattagttacgaaagagcatttagaaaaagttaaaggctacgtagatcttggggtaaaagaaggtgcaaaattagtagtagatggaagaaacataaaattgcaaggttatgaaaatggtttttatataggtggatgcttatttgataatgtaaaaaaaaatatgagaatttataaagaagagatatttggccctgttctatctgtagttagagtaaaagattttgatgaagctacaaagcttattaatgatcatgaatttggaaatggaacaagcatttacacaagagacggtgacgtaggtagaacctttgcaagcaaaattaaagttggcatggtaggcattaacatacctatacctgtgccagttgccttccatagttttggaggttggaaaagatcattatttggagatcagcatatgcatggaatagagggtgtgagattttataccaaactaaaaacaataacttcaagatggccatctggaataagatcaaatcctgaatttgttatgccaactatgaaataa

SEQ ID NO: 199480 - DNA, 210 bp, Unknown
  Bacterial polypeptide expressing nucleotide sequence isolated from the Sargasso Sea
tgacaaccatggactctgcttataacagaaaagagagtagaggagcccacgcaagggaggattatacaaagagagatgataaaaactatatgaaacatacattggcttggcaaaaaggtaagcaggttgaaataaagtatagagatgtgcattctagaacgctgactaatgatgttcagtacttcccaccaaaggagagagtatattaag

SEQ ID NO: 199481 - DNA, 853 bp, Unknown
  Bacterial polypeptide expressing nucleotide sequence isolated from the Sargasso Sea
atgcaacgggcggcggacacgtcggcgcaagcctacaggccgcagcgcgggcaacgcgagcgagaggaagcgtactggtacggcgaggcggcggaagtagcgcgtcgcgccaaaacgatcgcggcgcggcatgcagccgagcgtaacatcgagatgacgtggagcagaggcaacgcggcggcggtgctgccaaaggcgacacgcaaagcagcgcgaggcatgatgagacgcatgcacgagatgcggggcggatcacacgaggggcgcacgtgggatgagcgggacgtgctgccgcggcgtggcggctgcagcgtcacggcatccgaagcgcggcgcgcaactcgcggcgcacgcgatgcgccggccggccgcacggatgcggactggcgccgcttagtcgaagaactcgaggccgaggcccaaactgaaaccggtgcgcgcgcgcacgccgcaccgacgccaatctcagctgcagccatcgcggcgacggcacgcgcagccgagcgcgccgcggcagacgcacgcgacggcggcggcgaggccgaatgggacgatgaggactgggcaatggaagcgatggaggggcccacgtcagacgacgaagcgtgtgacgacgcgcagtggcgtcgcggcggagggccgcgtgatggtgatgcgatggaggggcccacatcagacgacgaagcgtgcgacgacgcgcaacggcatagaggcgaggtgcagcgtgagcacgacgcggaggagagcctcgcgcgcctgcgtgagtttgtgacgagcgtcgaggctgatgctgagcgggctgcggcaatagtgcacgagctgagcacgcacgcacacctgggcgagatttgag

SEQ ID NO: 199482 - DNA, 863 bp, Unknown
  Bacterial polypeptide expressing nucleotide sequence isolated from the Sargasso Sea
acatttttcagaagcagaaaaaataatttcgtcgattttaaaaaaagatccaaagtcagcagagtcttataatgcgcttgggtccatatatgaaaagaagggagattttgaaaaatcgaaaaaatatcttaataaagctctggaactaaagccggatttattcgcagcaaaattaaatttgatagcaataaagcagcactatggggaaatatatgaagcggaacgctcgcttgaagaattactgaaggaaaaaggggactctccggttctccataacaatctagctttaatttacctcactcttggaaaatttgaaaatggttggaaaaaatatgaatatagatggaaagtgttcccgggtgtgagagttagatggcccaaaagtcatacggaactttgggcagggcagaaagataaaaggattgttttatggagggagcaaggtataggcgatcttataatttttctgggtctggtccctgaagctttcaaaatagcgaaaaccctttcggtttatatagatccacgattaacgtctatgtgtaatcggtcaatgccgggtataaaatttaaaaaatacacaccaggtaattttgacggagaggtatttgattatcacttgccaatgggaagtcttccacttttgtttagaaattcagagaaagactttgatagagtgataaggggatatttaaaagctgatcccaagagagtggaattaatccgagatgaattagggcttaggggaaaaaaggtcgttggaatatcctggaaaagctttacccctttgaatccccaaaagaagagtttggcattaatggattttagtaaagtttttaaggatctagatataaccttggtga

SEQ ID NO: 199483 - DNA, 730 bp, Unknown
  Bacterial polypeptide expressing nucleotide sequence isolated from the Sargasso Sea
tacaaaaaatgctgctgatacaattaagagagtttgtttagaattaggtggaaaaggtggaaatatagtttttgcggattcatatccaaatgcagtaagagacggaattaagaatgtaatgagcaactctggtcagtcatgtgatgccccaactagaatgcttgtagaaaaaactatttatgaaagagcaattaaagaggcagctgacgaagcaaataaaattaaagtagatattgcatcaaaaccaggagatcatataggacctgtggtttcaaaagttcaatacgataaaataattaatttaattaatagtggaatcgacgaaggagcaacattagcagctggaggtcctgaccttcctaatggattaaacaaaggttattttattaaacctaccatatttacgaacgttacaaatgatatggaaatagcaaaaagagaaatttttggaccagttctatctattataccatttgaatcggaagaagaagcagtcaaaattactaatgatactgaatacggtcttggaaactatctacaaactgaagacaaagaaaaagctaaaagagttgcaaaaaaattaagatcagggattgtttatataaatggaaaagctgctgactctggaacaccttttgggggttacaggcaatctggaaatggaagagaaggtggagtttgggggcttgaagaatatttagaaataaaaacagtaactggatggaaatag

SEQ ID NO: 199484 - DNA, 784 bp, Unknown
  Bacterial polypeptide expressing nucleotide sequence isolated from the Sargasso Sea
atagtagaaaattttaaaaaacttaataataaaaatcttatatggaagaaaccatctaaagtttcagatgatattctattgaccacacatgaaaataattatttaaatttagtaaaaagttctttcccaaaaaaaggtttttcttcacttgatggtgatacaatcatttcacctggaagcaaagatgcaaccttcgatgcagtaggatcaataattgctgcaattgatggggtagaaaaaaaagaatttaaaaatgcattctgtagtgttcgacctcctggacatcatagttcacaaaataaggctgctggtttttgtattttaaattcagtaagtattggtgcaaattatttgttgaaaaaatataaatataagaaagttgcaataatagattttgatgtacatcacggtaatggaacacaggatatcttttatgaaaatgaaaatgttctttttatatcaactcaccaatatccctactacccaggaactggttcagaacaagaaagaggtaaatttaacaatatctttaatatacctttgccagctggcataagttcagaagaatatttaaacgtatttgaccgtgtattaaaaaaattagaagagtttagaccagagtttatattgattagcgctggttttgacgcccatgaagatgaccctcttgcccaatttaatttaaaaacagaggattattttactattactaaaagagtattagagaattctaaaaagttttgtaatggaaaagttggtttcaattttagagggcggttatgac

SEQ ID NO: 199485 - DNA, 401 bp, Unknown
  Bacterial polypeptide expressing nucleotide sequence isolated from the Sargasso Sea
aatgtttcttaaaaaacaaaacttaaaaaataaaattgccctcgttactggggctggaaaaggtatcggaaaagcctgcgctattgcgctcgctgaagctggggcaagtttaattattgttagtcggacaaaaaaagatttagatcaagtttcaaaaattattaagaaatttagatcaaagtgcaaatcatacgtttgcgatgtaacaaaatattctgagattaaatcagtaatagattctcaaaaaagaatagatattttagtaaataatgccggaacaaatattccagaacattttacaaaagtgaaaagaaaagacatggaatatgtcgtaaagattaacacaatggcaacctttaatattgctcaattatgctccttaaaaatgatcgaactaaaaa

SEQ ID NO: 199486 - DNA, 958 bp, Unknown
  Bacterial polypeptide expressing nucleotide sequence isolated from the Sargasso Sea
tatgggtgattataatcaatctgaagcatctaatcagtctcatagatgcttagattgcggaaacccatattgtgaatggaaatgtcctgttcacaactatattccagattggttaaagcttgtgaatgatggaaatattatggaagctgctgatttatgccatcaaactaactctcttcctgaaatgtgtggaagagtttgcccacaagatcgtctttgtgagggagcttgcacactcaatgatggatttggcgctgtaagcatcggcaatattgaaaaatatattactgataaggcaattgatatgggctggaaaccagatctaagtaataggacctggaccaataaaaaagttgcgatcatcggagcaggccctgccggtattgggtgtgcagatatcttgataagagcaggaataaactgtgatgtttttgataagcagcctgaaattggtggcttgttaacatttggaattcctgaatttaagctggaaaaaagcgtggtacgacgacgtagaaaaattctggaagaaatgggtattaagtttcacctaaacaaagaaattggtaaagatatttcgtttcagaaactgcatgataaatatgatgcagtgtttcttggtatgggcacatatacttcgcttgagggaggctttaaaggagaggatttacctcaagcacacaaagctattgattatctaattgggaacacaaatcatcttttgaaatttccacaaaaagaatctgcatatataaattttaaaggtaaggatgtcataattttaggtggcggtgatactgctatggattgcaacagaactgcaatcagacaaggagcaaaatctgttacttgcttatacagaagggatgaaaaaaatatgcctggctcaaggagagaagttataaacgcaaaagaagaaggagttgtatttgaattaacattcagcccatcgagatca

SEQ ID NO: 199487 - DNA, 698 bp, Unknown
  Bacterial polypeptide expressing nucleotide sequence isolated from the Sargasso Sea
taatggattaatgggagcagcttacggatctgctggagaaagatgtatggcccaatcagttgcagtagctgttggagatataggtgatgaactagtttcaagactctcaaaaaaagtagaaaatttaaaagtcggacctggtatggataaagcgtctgagatgggccctttagttactaaagaacatttaagtaaagttaaagcttatgtagatttaggagtaaaagaaggagccaaattagttgttgatggtagagatttaaagctacaaggttacgaaaatggtttttatatcggtggatgtttatttgatcatgttaagagagatatgagagtatataaagaggaaatatttggaccagttttatctgtggtaagagtcaagtcttttgaggaagcaacaaaattaattaacgatcacgaatatggaaatggagtgagtatatataccagggatggtgatgcaggacggacatttgcaagtaaaattcaagttggaatggttggaataaatgttccaattcctgtgccgatggcttttcatagttttggaggatggaaaagatctctgttcggagatagcgcgatgcacggaatggaaggtataaagttttataccaaactaaaaacaattacatcaaggtggccatctgggataagatcaaacccagagtttgtgatgccaactatgaaataac

SEQ ID NO: 199488 - DNA, 396 bp, Unknown
  Bacterial polypeptide expressing nucleotide sequence isolated from the Sargasso Sea
taattcttactacaaatcatcagtttaaaactatgcaagaagaaatttttggacctgtggtaaccttatatgtttataatgataatgattggaaaaacatgcttgatatagttgataatacttcagactatgccctaacaggtgcttttatatcaaaagatgaagaaagtatagattatgcattaaaaaaattgaaatatagtgctggaaatttctatgtaaatgataagccatcaggtgcagtagttggtcaacaacccttcggaggttgtagagcatctggaactgatgataaggcaggatcaaaacttaacttactaagatgggttagtcctaggctagtgagtcgaacacataatcctcctactgattatccatatgagtatatggattagg

SEQ ID NO: 199489 - DNA, 308 bp, Unknown
  Bacterial polypeptide expressing nucleotide sequence isolated from the Sargasso Sea
cgagggtatggaggatatttctgttaaggataagtcattacttttcaatacagacctcgttgaaactttagagtttgataatttgataagtcaagcattaactacaatggactctgcatataacagaaaagagagcagaggagcacacgctagagaagattttgcaaaaagagatgataagaattttatgaaacacactctagcttggcaaaagggtaagaaagtagaaataaaatatagagatgtgcattcaagaactttaacaaatgatgtgcagtattttccgccaaaggagagagtttattaac

SEQ ID NO: 199490 - DNA, 571 bp, Unknown
  Bacterial polypeptide expressing nucleotide sequence isolated from the Sargasso Sea
aaaaattggcccgtactcggatttagaagctgaaatgggacccgtaataacaaaagaagctctagctcggatacgaggtctggtagatgcaggcgtaactgatggcgcggaattggtagtggatggaagggatgttagtttgcaaggctacgagaatggattttttctcggtggatgtttatttgataaggtcttgccggagatgagtgtctacaaagaagagatttttggtccggtactttcggtagttcgtgtccccgactatgagtcggctctccaattggttaaagccaatccatttgggaatgggaccgcaatttttacccgtgatggtgacgccgctagggacttctctaatcgggcgaatattggaatggtcggcgttaatgttccgattcccgttccagtcgcctatcatagttttggcgggtggaaagattcaatgtttggcgcatcaaacacccatggtatggatggcgttaggttttacacgaggctgaaaacggtgacctcccgatggccttcaggcatacgtcaaggtgcggacttttcgatcccgacgttgaagtga

SEQ ID NO: 199491 - DNA, 285 bp, Unknown
  Bacterial polypeptide expressing nucleotide sequence isolated from the Sargasso Sea
tctggaatagtgacttgatggagacactggaattaacaaatcttatgcctaatgctttggccacaatagctggcgctgaagctcgtaaagagagtcgaggggcacatgcgcacgaggatttcactgttagagatgatgaaaaatggagggttcactctttggctaaagtagatggtcctgagataaaattatcatatagagatgtgatacgcgatccattgtcagacgtgtcagagggtggtattgaactgaaaaagattgcacctaaagaaagaactttttaaa

SEQ ID NO: 199492 - DNA, 604 bp, Unknown
  Bacterial polypeptide expressing nucleotide sequence isolated from the Sargasso Sea
aaaataataattgctccaaaaaaaaataaaaaaattttttatgaaaataatattggcaaggcaacatttattataggtcaaccaaatttagataaatatttgttgtctaaagcttcaaaattaaaatgtattatcaatgtggagagcaattttatggataatttagactatgattattgtttcaaaaaaaatattcatgttattgcaacctcgccagtattttcaaaacctgtagctgaaattgctttaggtatgacattgtctcttttaagaaatattcacaatgcgcactttgattttattaaatcaaaagagaaatacggtttagaaagtaatttacaagcatctcttctaacaaataaaaaaataggtttattagggtttggagacttagcaaaatctttatatcctttacttttgccattcacaaaaaatataaatgtatatgatccatggatacctaaaagtaaaataaaaaaaattggatttaatccaattaatttaaataaaatgtttagtagttgtgaagtaatttacgtattagcaactattaccaaaaagaataaacatttaattgataagaaattattaaataaaatgaaat

SEQ ID NO: 199493 - DNA, 700 bp, Unknown
  Bacterial polypeptide expressing nucleotide sequence isolated from the Sargasso Sea
catgtatctaaaaaaagttaatttaaaaaacaaaacagctttagtaaccggtgcaggcaagggtattggtaaggcttgcgctattgctttggctgaagctggtgctaatttaatactcatcagcagaactcaaaaagacttagataaagtttcaaaaatcataaaaaaactcaaatcaaaatgtgtatcttacgcatgtgatgttactaattataataagattaaaaatattatagctagtcaaaaaaaaatcgatattttggttaataacgctggaacaaatattccagaacattttacaaaagttcaaaaaagaaatatggaatatttagtcaaattaaatacagtatctacatttaatatagctcaactttgtactttaaaaatgctagagacaagaagtagaaaaaaaataggaggttctattattaacatgtcttctcaaatgggtcatgttgggggacctattagaagcgtttataatatgaccaaatctggtttagagggattaaccagaggtatggctattgatttagctaaaaataacattagagtaaatacagtttgtccaacttttgttgttacgccaatgacaaaaaaatttttaaaaaataaaaaatttaaaaataatatgctaagaaatataccgcttggaagatttgctgaccttagtgacgtagcaacagctgtagttttttta

SEQ ID NO: 199494 - DNA, 361 bp, Unknown
  Bacterial polypeptide expressing nucleotide sequence isolated from the Sargasso Sea
tttagaactgaaaaaaatcttaaagaaggtattgaagaaataagaaaaacttatgatggtttagactctttatcagttaaagataaatcattaatatttaatacagatttagtcgaaactttagaattcgacaacttgattagacaggcagtagttacagtagactcagcttaccatcgtaaagaaagcagaggcgctcatgcaagggaagattttccaaaaagagacgatgaaaagtttatgcaacatactcttgcttggtataatggtaaaaaaactacaataaaatatagagaggttcataaaactacactaactaacgaagtgcagtattttcctcctcaagaacgagtttattaat

SEQ ID NO: 199495 - DNA, 936 bp, Unknown
  Bacterial polypeptide expressing nucleotide sequence isolated from the Sargasso Sea
gacgcgctcgtgtaatgttcaagtttaaagagctagttgaagcaaaccgcgatcgcctagcggcattattatcaagcgagcacggtaaagtgttggttgatgcacaaggtgatattcagcgcggtcttgaagtgattgaatttgcctgtggtattcctcatgcgcaaaaaggtgaatataccgaaggcgcaggcccaggaatcgatgtgtactccatgcgccaagcacttggtgtagtggcaggtattacgccatttaacttcccggccatgatcccaatgtggatgttcggtgtggcaattgcctgcggtaacgcgttcattttaaagccatcagagcgcgatccgtcagtacctgttgaactggcaaagcttatgattgaagcaggccttcctgcaggtgtacttaacgttgtacacggtaacaaagaagtggttgatggtattttagatcatcaaactattaaagcggtgagctttgtaggctcttctgacatcgctaactacgtgtacgagcgtggcgctcgtgcaggtaagcgcgttcaagccatgggcggcgcgaaaaaccatggcatcgtaatgcctgatgcagatctagatcaggtggtaaccgacttagtaggtgctgcgtacggcagtgccggtgaacgctgtatggcgctaccggttgtcgtcccagtgggcgatgaaactgctgagaaactgaaagccaagcttattccggcgattaaagacattatggtaagtcatagtgaagatcctaaagcgcactatgggcctgtggttactgctgctcacaaagagcgcgttgaaggctatatcgacctttgcataaaagaaggtgctgagcttgtttacgacggtagaaccagtcagatcccagacgacagtcagggctacttcatcggcccaaccttcttcgacccacgtgactaaa

SEQ ID NO: 199496 - DNA, 420 bp, Unknown
  Bacterial polypeptide expressing nucleotide sequence isolated from the Sargasso Sea
tggaagatggaaaaattttattaggtggcaacattattaaaacatcaggacgctgccaagatggctggttttatgaaccaactatcatagagggattagatattaacagtagagttaatcaagaggaaatatttggtcccgtggttacaatacaatcatttaattcggaaaaacaagccatagaaaatgctaatggcactgattatggtttatctgcaatggtatggactgatgacaaaaaaaaaggaaacagaattattagtcaaattgatgctggaattatttggttaaattgttggatggttagagatcttcgtacaccctttggtggaatgaaaaaatcggggttaggaagagaaggtggagatgaaatcttacaattctttactgaacaaaaaaatatttgtgcacccatatgaa

SEQ ID NO: 199497 - DNA, 874 bp, Unknown
  Bacterial polypeptide expressing nucleotide sequence isolated from the Sargasso Sea
gctgcagataaagcttataaagaatggaaggatgtatctgcctatgaaagatcaaaaataatgagaaaagctgcagatatttttagatcaagagcagattatattgcaaaacttttgactatggaacaaggcaagcctttggctgaagcaatgatagaaactctgggtgctgccgattcaattgaatggtatgctgaagaaggtagacgcgcttatggtagaataataccaccaagggcaaaaggtatttatcaatttgtttttaaagaaccagttggtgtgatagcagcatttactccatggaattttccaataaatcaagttgtaaaaaaaatagccgctgcgtttgctgcaggttgtactgctattgttaagggccctgaagaaactccagcaagtgttgttgaattgataaaagcttttgatgaagctgggatgccaaaagggtctattaatcttgtttttggaatacctgctgaaatatctgaatatttaataccgcatccaattattcgaaaagtgacatttacaggttctacagccgtaggtaaacagcttgctgctttagctggtgcgcatatgaaaagagtaactatggaattaggaggacattctcctgctatagtgtgtgaagatgctgatgtggatgtagcagtaaaaatattaagtgcaaataaatttagaaatgctggtcaagtttgtatctcaccaacacgtttcttagtccatgactcagtttacaataaatttgtcgacggctttgtaaaaaaagcagaggaacttaatgttggtaatggtctcgaagatggcgtcaaaatgggtcctttagctcatgatagaagattgactgctattgagggttttgtctcacgat

SEQ ID NO: 199498 - DNA, 900 bp, Unknown
  Bacterial polypeptide expressing nucleotide sequence isolated from the Sargasso Sea
tttgattttgaaaaacctttaggagatcatgcacaagatcagagaattatttatgaacccaaaggagtttgcgtattaataacaccttggaattggccaatgaatcaagtttgtttaaaagtaatcccagctttagcagcaggatgtactatgatcttaaaaccttctgagctagcacctttatcatcaatgatacttgcagaacttattgatgaggcaggttttccaaaaggtgtatttaatttagttaatggagatggggaaactacaggcaatgcactgaccagtcataaagatgtaaatatgatatcttttacaggttcaacaagagctggagctctaatttctcaaaacgcagcaaaagactttaaaagggtaagtcttgaattaggaggaaaaggagcaaatattatttttgaagatgcagattctgaggcaatcgaaagaggagctgcacggtgttttagaaattcaggccaatcatgtaatgcaccaacaagaatgctggtagaaaaatcaatttatgatgacgcagtaaatagactaaaaaaatttgctaatgaatataaagttgatattcctcaaaaagaaggcgatcatataggtccagtaatatcagagactcaatataataaaattcaaggtttaataaaaaaggggatagatgaaggtgctaatttaatagcagggggacctggaaaacctgatggtttagaagatggttattacgtaaagccaactgtttttgctgatgtaaataataatatggaaattgccagaactgagatttttggtccagtattatcagtaattccatttgaaacagaggaagaggcaataaaaattgcaaatgatactccatatggtttgacaaactatattcaaacgaagaccaagaaa

SEQ ID NO: 199499 - DNA, 520 bp, Unknown
  Bacterial polypeptide expressing nucleotide sequence isolated from the Sargasso Sea
cgagcaattcggtcgcatcgacgtcttagtgaacaacgcgggcggcgcaatgttcgtaaaaccaccagaaaaattacgacctgagcaatggcgagcggctatcgatctaaacttgagcagcgtattttattgctgcgcggcagccggccagcgcatgattcaacaaaatagtggtcgaatcataaacatctcatcggtagccggcgtaaagaactcgccatccttcgtccattacggcgccgctaaagcaggagttattaacctaacaaaatctatggcagtttgctgggggcctcataacatcaatatcaactgcatcgcacctggactaacggctacagaaggagtcgcacagtggctaccagcaaaaaacagagaagacggctcgccggttccgccgctcgagtacccgccagatccgcagaatgttgccgacctcgccctatttcttgcagcgccgggcagcgctaggattagtggggaaatttttccgatccgcgcgcttaacgaaatagtctag

SEQ ID NO: 199500 - DNA, 511 bp, Unknown
  Bacterial polypeptide expressing nucleotide sequence isolated from the Sargasso Sea
atgaaaaacattgaagacataaataaagcagcaattaaaaaaatagttgctaataaaaaaataacaaacttttctccaggagatacgataaaagttggtgtaaaaattgtagagggaaaaagagagagaattcagtatttcgaaggtgtttgtattgctaaaaaaaatagagacataaactcttcttttactgttagaaaaatttcatttggtgaaggtgtagagagaacttttgcactttatagtcctaatgtagactctataaaagttataagatctgggaaagttagaagagcaaaactttattttttaagagatagaaaaggaaaatctgcaagaattgctgaaaaaattaaaaagaagattggtgttgacgtttcagtcaaaactgaagaaccaaaagtaaaaccgatcgagccatctgaacaagagaccaaagtcgaagaagttaaaaaaaaagctccaaaagtcgaagctaaagttgaaaagccaactagcgaaaaaaaataaa

SEQ ID NO: 199501 - DNA, 925 bp, Unknown
  Bacterial polypeptide expressing nucleotide sequence isolated from the Sargasso Sea
catgacctatcccaacacccagctcttcatcgcaggccagtggcaagacgccgccgaaggcaagacccttgccgtgttcaaccccgccacgggcaaagaaatcggccgtgtggcccacgccaccaaggtggacctggaccgcgcgctggacgccgcacaaaagggctttgaagcctggcgcgacatgcctgctgccgagcgcgccaagaccatgcgccgcgctgcggccctgatgcgcgagcgcgccgaggccatcgccgccatcatggtgcaagagcagggcaagcccctggccgaggccaaggtcgagaccatggcgtctgctgacatcatcgaatggtttgccgacgaatcgctgcgtgtgtacggccgcatcgtgccctcgcgcaacctcaaggccacgcagatggtgctgaaggacccggtaggccctgtagcggccttcacgccgtggaacttcccgatcaaccaggtggtgcgcaaactggccgccgcgctgggcgcaggctgctcgattctggtcaaggcacccgaagaaaccccggccagccccgccgagctgatccgtgcgtttgccgatgcgggcgtgcccgcaggcaccgtgggcctggtctatggcgacccggcggaaatctccaactacctgattccgcaccccatcatccgcaaggtcacgttcaccggctccacgcccgtgggcaaacagctggcggcgctggcgggcaagcacatgaagcgcgtgacgatggaactgggcggccacgcaccggtcatcgtggccgaagacgccgacctggagctggccatcaagatcggcagcggcgccaagttccgcaatgcgggccaggtctgcatctcgcccacgcgctacctggtgcacgaaagcatccgcgccgactttggccgccgcgttcgcaaatatgcc

SEQ ID NO: 199502 - DNA, 580 bp, Unknown
  Bacterial polypeptide expressing nucleotide sequence isolated from the Sargasso Sea
gaagctttaaaagtagggccaggaatggataaaaattctgaaatgggacctttagtaacaaaagagcatttagaaaaagtaagaggatatgtagatttaggagtaaaagagggagctaagcttgttgtagacggtagaagcctaaaattacaaggatatgaaaatggtttttatattggtggctgtttattcgaccatgttaaaaaagaaatgaaaatttataaagaggaaatatttggtccagtattatctgtggttcgagtaaaaacttttgaggatgcagcaaatttaataaatgatcatgaatatggaaatggggtgagcatttacacaagagatggagatgctggaagaacttttgcgagcaagattcaggttggaatggtaggtattaatgtaccaattcctgtaccaatggcctttcacagttttggtggatggaaaagatctttatttggagatagtgcaatgcatggtatggaaggtataaaattttatacaaaattaaaaacaataacttcaagatggccctcaggcatcaggtcaaatgcagaatttgtgatgcctacaatgaaataaa

SEQ ID NO: 199503 - DNA, 463 bp, Unknown
  Bacterial polypeptide expressing nucleotide sequence isolated from the Sargasso Sea
ttgatacaagataaggttatagtaattactggtgcatctagcggaattgggcattcaactgccaaagcacttgcaaaaaaaggcgcaaaaatagttgctggagcaagaagattagatagactggaaactttgaaaaaagaaatcaccgatgacggtgggaaaataactatctgtgaaacagacgtaaccaaaaaagcagattgtgataatttagttaaacaagcactagacaagtatggaactgtagatgttttggtaaataatgctggattgatgcctcttagttttgttaaatcactaaaagttgatgagtgggacagaatgatagatgtaaacatcaaaggtgtattgtactgcactgccgcagtcgtccctacaatgactgagaaaaaatcgggccatatcattaacatttcatctgttgcaggaaaaatagtcttcccagcaggaagtgtttactgtg

SEQ ID NO: 199504 - DNA, 790 bp, Unknown
  Bacterial polypeptide expressing nucleotide sequence isolated from the Sargasso Sea
cctgaaactgcaagacatataattagaaattcagctgaaaatttatctgaagtaagtctggaacttggaggaaaaagtcctgtagcagtatttgaagatgctcatcaagaaaatgcaataaatggaattaccgcaggaatttttggtgcaagtggccaaagttgtattgctggttcaagactttatttacaaaaaggaatttataatgaatttctagataagcttgctgcaagagcagaaaaaataaaaattggtgcgcctatggatcctgaaagcgaaatgggtccaattggtaattttaaacaattagaaataatagaaaaaaatattaaattaactgtagaacaaggtggaaaaattaaatgtggaggtaaaagacattcattttcaaatgaaggatactattttcctccaacaattattgagtgtgataatcataatcttccaacagcagaaaacgaactttttggtccagtgctatctgtaatgaaatttgaaaatgaagaagaagtaataaataaaatgaatgataaccaatacggtttatcatctggagtttatactagtgacttctcaagaggcatgagagtttcaaaggcaatcagggctggaatcacatttgtaaatacttataggctaatatctccatctgctccatttggaggaatgaaagatagtggctatggtaaagaagcaggtattgaatctataaaagattatacaagagttaaaacaacttggtattatacttcggataaaccaactcttgatccattttcaatgagataaa

SEQ ID NO: 199505 - DNA, 895 bp, Unknown
  Bacterial polypeptide expressing nucleotide sequence isolated from the Sargasso Sea
ggtgatcgggatgcccggcgcccacccgaacttcttacacgagaccatgtagcacggaagatcgtgaaagaagtacaagagggtcggggaagcccgcacggaggtgcctttctcgacatcgcgtggattaaggagcacatcaaagactctgagggacacattaagaagaagctcccaagcatgtaccatcagtttaaagagttggcaggcattgatatcacgaaggagcagatggaggttggcccgaccacgcactatgccatgggtgggattgcggtagacgcggatactcagatgactaccactgtgccgggcttgtttgcggcgggagaggtcgcgggtggactgcacggggcaaaccgcttaggaggaaactcgctttctgacttggtcgtctttgggcagcgtgctggtgagtatgctgcgaaatttgcgaaagagaacccttcgtactctgtctcggaagcacagattgaagaggccgcgaccgaggcgttagcgccgcttgagcgaggtgtcacagagaggaatccgttccagcttcaactcgaacttcagactatgatgcaggacaaggttgggatcgcacgcgaagacgaggggctgacagatgctatcgagtcgatccgggaaatctctggccagatcgctgatgtaggggccgggggcaacaggtggtacaaccctggatggcacactgcgctcgacatgaagcatctgctgactgtatccgaggcgatagcactttcagctcgcgaacgaaaagagagtcggggcgcgcattctcggctcgaccacccggacaaggaggagggttggtctacctttaaccatgtcgttcgaaagggaccggatggggagatgatcatcgagcgtcaagaaatccctccaatgc

SEQ ID NO: 199506 - DNA, 679 bp, Unknown
  Bacterial polypeptide expressing nucleotide sequence isolated from the Sargasso Sea
atgggtgcaattgaatcagttgtaattgatacttgttttcatggaagacacatcaacccgcaaatcctggcagacctaaccccggatacctgggatttggaaggttacatcaagaggggaggatatagcgctttaaagaaagttttaggaaaagagggaggtagcagcggttatacgccggagaccgtcatcgctgaaattaaagactctgccttgagagggaggggaggtgctggttttccaacaggactaaagtggggctttatgccagcaaaacttccaatgcagaagtatttagtttgtaattcagatgagggagaaccggggacctttaaagatagagatattcttcgttataaccctcatattcttatcgaagggatgacacttgctgcttacgctatgggcattagtaccggttacaactacatccatggtgaaatttgggaggtttatgaaaggttcgaagaagccttggaacaggccagagaagctggattaattggtaaaaaaattctgggcacagattttgattttgagttgtttgcttgtcacaattacggtgcttatatctgcggtgaagaaacggctttattagaatccatagagggtaaaaaaggtcaacctcgttttaaaccaccttttcctgcgagttacggcctctatggtaagccaacaa

SEQ ID NO: 199507 - DNA, 733 bp, Unknown
  Bacterial polypeptide expressing nucleotide sequence isolated from the Sargasso Sea
gttgttatgccagattgtgatcttgatcaagcagtaaatggtctaatgggcgcagcatatggatcagctggtgaaagatgtatggctcaatctgtagcggtagctgttggaaatatcggtgatcagctcgtaaaaaaccttaaaactaaagtagaaaatttgaaagttggtccaggaatggataaaaattctgaaatgggtccattggttacaaaagaacacctagaaaaagtcaaaagttatgttgatcttggtgtacaagagggggctgaacttgtagtagatggcagaaaattaaaattacagggctatgaaaaaggttattatatgggtgggtgcctgtttgataaagttaaaaaaaatatgagaatttataaagaagaaatatttggaccagtcctatcagttatcagagcaaaaaactatgacgaagctcttactcttgtaaatgatcatgaatttggaaatggagttagtatatttactagagatggtgatgttggtagatcattttcaagtaaagcaaaaataggaatggtaggaattaatataccgataccagtacctatggcatttcatagttttggaggatggaaaagatctttatttggagaccagcacatgcatggaccagaaggtgtaagattttatacaaaactaaaaacaattacatctcgttggccagatggtttaaagtctgacccggaatttgtaatgccaacaatgaaataaa

SEQ ID NO: 199508 - DNA, 478 bp, Unknown
  Bacterial polypeptide expressing nucleotide sequence isolated from the Sargasso Sea
aaaagaactttatattatatggatattgccaaaaaaaactctacaaccaacgtagtccatggtggtaatcaacgaacaggtggtgattataaaaatggtttcttctatgaacccacattgatgtcaggtgttccagtaagctctccagtttgccaagaagaaatatttggtcctgttgcttgtgcaataccatttaaaacatttgatgaagtaatgaacagtgcaaatgatacaccgtttggattgtcagcggtattgtggacacaaaatttatctagagctttacagtttgttgaagaaattgaagcaggtttcgttcaagtgaatcaatgtgtagcgcctagagcaaatgtttcatatggtggattaaaaatgagtggcctaggaaaagagtatgcatttgatagtatggttaatcattttactcaaagtaaaacagttttgattaatagaggaaaatcaaatatagataactaaa

SEQ ID NO: 199509 - DNA, 919 bp, Unknown
  Bacterial polypeptide expressing nucleotide sequence isolated from the Sargasso Sea
ttagagtctcttgatggcaataaaagagatccaaaaatttcttctgctgttgtcaggactgctgcaaattattgggaaggtgttagaaaacaataccaacctttcgaaagcaaaactcgcactagtatgtcagaagtatatttacatcaaatgccaggtggtcaatacactaatctaagagagcaagcaaggtcaatgggcattacagacgagagatggccagaacttgcgtcaatgtatgccgaagtgaacaaaatatttggtgatgtaattaaagttacacctatatctaaggttgttggtgatatggcaatttatatgttggcaaataatattcaaattcaagatgttttagaccctaaaaaggatgttggctttcctgcatcagtcatcgaattctttagtggccgattaggtcaaccatataaaggtttcccaaaagcactccaaaagaaaattttaaaaggaaaaaaaccaattaattatagatttggatcaaagctaccctcattaaaaatcaaaaatagaacgaaggatttggaaaagaagtatagtgagactatttcagagaaagatacaatttcacaaatattttttcctgaggtttttgatgagtatataaaacacaaaaagaaatttggtaatactagtgttatcccaacatcaaactatttctttgggatgaacacaggggaagagatatatgtttctatagaacctggtaagacacttataataagatatttcactttaagcgagccaaacgaaaaaggttacagaacagtatattttgaattgaatggccaggccaggtcagttgacattaaagataattctattgcagttgacgatttagctaaagaaataaccgatcctagcaacaaagatcatgttgcggcccctatacctggtttactgt

SEQ ID NO: 199510 - DNA, 577 bp, Unknown
  Bacterial polypeptide expressing nucleotide sequence isolated from the Sargasso Sea
ccagcgcaatggcacaaggcactggatcactgtgagaagctgttcgggagtatcgacgtgctggtaaacaacgctggcgtgggggagttttgcgacgtcgagcggatgagcttggagcagtggcggcacacgctggcttgcaacctggacagtgtgtttctggggacacagcaggtcatcgggcggatgaaggagcgcggtggctcgatcatcaacgtggcctccattgaagggcttatcggtgacccactggtgccggcctataacgccagcaagggggccgttcgcctgttcacccgttcggtggcggcgcattgcgcgcggcagggctacgccatccgggtcaacgcgctgtgccctggctacgtagatacacccatggtacagggcgccctggccgatgcgccggccgagcaggcgcggttcatgcaggattatctgcgccagcgcatccccatgggccgaatggcccttccggaggagatcgccagagccatgttattcctcgccagtgacgactcgaactatatgaccggcgcggacctggtggttgatggtggctatttggcgcagtgat

SEQ ID NO: 199511 - DNA, 506 bp, Unknown
  Bacterial polypeptide expressing nucleotide sequence isolated from the Sargasso Sea
tatgcctgattgcgatcttgaccaagctgtttttggtattatgggtgctgcttatggttctgccggtgagagatgtatggcgcaatctgttgcagttgctgttggaaatattggtgatctattagttaaaaatcttaaagctaaagtagaatctttaaaaataggaccaggcatggacaaaaattctgaaatggggccattagtaacaaaagcgcatttagaaaaagtaaaagattacgtgaatatcggtatacaagagggtgctgaacttgtagtagatggtagaaatttaaaattacaaggctatgaaaaaggtttttatatgggaggctgcttgtttgataaggttaaaaaaaatatgagaatttataaagaagaaatatttggaccagttctttctgttgtaagagcaaaaaattttgaagaagctctatctttggtaaatgatcatgagtttggaaacggtgtaagtatttttactagagacggtgatgttggaagatctt

SEQ ID NO: 199512 - DNA, 838 bp, Unknown
  Bacterial polypeptide expressing nucleotide sequence isolated from the Sargasso Sea
aactccgacaaaggcatcaccaacctgcacgtgccaagcgacgtcatcgtcgacgcctcgatgccagcgatgatccgtgactccggcaagatgtggggcaccgacggccagttgcacgacaccaaggctgtgatcccggatcgctgctacgccaccatctaccaggcggtcatcgaagactgcaaggccaatggcgccttcgacccaaccaccatgggcagcgtgccaaacgttggcctgatggccaagaaagccgaagagtacggctcccacgacaagaccttccagatcaaggctgacggcgttgtccgcgtcaccgacagccagggcaacctgctgatggaacagaacgtcgaagctggcgacatcttccgcatgtgccagaccaaagacgctccgatccaggactgggtcaagctcgccgtcaaccgtgcacgcgccagcaacaccccggccatcttctggctggacccccagcgcgcccacgatggcgtagtcgtcgagaaagttcaggcttacctgaaagaccacaacaccgaaggcctggacatccgcatcatggccccggtcgatgcgatgaagtttaccctggagcgcacccgcaagggcctggacaccatctcggtgaccggcaacgtactgcgcgactacctgaccgacctgttcccgatcatggaactgggcaccagcgccaagatgctgtcgatcgtgccgctgatgaatggcggtggcctgttcgaaaccggcgctggcggttcggctccaaagcacgtgcagcaactgctggaagaaaacttcctgcgctgggattccctgggcgagttcctggccctggccg

SEQ ID NO: 199513 - DNA, 783 bp, Unknown
  Bacterial polypeptide expressing nucleotide sequence isolated from the Sargasso Sea
agctcctgcaactatgtttgaatttgcaaaactaatagaaaaaaccggaataccaaaaggagtagtaaatgtcgtgactggattcggtgatccatgtggaaaagctttaacgacacataaactagtagaaagaattgcttttactggaggcccagaaacggccagacatattattaaaaattctgctgaaaatttatcacaggttagcctagaattgggtggaaaaagccctgttgcagtatttgaagatgcagaccaagaaaatgcattgaatggtattaccgcaggtatttttggtgctagtggtcaaagttgtattgctggatccagattatatttgcaaaaaagtatttatgataattttttaaacaaattagctgatcgcgcaaaaaaaataaaattaggtagcccgatggacccggatactcaaatggggcctttgagtagtttaaaacaattagaaataattgaaaaaaatataaagcttacagttgatcaaggtggaaaaataaaatgtggaggaaaaagacataacctatcaaataaaggatattattttcctgctacgataatagagtgtgaaaatcataatcttccgacagctgaaaatgagctttttggtccggtgctttcagtaatgaaatttgaaaccgaagaggaagtgattaccaaaatgaatgataaccagtatggattgtcttctggtgtttatactaaagatttaggaagaggattaagagtttcaaaagcaatacgagcaggaattacattcgttaataactt

SEQ ID NO: 199514 - DNA, 694 bp, Unknown
  Bacterial polypeptide expressing nucleotide sequence isolated from the Sargasso Sea
ggcggaaagaatccgataatcatatttcctgatgcagacccaaaacaggcagcaagttatgcagtaaagggaatgaatatgaaccgtcaaggacagtcctgcagttctacctccagggttcttgttcaccatgaccttcatgatgcagttttggaagaaatggttaacttagttgaaaagcttccaataggtttaccatggatcgaagaaaatgagctgggacctgttgtttctgaaatacagtataagaaaatcatggaatttatttcatctgcacaaatggaaggagcacatttgattactggaggaagttcacctaaagatgaagaactaaaggacggttttttcattcaaccaactatctttgatcaagttacacctgaaatgagggttggtagcgaagaaatttttggacctgtaatgtctgtttttaaatgggatgactatgaaaaaatgctatcgattgctaatgggattgaatacggacttactgccatgattgttacagataatctgaagcaggccatggagactgcagaacgagttgaagcaggttacgtatggataaattccacgggacgatatctgggggcaccctatgggggctggaaggcaagtggcattggtcaagaagaatgctttgaagaacttatgagttacactcaaattaaaaacgtaaatatgcgctggtaga

SEQ ID NO: 199515 - DNA, 496 bp, Unknown
  Bacterial polypeptide expressing nucleotide sequence isolated from the Sargasso Sea
aaatttaattcaagcagcaaaaatgaagaatgcgtatcctgtatatggtgtagatatcaatgataaaatgtttgatctcacacatcaaattggagttgatatcttcacttgtgatttggaatttattccagaaaaggttgatgtaattcttgatactacaggagtaccagaggtcatatcaaaagcatttgataaactagcaccaagtggtagattaattatggtaggtcaacctgcaccaggcacagacttgaatatttttaatcctctatctatgtttgatggtcaaggtaaatccataagagcatcacaaggtggtggaactaaacctgatgaagacataccaagatatatcaaacttgctaatagagagatgttagatttcaatacactacatactgatacatttgcattagataatatcaatgatgcatttgacttgctaaaaacaggaaatgcaggtagaataataattaagataggagaagaggactag

SEQ ID NO: 199516 - DNA, 727 bp, Unknown
  Bacterial polypeptide expressing nucleotide sequence isolated from the Sargasso Sea
gatgcctgattgtgatttagatcaggctgttaatggtttgatgggtgcagcttatggatctgctggtgaaagatgtatggctcaatcggttgcagttgcagttggaaatattggagataatttagttaatgaattatcaaaaaaagttgaagcattaaaagttggaccaggcatggacaaaaaatctgaaatgggaccgttagttacaaaagaacatttagaaaaagttaagggttacgttgacctaggagttaaagaaggagcaaaattagtagttgatggaagaaatttaaaactacaaggctatgaaaacggttactatataggtggatgtttgtttgatcatgttaaaaaagatatgagaatttataaagaagaaatttttggtcctgtactttctgtggttagggtaaaagattttgatgaagctactcagctaattaatgatcatgagtttggtaatggaacaagtatttatactagagatggagatgttggaagaacgtttgctagcaatattaaaattggaatggttggtataaatatacctatacctgtgccagtggcattccatagttttggtggttggaaaagatctttatttggagatcaacatatgcatggagcagaaggtgtgagattttacacaaaacttaaaacaataacttcaagatggccatctggattaagatcagatcctgaatttgttatgcctacaatgaagtaa

SEQ ID NO: 199517 - DNA, 606 bp, Unknown
  Bacterial polypeptide expressing nucleotide sequence isolated from the Sargasso Sea
cagttgaagtttcagacttatatgcgatgaactttaatccaatcgcctcacagaatgactttgcaaaccttaaccaacctgaatattttaactatgccttagaacaaagacatgcttacaagcaaaattccctagcaccagatattcaagttgaaatcgaaaaaattaaacgtgccgacctactcatctttagttttccactttattggacatctgtacctgctatcctaaaaggctggattgatcgtgtttttgtttctggtctgttttatggtggaaaacgtttttacaatcatggtggtatggctggtaagaaagcgatgctatgtttcactttaggtggacgcgattatatgtttggcgaaaatgcgatacatggttcaattgcagaatatctatctcccattcaacgcggaacacttgcctacgctggttttgaggtactaccaccctttattgcttaccatgttccttacatttcaaatgaaaatcgaaaaaatatacttataaatttcgaagcctatttaaatgatctacagaacttagaaccattaacatttcctttaatagaaaattttgatgaaaaaatgcgaccattgccttgat

SEQ ID NO: 199518 - DNA, 661 bp, Unknown
  Bacterial polypeptide expressing nucleotide sequence isolated from the Sargasso Sea
ttgatcatagttagtagaacaaagaaagatttagatgcggtatcaaaaacaattaaaaaattaagagttaagtgtaaatcttatgtttgtgatatcaccaattatgaagatttaaaaaatattattaataaacaatctagaatagatgtgctcgttaataacgctggaaataatatccctgaacattttacaaaagtaaaaaccaaaaatatggaatatcttgttaaaattaattcaattgctgcttttaatacagcacaattatgcgcattaaaaatgattaaattaaaaaatagaaagaaaattggtggttctattatcaatatgtcttcacaaatgggacatgtcggtggtccaattagaagtgtttacaatatgaataaatggggtttggaaggattaactagaggaatggctttagatcttgcaaaacataatattagagtaaacacggttgctccaacatttgttgtgactccaatgacaaaaaaattccttaaaaataagaaatttaaaaaagaaacacttcataatattccgctgggtagatttgcggaaatgtcagaaatagcatctacagttgttttcttagcatctgatgcagcttcaatgatacatggaacctctttattagtagatggtggatggacagcaaagtaat

SEQ ID NO: 199519 - DNA, 766 bp, Unknown
  Bacterial polypeptide expressing nucleotide sequence isolated from the Sargasso Sea
cagtttttgcatggtgaacagggagcattattagtagcatcacaactcgtttcatgtgcacttacttttaatgcaaaaatgtatgccgcttcacaaacttttgatgaagctagacatgttgaaggctttaacaggtatcttaaagagaaaattgggtttcaatatcctgcaacaaatggacttaagtcattaatggacaaaatactcactgatgaaagatgggatcttaaatttattggtatgcaaataattattgaggggctagctcttgctgcttttaataatatgaaatttatattgaatgatggattactaaaacaacttttacattatgttattagagatgaggctagacatgtaacttttggtgtgaactatctagaagattacttaaaaacattatcgaaaagtgagattgatgatagggctgaatttgcgtttgaagcctgcgtggtaatgagaaataggctcatctccggggatgttatagcaagatttcttgattacacgccagaagaagcgcaagcagctgcagagaatacagaacaaggacaaaattttagaactcttttatttactaaaatcattcctaatctaaaaagaattggtctattaaatgacaaagtaatgcctaagtacgaaaaacttggggtattaagttatgcagaattagaagataattttgatattgattgggcagacatgtcaaaaccttatgagactcaagaagaaattgaaagattcattaacgccggtcaccattaat

SEQ ID NO: 199520 - DNA, 616 bp, Unknown
  Bacterial polypeptide expressing nucleotide sequence isolated from the Sargasso Sea
aagagttatcaatagtggccaagtatgtaattgtgttgaaagagtatatgtagataaaaaaattgcagatgaatttacagaaaaattaactaaagcaatgcaaaacactaaatttggaaatcctaatacaaaaacagatatagattatgggcctttaatcaatgaagatggctccaagaaagtgagtgaattagttaattcagcaaaaggttctggagcagaaatcttaactggtggaaacagagatgaatcatctgaaggaatttattatcatcctactgttatagctaattgcaagcaagatatgagaatcatacaagaagaaatttttggtccagttttacctttagttgaatttgaagatttagaccaagcgattgaatatgcaaatgattctgactatggtcttacttcttctatttttactaataatttaaaaacagctttaaaagcttgtaatgaaatacggtttggagaaactatgataaatagagacaatatggaaatcttccaatcttttcatgcaggattaagaaagtcgggcattggcggcgctgatggtaagcatggattatatgaatatatgcaaacacacgcagtatatatgagagcgtaa

SEQ ID NO: 199521 - DNA, 400 bp, Unknown
  Bacterial polypeptide expressing nucleotide sequence isolated from the Sargasso Sea
tttgatacaagataaggttgtagttatcactggtggttctagcggaattggctattcaacagcaaaagcacttgctaaaaaaggagcaaaaatagttgctggtgcaagaagattagacagattagaaactttacaaaaagaaattactgatgatggtggagaaataaccatctgtgaaacagacgtaaccagaaaagctgattgtgataatttagttaaacaagcaattgataagtatggaaccgtagatgttttggttaataatgcaggcttgatgcctcttagttttgtaaaatccctgaaaattgacgaatgggataaaatggtcgatgtaaacatcaaaggcgttttgtattgtactgcagcagtagttcctacaatggttgagaaaaaatcaggt

SEQ ID NO: 199522 - DNA, 130 bp, Unknown
  Bacterial polypeptide expressing nucleotide sequence isolated from the Sargasso Sea
atgagttcatataaaattatagaacacgaatatgatgtagtggttcttggagcaggaggagcaggattgagagccgcagttggccttagtgaagctgaaataaaaactgcatgtatatcaaaagtttttc

SEQ ID NO: 199523 - DNA, 583 bp, Unknown
  Bacterial polypeptide expressing nucleotide sequence isolated from the Sargasso Sea
aaagtgattaaagttccttgtgatgtaatgaattatgacgagcttaaaacaaaattagaaaaaatcaaaattattgatgtcttagtaaacaatgcgggaactaatatccctgagccttttgaaaaaattagacaaacaagcatgaactatttggtagatttaaatttaaaagctgcatttaacgttgctcagctagttgtaaaaaaaatgcttaaaaataaaaaaagacctggctctattattaatatgtcttcccaattaggtcatgttggtatgggtgggagaaatgtttacaatatgactaaatttggaattgaaggtttaacaaaaggcatgggtgtagagttagcaaaaagaaatataagagttaataccgttgctcctacatttgttgaaacaccaatggtcaaaaacttctttaaaaataaaaaattcaaaaaactagcccttggaaatattccaatgggaaaagcagctactgaaagcgatgtagcaacaacggtttgtttcttggcttcatctgcttcctcaatgataactggaacatcaattataatagatggtggatggactgctcagtaat

SEQ ID NO: 199524 - DNA, 811 bp, Unknown
  Bacterial polypeptide expressing nucleotide sequence isolated from the Sargasso Sea
atagataaagaagatatgcaagtttttactaccagagttcctgttggtgtagttgccgcaataataccttggaattcccaaatgtttctcactgccgtcaaacttgctccagccttagcaatgggcaatactattattattaaggcatcagaaattgcccctactccattattagaatttgctaaaattatcgataaagttggaattccaaaaggtgttgtaaatataatcactggttttgcagatacttgtagcaaattgcttacttcacatcaaaaaattaataaaatagcatttacaggaggtgtccatacagcaaaacatattgttagaaactctgcagaaaatttatctcaaatatctcttgaacttggtggcaaaagtccagttgtagtttttaaagatgctcgtaaaaacaatgctattaatggaattatggcaagtatattcggagcaggtggtcaaagttgtattgccggttccagactatatttacaagaagaaatttatgatgaatatttagaggcattaaaaaatagagtagaagaaattgaaattggcgaccctttatcaactacaactcaactagggcctcttgctactttaaatcaattacaaaatatagaagaaaaaattaaacaaacaaagaaactaggaggtaaaataattaccggaggaaaaaaagttagtgaatttaaaaatgggtattattttgaacctacaataattgagtgtgcaaatcataatttaccagttgtggagaatgaattatttggtccagttttatctgtaatgaaatttaaagatgaag

SEQ ID NO: 199525 - DNA, 351 bp, Unknown
  Bacterial polypeptide expressing nucleotide sequence isolated from the Sargasso Sea
ttttggaacctacagtgttttcaggtctaagtcatttgagtcgaactgcaactgaagaaatattcggtccagtagttacactccattcttttagaactgatgaggaagctattgaaatggcaaattgtacagattacggtttggcaggttcagtttggactggagattcaaaaagaggaaaatcagtagctgaaaaaatagataccggtatggtctgggtaaacacttggcttcatagagaccttagagttccttttggtggagttaaagatagtggtgttggccgtgaaggtgggcgttggagtctgtccttcttttcagaagctgtaaatatttgtgttaagaagtaat

SEQ ID NO: 199526 - DNA, 756 bp, Unknown
  Bacterial polypeptide expressing nucleotide sequence isolated from the Sargasso Sea
gttttgtttgaatttgcaaagttaattgaacaaacgggaatacctaaaggagtggttaatgtcattacaggttttggcgatccttgtggtaaaactttaacaacacataatctagtagagaaaattgcatttactggaggaccagaaactgcaagacgtattattaaaaattcagcagaaaatctttctgaagtaagtttagagcttggtggaaaaagtccagtcgctgtatttgacgatgcggagcaagaaaatgcaattaatggaataactgctggaatttttggagcaactggacaaagctgtattgcaggttcaaggctttacattcaaaaaggaatttataacgaatttttagataagttatctagtagagcttccaaaataaaaataggagctccaatggatctggatacagagatgggtcctttaagtagttttaaacaattagagacaattgaaaaaaatataaaagatacggttgatcaaggtggaaaaattaagtgtggtggtaaaagagactccttttcaaacaaaggatactacttcccaccaacaattatagaatgtgataatcacaatctgccaactgcagaaaatgagttatttgggcctatattatcagtaatgaaatttgatacagaggaggaagtaattaataaaatgaatgataatcaatatggattatcctcaggtgtttatacaagcaatctatcaagaggaatgcgagtatctaaggcaataagagctggaatt

SEQ ID NO: 199527 - DNA, 337 bp, Unknown
  Bacterial polypeptide expressing nucleotide sequence isolated from the Sargasso Sea
ccgctcctagcagggtgtaatcctgatatgcatgtcgtaaaagaagaagcgttcggtccggttgtagtcgtcatgtcacatgatggagatgaacatgctgtcgaactagcaaatgacagtcattatggactatttagctatgtatacgcaggcaatacaacacgagcttatgacatagcgcaaaaacttgagagtggaaatgtagcactgaataccatagcccctcatatgtatgctccctttggaggatttaaaatgtcaggtgtaggaagagatcgcggtcgttggggcctagaggcttatagcgaagtacaagcgattaattggcctagctaat

SEQ ID NO: 199528 - DNA, 573 bp, Unknown
  Bacterial polypeptide expressing nucleotide sequence isolated from the Sargasso Sea
taaaagtgggaccaggaatggataaatcttcagaaatgggtccattagtaactaaagaacatctcgagaaagtaaaaggctatgttgatttgggagtacaagaaggtgcaaaattagttgttgatggaagggatataaaattacaaggatatgaggaaggttattacattggtggctgtctgtttgataatgtaaaaaaggaaatgagaatttacaaagaagaaatttttggacctgtattgtcagtagttagagcaaaagattttgacgaggctataaatctaataaacgatcatgagtttggaaacgggaccagtgtttatacaagagatggagatacaggtagaacttttgcaaataaaattaaagttggaatggtgggaattaatattccaataccagttccagtagcttttcacagttttggagggtggaaacgttcattatttggagatcagcatatgcatggtccagagggtgttagattttatacaaaattaaaaacaataacatctagatggccttcaggaatcagaatgaatcctgaatttgttatgccaacaatgaaataat

SEQ ID NO: 199529 - DNA, 687 bp, Unknown
  Bacterial polypeptide expressing nucleotide sequence isolated from the Sargasso Sea
tatgactcataaagaaaaattaaattctgtaatcgactactctcgcgattatttctttgattatttcggatttaaaactctcgaaaaagcctatcttctaaaagtaaatggaaaaattgtcgaacgacctcagcatctaattatgcgagtcgcattaggtcttcataaaaataatattaaagccgcaattgaaacctatgaactcatttctcataaatattttattcatgcaacaccaactctctttcatgccggtacttgtaatccagctatgttaagttgtttcttattaggtatgcacgattctgtcgaaggtatctataagtgtcttggtgattgcgcccaaatttcaaaatatgcaggaggtatcggaatctggttaaccgacattcgagctaataatagccaaatcaactgtaatttaggtaaatcctctggtattgttcccatgtgtcgtgtctttaatgattgtgctcgtcatattaatcaatccggaaaacgtcttggttcctttgctttctatattgaaccatggcatgatgatatttttgattttctcaatcttaaaaaaaatcatggtgatgaagctgccagagctcgcgatctcttttatgctgtctatattcccgatttatttatgaaaaaggttcaggcaaatgacacgtggcatctattttgtccgaatga

SEQ ID NO: 199530 - DNA, 757 bp, Unknown
  Bacterial polypeptide expressing nucleotide sequence isolated from the Sargasso Sea
atgagaatattatttataggagctggcaaaatggggcttcctataatatcttcttggaaaaaaggtagtagacaagaatttattgatatacatttagtagaaaagcaagaagctaacataaatataattaaaaaaaaaaatataaagattaatttttataaaaaaatacctaaaaaatggaaaggggacgttgtattttttgcagtaaaaccacaagactttaataaggtagccgaagaaataaatacaaataatgttttatacaagaatatagtatcaattatggcaggcataacaactagtaaaataagaagttatttgaaaacgcaaactagtgttacaagagtaatgcctaatctagcagtagaagttaatttaggagtaaattgtatatttcattctagtaacacaaaaaaattatttaaaaaaaatatcaataccttatttggcatattaggaaataattatgagataaaggatgagaagttattagagaatgttactgctatctcaggtagtggaccggcatacttctttttatatttgaatgtatttgaaaaaattgctcatgatttaggtttttctaaaaaagttgctagaggtttaatatatgatactgttaagggagccttagagttggttaaagtggaaaataatactaggaagcttatagagtctgtttctagtaaaaagggaacaactgaagcagcattaagagttcttgaaaaaaaaaaaacaggattatatgaattattga

SEQ ID NO: 199531 - DNA, 502 bp, Unknown
  Bacterial polypeptide expressing nucleotide sequence isolated from the Sargasso Sea
aatgaagcatgacgaaattgataaaaatgaaacggatagatgtttagatagatttgacaaattaagaaactcagaaggttcaaatccaacatctgaactaagactttcaatgcaaaagacaatgcaatcaaagtgtgctgtatttagaactgagaaaacattaaaagaaggcgttgatgaaattagaagaccttatgatggaatggactctctttctgtaaaagataaatcattaatatttaacacagatttagttgaaactctagaatttgataacctaataagacaagcaataactacaatggactctgcgtatcatagaaaagaaagcagaggagctcatgcaagagaagattttccaaagagagacgatgagaactatatgcaacacacactatcatggtgtaatggttcaaaaactaaaattaattacagacctgttcatagatcaacacttacaaatgatgtacaatattttcctccacaggaaagagtatattaa

SEQ ID NO: 199532 - DNA, 613 bp, Unknown
  Bacterial polypeptide expressing nucleotide sequence isolated from the Sargasso Sea
atgcaaaaaaacttaccatacattaccatagcatttggaattgccgcaatagtagcaattttttcttttttagatctttatgataattttgaaaatagtctacttgatcttcggtttaaaacacgaggtcttgtaaaagttcgacaagatattgctactgtggatattgatacagatgccttaactaatgttgggaaatggagcccttggagtagagaaaaacatttaccattaattaaattatctgaacaacacggagttgaccattttttatttgatttctattttattgaacctagcgaccgtcaattaaatattaaggagatcgattttgaaaaagatacaactacagctcaaattcgggataaatttcctgacccagacaatgatctggcagcagcagcaaaaaaagctgggaacataatttttgctcaaagttttaaaccaaagacagaagctcaatctgctgattccgttaaaaaaagaacagaagcaatgactaaaaggctcttgttaatgaaagaaaaaggccttttccgcattgtaaagaaaaatgaaaaagaaaaattttcatcaatttttagtgcttatgatattgaagcccccagttgat

SEQ ID NO: 199533 - DNA, 937 bp, Unknown
  Bacterial polypeptide expressing nucleotide sequence isolated from the Sargasso Sea
atggtcttttgctggagcggccatgcacaatacattacatcccagcaagactctgaagctggtgacaacgctatcgaagccgacaacagcgagtttgatgcagcagcacgcccactaactaaacctcgcatctcaaacgtgaccatagtaggcgctccgcagactaatggtgttcgtttgcgcgccggaacagcgggtttgatcagcaacatgctggtagtgggtccggaaggatataataactgcttgcgcgttaacggtgacgaaagtgttgccaatgcagaaagtggtgagcttgcgataacgggcagcgttgtgtcatgtgctgacgacgaacagcagtttacatcaggcgaaatcggcggtgtttcaacgcaggaatggttcttagcccaggaaaataaccaagtgttgcctactgctcagctcaaccttgctgcaaatggttatgcgcctcttgcaggttcagtgttgttaaccagcggtgtagacccacgtgacattgaccctgcttttgataatgccaattacgttggtgcgtttgacggtcaaacaaattggatgactggatggacagttggtgtaaacggtggtttcccaacagacgttcaaaacgccttcgagcaaggtctagcggttgatgcctctgcccagttccctcaaataacagacaagcctgtatatctgcttgatacagatgtgacgtttacatcagacgttacgctaactaacgatgcgcactgggtactcagcggccgcactgcggtgggtggtgacaatattgacagtgcaactttgttcattgaaaacggtacgaccatcattggtcagcgcggtgaagattttctagtggtacgtcgtggctcgaaaatcgaagcgcttggtctggaaaatgcgccaatcatcatgacttcaattcaagatgtgactggtgaag

SEQ ID NO: 199534 - DNA, 874 bp, Unknown
  Bacterial polypeptide expressing nucleotide sequence isolated from the Sargasso Sea
gatgttttatagcatattgataaagcaaatgtttttaaaaaaagaatttaatactatctattatattattttattgtttttttcattttttgttaatcaatattttggatttataggtatcaacccaatagatagtttttttagttttaatacgggttatgacatattaaatggtcgttatccttttaaagattattggacaattactggaccattcattggcttaacgcaggctctgatctttaaaattttagatgtatcatggagttcatacgtttttcatgcttctatatttaattcaataattacattaaccacattttatactttaaaaatatttaatcttaacaaacattattgttttatatattcgctttgtgttgctttattagcttacccctcaataggcactccctacgttgaccatcattcaacatatttatcggttatatctattttttgttttattcttgctttaaaaactaacttaagtttttattggttaattttaccaattgttttaggattttcatttctaactaaacaagcaccaactggccatatttttataattatctcaatactttctttggtgtattttatatttcattttaatattaaaaaattagtttatggaatcttaggatcttttattacaatagctttatttttcttttttataacctatcttgaaatacctttaataaatttcgttgaccaatatatattatttccactgtcactaggtgaaagtaggctcgaatatttgtttccatttgaatttcagagagtgataatgagattcaaactgatccatctatctgctttaattctaatatatattttaattaaagaaattttaaacaaagttgaa

SEQ ID NO: 199535 - DNA, 904 bp, Unknown
  Bacterial polypeptide expressing nucleotide sequence isolated from the Sargasso Sea
atgaaatcgtggcgaacactattatttataccttatggtcgaggtggagcaggtttctcggtactagatgtgactattccaaaagttaccgctggagctgagggtgaagttggaacaggcccattacatatgttctctatatataacgactcctataataaagaagttataagaatagatcataagggtaagataataagattaccttatcaaagagcaaccatcgctttagaagagtcaaatgagggtctacatgcagctgatatctattctcaggccgaagcacttgatttagctttacctaaagttacatatgatcctatggatacaccagatgacacctcagatgacgttgaaggagatgcgtttactaatcgagagctaaaagctgcgtgcaaagctgatgatgaatatttatctactccttttttaaatacatcttactctgatggagcaactacttgttacacttcatcagtatttacgtttgataatattaatttaccaaatagtgctattggagcgggtggagctgtcaaagatggaattttaactgtttcagagttaataagtgacgattggactccaatgactggagtaacagcgacatattcaggcacatctttaacagtaaattttggtgaaaacaaaactattaatcagggagtagattctacagccccgaataaaataaaaattgaaactacatgcgaaggtcaaggtttaagtaataaagagtacgattatagtggattaggggaaacatggtctacaccaagaatttttagaatcccttctggaagtggagatagtaatattcaaaacgatcgttatgttgcagtcatgggtggtggaatgggctcaggaactaaatgtgtaggttacaggtgtctttattgttgat

SEQ ID NO: 199536 - DNA, 958 bp, Unknown
  Bacterial polypeptide expressing nucleotide sequence isolated from the Sargasso Sea
cagcagggtcctcgtgcgtgggaagcagctacagaatatttcagagcatcttccgacgttgtaaagttaatcggctttcctcaatttgaacggtgggttgagagcgggattgaactaaccgtcgaagctccagttatagcggctgcatttttcagagccagcccaaacgtacttccagtactagctcccaggcatatctctggttgggcttcgttagggcgaggtctttcgagaggtacatggaaatcttcaagtctggctgccaggttttttgatataagtgatgagttagtccaaaacgtcaatttccatgaaatgcagcttttcgtagcacttgtacaaaagcttgcctcacgttcctatgaccttgctgctgaagctttagtgcttgggcaaagagtgttgcccaacgtcacagaaaaagaagaagttatttcattagcaacagtacttgccgagactagttggcgcgaggtcaggggctcatttgaagcagctagtcgagttaccctgtcgattgaaaagcgtctgcggcctaggtattttgcattggcagaaagattagcgcagaacgggctagttaacgtcgccggattcatggtagatagctcccaatcattagctaaattaccgcaagacgagcaatctcaagtactagagcgagctgaagtgctagccgattcatccgcagaagctgtaagtgcatttctaagaaccgcacctcatgtgctagaccgaattagcctcgcgcagttggaaatatggttcaatcgaggccttgaatatttaatcgacaatcctgatgctggagtagcttatttcaaattagagtcggcgcgcgctgaaaatcttatagatcagctatcttcaagcatcgaattcgagaaggtgcaaagtttacttcgcatgtattcaaatgctttagcgggtactgaagttgaactgaataccactgcag

SEQ ID NO: 199537 - DNA, 778 bp, Unknown
  Bacterial polypeptide expressing nucleotide sequence isolated from the Sargasso Sea
atgcagaattgtaatggcaaatatatacaatttatagattctgatgatgaacccttaccaaataaaacgtctgaacaagtacgagctcttgaaagtaataaaaatttactaatgacatatggaacaactcttattggaaaaaaagatggaaagatggacgtacttgggaaaacaaataaaatcaaacaaaaaattgcccctcttttcccttataacgtatattggacgacatccagtatattgtggaggaaagagtatatatcagaggattcttggttcccattatttggttctgaagacctactttttgaatttttaaatggattaatggattatccgatagtacacacaccatcccaaaaacctattttgaaaaagtggttacatccaaaaaatatttcaaatcaaatcgcaacagactatctttatcaaatggaaatattaaaatgctatgatattatttacaaaaaaatcaaagaaaaaaaacaactatcacaactaaaggtaattgcagaattatatcaaagtaaaataatgttttttttagtacatcgacgttacaatgaagcaaattactgtatttctatgtataatcagataattgaatcaaaattttctattgaaaaaattgcttttttattttctagaatattttcaataaaaagagtatacagaatacttaggatgtattattggtttcaaaaaaaagtaaaaaatttatatagacccttgacgtattctaagaaatttcatccaaacaccaatccttataattgat

SEQ ID NO: 199538 - DNA, 598 bp, Unknown
  Bacterial polypeptide expressing nucleotide sequence isolated from the Sargasso Sea
cagcaagttgcttacttacaggctcagagtcagcctcaagctcaggatgcgccacaagcctatccaagacttgaagactacgactacgacgaagcaagacatcaacaagcagttctacagtacacctcaagcttaaatgctcagaacgtccagcaggtcatgcagcaacaacagcaagcccagattgctcaattacaagctcagaaggcacaaattgcgtctcaagagtttgttgagaaaagcaatgcctttgccttagattacaaagattttcaggcaactgttactaatcctaatttccatcagtcggatcaagtagcaaggacaattgttgaattgccgaatggccctgatgttgcttactaccttggcaagaacttaaagattgccaacgctctgaacaataaaagcgaaagggacgctagagatgatttaattagaatctcaacagcgttacaagtgaactctcggaaacgtcgtgctaacactactaacgctcctacgcccggaaagacggtgacacctaaaggaaaagtcgctaaggacttggacaagatgtctcctgaggaatatcgaaaggcaaggggctatacttaaa

SEQ ID NO: 199539 - DNA, 502 bp, Unknown
  Bacterial polypeptide expressing nucleotide sequence isolated from the Sargasso Sea
tgatcctggcagtgatactcattccagtgcacaacaggttcaaaaacggatgtccgcttctccctatggcactccggcaattggaactcctccctcgggaatcgaagctcctcccatggaaatggatatcccttcctatgaggagcctgaaatgactccggaacttgaggattacagtgaagacgaaggtcttggtatggcagggcttgctgatgaaaatgattccgacgttgtcagtggaaacgggcgcatcaccgatgaatcgcatgagagcttcatccgagatcacaccgaatccgcagtcaaatttctaatgcggaaagatcttgacgattctgagttgaaatccgaggacgaacaggttcatgaagagtggcaaaaacgtgggctttcacggggaaaactccgtaaacatgtgatgaagatgatgaattgggacaacattccagaagtcgctgttgatgaaattttgagccaaatacgtgagaaaatcagttcctaa

SEQ ID NO: 199540 - DNA, 1150 bp, Unknown
  Bacterial polypeptide expressing nucleotide sequence isolated from the Sargasso Sea
atggaccgcgatagtcgttatgatattttatttgatactgttgatataggcccagtcaaatctaaaaatcgtttttatcaagttcctcattgcaacggtggtggttatagagatccatctgctgcagctgaaatgagaggaataaaaagccaaggtggctggggtgttatatttacagaacaatgtgaaatgcaccactcttcagaaattacaccttttattgaattacgattgtgggatgatgctgatattccgatgatcgcaaaaatggctggtaaaatgaaggaatatggtgctcttgcaggtattcaattagcatattctggaatcaatggtcccaatttgtatactaaggaagttcctttagctgtcacaggaatgcctattcgtacttttactaatgatcctgttagtgcaagatcacttgataaagaagatataaaaaatcttcgacgctggttcgtcaatgcggctaagagatctaaaactgctggttttaatcttatttgtttgtacggtgctcatgggtttggaatctttcaacattttttatctacggcaactaatcagagaacagatgaatatggaggaagtttagaaaataggtcaagatttgtaaaagaagtagtagaggaagttagaaatgcagttggtgatactatgggtatcactcttcgtttatcattagatgaaatgattggtgatcttggttttgcaaattctgaagtaagagactttgttgaaatgaatcaggacttgcctgatctatgggacttagctcacggtgcatgggaagattgttccggtccatcacgttttaaagaggaagctgcacaatttgacctcgtcacaggaatcagaaaacttacttctaaaccaatagtaggtgttggtcgatttactagtcctgatgtaatggttaaacaaataaaatcaggtacacttgattttataggatgtgctagaccatctatagctgatccatttttaccaaaaaaaattgaagaaggacgcatacaagatattagagaatgtattgggtgtaatatttgtattaccggtgatatgacaatgtcaattagcagatgtactcaaaatcctacctttatggaagaatggcacaaggggtggcatccagaaaattattgaa

SEQ ID NO: 199541 - DNA, 969 bp, Unknown
  Bacterial polypeptide expressing nucleotide sequence isolated from the Sargasso Sea
gatgtcttttacagactcagatttacgctctcttgtccctcgcgacaagcaatatcgcgtcgcggcgggtgatggtctattcgtagtcgtatatcccaacggtggcaagtacttcgtgtggaagtaccgctacccacctggtcgcagtgggcagcagagatggcaccacatcggaccctatggacgcggttcagggcaatggaccctgaaggcagcacgggatgagagggatcgtctggaccaactgcgcaaggcaggagacgacccaagggtcctgaaggcagatgccaagcgggaggtagacgagaagtccaaggtcccatcccttcaggaggttgccgaggactacctgagacgttccaagaaccgccagacgacggtcagcgactaccgcaacatgctgtttaaccaggtcttacccgtcctgggacacaagtcacccgtcaaccgctttgagtggaacaacgggggcaggcagaaggttctgaacctcaagaagggcattgaggcaagagggtcgctgtatcagtccgacaaatgcctgatggtgatgcggtcgatgttcgagcacgccatcgacaacgcatggatgcaaccgcccaaccctgcattgggttctaagggtgcgaagtccagtcatgtcgccaagcacaacccaacgctggagtggcacgaggtccctcagttgctggaagacctggaatccaagagcaagttgggttcttttatcgtccaatcggcagtgaagatgaccctgctgacctttctacgggttggttctctggcacccaccaaatgggatgaactggattacaagaagggcatcttgaccatccctggttcaaggatgaaaggtaagaaggaccaccttgttccgatcacaaaccaaatcaaggacttgtttgaagacctccgacgagtgaatggagaacaggaatatgtcttctacagtccaagaggaaaaacaaa

SEQ ID NO: 199542 - DNA, 772 bp, Unknown
  Bacterial polypeptide expressing nucleotide sequence isolated from the Sargasso Sea
tatgtctacagtactgattacaggttgctcatctggttttgggcttgaaacagccaaaatctttttagaaaagggttggcacgtcattgccacaatgagaaagcctgatccatcactattaccagcgagcgataatttaacgctgctgcctttagatatcacttccaccagcagtattgataacttgatgcaagaggttgagaagattgatgttttagtcaataacgccggtttcggtgcacctgtgccggttgagctgacaccactcgcgaccgcacaacagttgatgaacacgaacgtgctgggaacattatcattaactcaacggtttcttccgctgatgcgccaacaaggcagcggggtgatcatcaatgtttcttcgtcggtaacaaccaaggcgatgccattaattggtctctatcgtgcgagtaaagcggcgcttaacgcgtggagtgaatccttggcgatagaaactaagccctttggtattcgggtacatgttgtactgcccggacgttcacctgaaacaaaattcggggaaaatgccagagcatactttgcagggatggacgatccggcgtacggcaaaatggtgaatgactttgtgcaaatggcgagtgagacaaactcgcccgtgacatatgctgaagatgtggcgagtaccatctttgctatcgcaatcgatcaaagtacgccgttttactcgtcagccggtgaagatgcaaaactatggttagaagaatcgcaacaacaatctccgttttgccgttaa

SEQ ID NO: 199543 - DNA, 612 bp, Unknown
  Bacterial polypeptide expressing nucleotide sequence isolated from the Sargasso Sea
aaagaaaaataaaatcaaaattgttagaagaaactgctaaattaaatgttggaccttatacagacgaaaaaagtgattttggtcccttaaataataaagcacattttgaaaaagttttaggatacatagatactggagagaaagagggtgcaaaattacttagtgacgggagaaattttaaaaaacaaggttatgagaatggttattttgtaggaccaacaatttttgatgacgtaaaacctgatatgagaatttataaggaagaaatatttggtcctgtattaagtatgatgactacagaaacttatgaagaagctctaaatttagttaacgatcatgaattaggaaacggagctgcagtgtttactaaaagtggaaatattgcaaaacactttactgaaaatgctaaaattggaatgattggagtaaatgtacctataccagtgcctgttgcctaccacagttttggtggttggaagcgatctttatttggagatcattcaatgcatggacctgaaggtgttagattttatactaagctcaaaacagcaactgtgacatgggttgaagataatgcaggacctgaattcactattccagttttatcttaaa

SEQ ID NO: 199544 - DNA, 1333 bp, Unknown
  Bacterial polypeptide expressing nucleotide sequence isolated from the Sargasso Sea
aatgactaaacttaaagaatataaaatgttcattaacggtgaatgggttgagtctgaaagtaaaaaaacttttgaaactcttaatccagaaaataacgagccttgggcgattgtacctgaagctagtagtaaggatgttgataaagctgttcaagcggcacaacaagccttcgagggtgaatggcctaaattacttccaagagaaagagctaggtttctaagagcgattggagatcagcttagagctaacgctgagatgcttggtgaaatagaaacaattgatacaggaaaactttatagagaaacaaaaaaacaagccatctatatcgctgaatattatgattactatgcaggcttggcagataaagtagaaggcactgtgttgccaatagataaaccaaatgttcaagcaataacaactagaataccaataggtgtcgttgctgcaattattccttggaactcacaaatgtttttaacagcaacaaaactagctcctgcacttgcgatgggtaacacggttgtgataaaatcatctgaacttgctccagcagttttatttgaattcgcaaaattagttgaaaaaaccggtattcctaaaggagttataaatgtaattactggatttggagatccgtgtggtaaagctcttaccactcataattcagttgaaaaagttgcttttactgggggaccagaaactgcaagacatataataagaaactctgcagaaaatttatcagaagtaagtttagagttgggtggaaaaagtccagttgcagtatttgatgatgcagaacaagaaaatgcaattaatggaataacagctggaatatttggagcaagtggtcaaagttgtatagctggttctaggctttaccttcaaaaaggtatttatgacgaatttttagataaactttctcaaagagcctcaaaaattaaaattggagctcccatggatcctgaaacagaaatgggtccactaagtaattttaaacaattagaggtaattgaaaaaaatataaaagatacaattgatcaaggtggaaaaatcaaatgcggtggtaaaagacattctttttcaaataaaggatattactttccaccaactattattgaatgtgataatcacaatctacctgttgcagaaaacgaattgtttggacctgttttgtcagtaatgaaatttgaaacagaagaagaagttatttctaaaatgaacgataaccaatatggattatcttcaggagtttatacaagcaatttatctagaggaatgagagtatctaaagcaattagagcgggaataacttttgtaatacatatagattga

SEQ ID NO: 199545 - DNA, 1069 bp, Unknown
  Bacterial polypeptide expressing nucleotide sequence isolated from the Sargasso Sea
atgattaaagttggcattgttggtacgggtggaatagctgaatggcatgcaagtgcttttaaagataataaagattcagacgttgttgcagcatgtgatgtaaacaatgatagattaaatgagttttgtgataaatttaatattgatcatagatataatagtgtcgatgaactattagaaaaatcagatgttgatgcaatctcaaatacaacaccagatgcttttcataaagaaatatcaattaaagcaatagaaaaaaataagcatattttttgtgaaaaacctcttgctgaaaatcatgcagacgcacaattaatgtgcgaggcacttaaaggaagaaacctaattaatatggtaaattttagttaccgtaattcatctggctatcaagaactctgcaaaatggttcaagaaggtaacattggaaatgtgattcacatggatgccaattataatcagtcctggttaacttcaaattactggggaaattggaaggagcaagataaatggctgtggagattatctacaaaacatggcagcaagggtactttaggtgacattggtgtgcatatatttgattttgcttctaggcctattggaaaaatcaaaagacttaattcatatttaaaaacttttcactcaaagggtgaaaaaattaaagattatgtattagatgcaaatgacactttcttatcaatggtagaatttgataatggagcaattggcactgttaatgctactagatttgcaactggttattcaaatagattggaattaagaatatttggtgacaaaggtgctgttaagattgaatttgatgatccaatttcagaaggtaacaaatttatgtatacaaaagatattgaaagagaatttaatagtaaagatgataaaataaaatgggaggaaattaaatgcccttcttccttaactaattttgaaagatttatagagtctataatgaataataataatcacgagcctgatttcaaacgaggagcagaaatccagaaagtgcttgatagttgctatgcaagtagtgaaaatggatgttgggttgaagtatagt

SEQ ID NO: 199546 - DNA, 610 bp, Unknown
  Bacterial polypeptide expressing nucleotide sequence isolated from the Sargasso Sea
tgagtactcagggcaatcttgtgatgctccaacaagaatgttagtagaaaaatctatttatcaaagagctgtgaatgaagctgtagatgaagcaaaaaaaattaaagtagatattgcatccaaaaaaggtgaccacattggtcccgttgtatctaaagttcagtatgacaaaataatcaaattaattgaaagtggaataaaagaaggtgctactttagctgccggaggtcctgaattgccaaataatttaaataaaggatattttataaaacctactatttttacagacgttacaaatgatatgacaattgcaaaagaagaaatttttggaccggtattatcgataatcccatttgaaacagaagatgaggcagttaatattgtaaatgacacctcttatggactaggaaattacttacaaacagagaataaagaaaaagcacatagagttgcaagaaaacttagatcgggttgtgtttatattaatggaaatggagctgacgcaggaacacctttcggaggctatcgtcaatcaggcaacggacgagagggtggcatttggggtcttgaagaatatctagaagtaaaaacagttactggttggaaataa

SEQ ID NO: 199547 - DNA, 1492 bp, Unknown
  Bacterial polypeptide expressing nucleotide sequence isolated from the Sargasso Sea
atgcttaagattacccactatgtaaatggtcaacacactccagccagtacaagaaaccaagaaatttttgaaccggccactggcgaatgccgaggtcaagtatccctcgccagtaacgatgaagtcgctgccgctattgccatcgccaaaacggcttttgaggcttggtcacaggtaacgccccttaatcgcgcccgtgtgctttttaaattcaaagcgttagtcgagcagcatatggatgaactggcgcagctcatcaccctagagcacggcaaagtgatcgatgatgccaaaggagaacttatccgcggcctcgaagttgtcgaatttgcctgtggtatcccgcacttactcaaaggggagcacacgcaacaggttggcggtggtgtggactcctggtccgttaatcaagctttaggtgttgtcgctggcatagcgccctttaacttccccgtgatggttcccatgtggatgttcccaatcgccattgcctgcggcaacacctttattatgaaaccctcagaaaaagatccaagttcagtgatgcggattgccgagttgctcaaacaagctggcttacctgatggagtgttaaacgtgatcaatggcgacaaagaggccgtcgataccctgctcactcatccagatgtgcaagccataagctttgttggttccactccaatcgctgagtatatctacagcaccgcatccaaacacggtaaacgggtacaagccttaggcggtgccaaaaaccatatgctgctgatgccagacgcggatttagatcaagcggtaagcgcactgatgggcgcggcctacggcagtgcgggcgagcgttgtatggcgatatcggtggtgttggctgtgggcgatgtgggcgataaactggtcgacaagttattaccacaaatccaacaattaaaagtgggcaatggcctcacgccagagatggaaatgggcccccttatttccaaacaacacttagccaaagtcactgactatgtagaaactggagttcaggaaggagcaaccttactggtagacggccgacaattaaccgttgccgaccatcagcagggctatttcttgggagcttgcttattcgataacgtcaccccggagatgcggatctatcgcgaagaaatctttggcccagtgctatccattgtgcgcgttaaagattatcccactgcactcacgcttatcaaccaacatgaatttggcaatggcactgccattttcacccaaagcggtgaggctgcccgtcatttttgccaccatgtgcaggtgggtatggtcggcgttaacgttcctattcctgtgcctatggccttccattcatttggtggttggaagcgttcgctctttggtcctctgcatatgcatggccctgatggggttcgtttttataccaaacgcaaagccattacagctcgctggcctgtaggcaagcaaactcaggccgagtttgttatgcccaccatgaaataac

SEQ ID NO: 199548 - DNA, 1432 bp, Unknown
  Bacterial polypeptide expressing nucleotide sequence isolated from the Sargasso Sea
gatgttagataaaaaaaaattttatattaatggtaaatgggtctcttctttaggaaaaaatgagttaaaagtaataaacccctccacagaagaagcctttgctacaatttcattaggaaatgaagtggacttaaataatgctgtaaaagctgcaaaagaagcttttgctcaatggaaagatgtctcaaagaaagaaaggattatttttttggaaaaacttctaaccgtttataaaaaaagatttaatgagatggctgaatcaatgtcgatggagatgggagctccaattgattatgcaacagcagttcatgctgtatctggtcagtctcatatagaagattttatactaagattaaaaaattttaaatttgaggaaagctttgactcaaagtctaataattacattagttatgacccaattggagtatgtggtttaattacaccatggaattggcctatcaatcaaatagcgttaaaagttattccagcattagcaactggatgtacaatgatacttaaaccttctgaaatatcaccgatttcaggaatgttatttgcagaaatgatagatgaagctggctttccagctggagtttttaatttagttaatggagatggcgatggaataggatctcaaatatcagaacatccaggcattgatatgatttcatttactggatccacaagggcaggtaaattaattacaaaaaatgctgcaaacacaattaaaagagtttgtttagaattaggtggaaaaggtggaaatatagttttcgcagactcttatccaaacgctgtaagagatggaataagaaatgtaatgagtaattcagggcagtcatgcgatgcaccaacaagaatgcttgttgaaaaatctatttatcaaagagctgttaaagaagctgcagatgaagctaacaagatcaaggtagatgtggcatcaaaaaaaggagatcatattggtccggtggtatcgaaaatacaatacgataaaattattaatttaataaaaagtggaattagtgaaggcgcaactttagcagcaggaggacttggccttcctaacaatttaaaaaaaggctattttattaaacctacaatatttactgacgtaacaaatgatatggaaattgcaaaaaaagaaatttttggacctgttctttctattatccaatttgagacagaggaagaggcaatcgaaattacaaataatactgaatacggtcttggaaattacttacaaacagaagacaaagaaaaagctaaaagagtagcaaaaaaattaagatctggaattgtttatataaacggcaatggtgctgattctggtacaccttttggagggtatagacaatccggaaacggacgtgaaggcggagtttggggtttagaagaataccttgaagtgaaaacaataacaggttggaaataa

SEQ ID NO: 199549 - DNA, 1252 bp, Unknown
  Bacterial polypeptide expressing nucleotide sequence isolated from the Sargasso Sea
gattgtgggtgactgtgctgatccgcaggtgtgtcgcgacatcgtctcgcgcgccgtcgacagctttggcaagctcgacgtcttggtcaataacgccggtgccgcgggccccaaatacaccctgcgtgatatcccgttcactgatgtggaaatgcgtgcggccgggtccgaccagaccatgttcgactctgccatgaacctgctcggtgcaccctggaatatggcacgagcagcagcggcacacctgagtgatggcggcacgattgtcaacgtttcgacaatcttttcgcgtacccattattacggccgcattccctacgtagtgcccaagtcgggcctcaacgcgctgggtaaaggcttggcgctggagctgggtgaagagcgcggcattcgcgtgaataccctattccctggcccgatcgagtcagagcgtatcgacacggttttcgccacgatggatgagctgcagaacatccctcctggcagtaccagtcaggaattccgcgatctgatgatcaccacgcgtaatggcgaagagggtcttgagtatcgctacccgaccccgaccgacgtcgctaacggtattgtttggttggcctctgaagagtccgcggcggtgtccggccaccacgttgaggtcaccaatggcatgcaggtgccggcacagagccgttcacaactcgtgtcctggccagataaacgccttgaagacctcaccaacaacgttgtgctgattctgggcggctcagactacgagcaggcgctgacctacgccgagcgtcagattaacagtggtgctcacgtgctgttggcattccgctcactggaatccgttggtcacgctcgcacactgatccaaactaaagggttagacgaaatccagctgtcgcaccttgatccgctgcggcgcgaatcggtggatcggacgatgcaatttattgacgaccacttcgggcgtcttgacggtgtgattgttttgccgcgcaagcctaatggccactacggccactcgctctgcagcgctaccgacgaagacgtcgagaactttgttcgcgaagaagtggtggcaccggttgctttcgccagcatgctggccagtaatctgtcgcgctggtttggcaaatgcgagccgccggccatcacttacgcgaccaacggcagtgacacgcagggcaacctgctcaatgaagtcattcgcgcctccatcgaagcattgatccgcggctggcgtcacgaagacgagaccctgctc

SEQ ID NO: 199550 - DNA, 1222 bp, Unknown
  Bacterial polypeptide expressing nucleotide sequence isolated from the Sargasso Sea
ggagaaattgaaactattgatactggaaaattatttcgagaaactaaaaaacaagcaaactatattgcagaatattatgactattatgccggcatggcagataaagttgagggaacggttttgcctatagataaaccaaatattcaagcaataaccacaagggtaccaataggagttatagcagcaattattccttggaactcccagatgttattaacagtaactaaactagctccagctttagcaatgggtaatacggttgttataaaatcatctgaacttgcacctgcagttttatttgagtttgcaaaattggttgaagaaacaggaataccaaaaggtgttgtaaatgtcatcacaggttatggggatccatgtggaaaagctctaacaacacataacttagttgaaaaaattgcttttacgggtggtccagaaactgcacgacacataataagaaattcagctgaaaatttatctgaagtaagcttggagctaggaggaaaaagtcctgtagccgtatttgaagatgctaatcaagaaaatgcaataaatggaattaccgcaggaatttttggtgcaagtggccaaagctgtattgcaggttcaagactttatttgcaaaaaggtatttataatgaatttctagataagctttctgaaagggcagaaaaaataaaaattggagcaccaatggatcctgaaagtgaaatgggaccgattagtaattttaaacaattagagataatagaaaaaaatattaaattaactgttgaacaaggtggaaaaatcagatgtggaggtaaaagacattcattttcaaatgaaggatactattttcctccaacaattattgaatgtgataatcataatcttcctacagcagaaaatgaactctttggcccaatactatctgtaatgaaatttgaaaatgaagaagaagtaataaaaaaaatgaatgacaaccagtatggtttatcttctggtgtttatacgagcgacttttcaagaggtatgagagtatctaaagcaattagagctggtattacatttgtaaatacttatagattaatatcaccatctgctccatttggtggaatgaaagacagcggctacggtaaagaagcaggaattgagtctataaaagattatacaagagtaaaaacgacttggtattatacttcagataagccgacacttgacccattttcaatgagataaa

SEQ ID NO: 199551 - DNA, 1495 bp, Unknown
  Bacterial polypeptide expressing nucleotide sequence isolated from the Sargasso Sea
aatgaatttaatagaacattttattgatggaaaaattgtatcaggctcttctgatagaaaaggaaaagtatttaatccagcaactggaaatcaagagtcagaagtaagattagcttcaaaatctgatttagatttagcagttgaaaaagcaaaaaaagcttatgaaacatggtcaataaaaccaccattacaaagagctaggataatttttaaatttaaagaaattattgaaaaaaattttgatgaattaacaaaattaattgtttctgaacatggaaaagtttatgaggatgcaaaaggatctctaacaagaggtttagaagttgttgagtttgcctgcgggataccacaaatgttgaagggtgattttacagaaaatgttggaaccaatattgatagttggtctatcagacaaccattaggagtttgtgcaggtataacaccatttaattttccagccatggttcctatgtggatgtttcctatggctatagcttgtggaaatacatttattttaaaaccttctgaaaaagacccttcatgtcctttacgtttagcagaattatttagtgaagcaggattaccagatggtgttttaaacattgttaatggagacaaagaagtagttgatgcaatattaaaaaataaagatattccagctgttagttttgttggatcaacaccaatagctaaatatatttatgaaaatgctgctaaaaatgaaaaaagagttcaagctttaggcggagctaaaaaccattgtgtagtaatgcctgactgtgatctggatcaagctgttaatgggcttatgggagcagcttatggttctgcgggagaaagatgcatggctcagtcagtggcagtagcagttggaaatattgctgatgatttagttagtaatttatctaagaatgtagagtccttaaaaattggtccaggaatggacaagtcttctgatatgggtccgcttgttacgaaagagcatttagaaaaagtaaaaggatatgtagatcttggagttaatgagggagccgatcttgttgtggatggaagaaatataaaactacaaggatatgagaatggatattacataggaggttgtttatttgataatgtgacaaaagatatgagaatttataaagaggaaatttttggtcctgtactttctgttgttagagtaaaagattttgatgaagctgttcaattaattaacgatcacgaatttggaaatggtactagtgtttatacaagagacggggatgttggtagaacatttgcaagcaagattaaaataggaatggttggaataaatataccaattccagttccagttgcttatcatagttttggtggatggaagagatcattgtttggagatcaacatatgcatggaccagaaggagtgagattttatacaaaattaaaaactattacttcaagatggccatctggagtcaggtctgatccagaatttacaatgccgacaatgaaatag

SEQ ID NO: 199552 - DNA, 670 bp, Unknown
  Bacterial polypeptide expressing nucleotide sequence isolated from the Sargasso Sea
tttgatgattgcaattttgatttggcggtgcaaaccgctttagatgccaatttttatacagctggcgaggtctgttcaaatgccactagggtctttgtccaacgctcaattgccgagaaatttatcgccgcgatggtggaaaaagtcgaagatatggtcgttggcgaccccatggcagctgatgtccagatgggcgcattgatttcagccgcgcatctgtcaaaggttctggattatgtgcaaattggtgttgccgaaggcgcaaaaattgccaccggcggcatacaaatccacccacagggctgtgaaaatgggaattttatggcgcccaccattatgacaaattgtcatgacacaatgcgtataacacacgaagaaattttcggcccagtgatgtcagtgctggtttttgatgatgaacaagacgccattgaccgagccaatagcaccgatttcggtctaggcgccggggtgatgacaaccgacctggctcgggcgcaccgggtggccgatgcgcttgtatccggtaatgtgtgggtcaatagttttaatatattgccgcccggcttaccttttggcggagccaaaaaatctggctttggccgggaaaattcactctacacactggatgcctatagcgagataaaatcagtacatatctccctgtagc

SEQ ID NO: 199553 - DNA, 1501 bp, Unknown
  Bacterial polypeptide expressing nucleotide sequence isolated from the Sargasso Sea
atgaccacacaagttaagcattacatcgatggcgaattcaccacaggcacaggaacatcacaaatcgtggtgaccaatcctgccaataacgagtcaatcgcccttatcaactgcgctacggccgatgaagtgcacgcggccattgccagtgccaaggcggcttttaagacgtggaaagaagtgcccgtgtctgagcgtgcccgtgtcatgttgcgctaccaacacttacttaaagaacaccacgacgaactggcgactatccttgccaaagaaaccggcaaaacctttgaagatgccaagggcgatgtgtggcgtggaattgaagtggcagaacatgcctgcaacattgcctcattattgatgggcgaaactgttgagaacgttgcgcgttcaatcgatacctacagctacactcagcctctgggtgtgtgtgcgggcatcacgccatttaacttcccagcgatgatccccttgtggatgttccctctggcgatagcctgcggtaacacttttatccttaagccatcagagcaagacccaatgacgccgcagcgcttagttgagctatttgtcgaagcgggcgcgccaaagggcgtattacaactggtgcatggcgataaaacggcggtcgatattctgctggcagaccctgcggtgaaagccatttccttcgtcggctctgtggctgttggtcaatacatttacaaaaccggtaccgataacttaaaacgcgtgcaagcctttgctggggcaaaaaaccactgcgtgatcatgcctgatgcgaataagcagcaagtgatcaacaacctagtgggcgcatcggttggcgctgctggtcaacgctgtatggcgatttcggtcgcggtatttgtcggcgcggctaaagagtggatcccagagcttaaagaagccttagctaaggttcgcccaggtttatgggacgataaagaagccggttacggcccgctgatcagcccagccgctaaagtgcgcgtgctcaaacttatcgcccaaggtaaggaagaaggcgcagagtgtttactcgatggcagcgactttagcgtggcgggctatgagtcgggtaactgggtaggaccgaccatgttcactaaggtcacgaccgatatgagcatctacaaagaagaaatctttggccctgtgctttgctgtatggagtcggattcattagaagatgccatcgaactggttaacgccagcccctacggcaatggtacctctatctttaccgcaagcggcgccgccgcccgtaaatatcaacacgaaatcgaagttggccaagtcggcattaacgtgccaatccctgtgccattacctttcttctcattcacgggttggaagggcagtttctacggcgaccaacacgcttacggtaagcaagcggtacgtttctacactgaaactaagaccattacttcccgctggttcgagtcggacattgccgtggccgcaggtccaaatatgagcattaacttgcgctaag

SEQ ID NO: 199554 - DNA, 1309 bp, Unknown
  Bacterial polypeptide expressing nucleotide sequence isolated from the Sargasso Sea
aatgtccacatctaccgctgcaagctccacacagtctcactccctttccatcgatgtggccattattggcgcaggcccctcgggctcgattgccgctagcctgttgcataagcaaggcaaacgcgtattagtgctagaaaaacaacactttccacgcttttctatcggcgagagcctgctgccctgctgtatgcaatttattgaagaagcaggcatgttagaggcgctgaatgcagcaggattccaatataaaaatggtgccgccttccgccgcgatggggtatataccaccttcgactttaccgacaaatttaccccagggccgggcacaaccttccaagtgcaaagggcaaacttcgacaaattgctcgccgatactgcggcaagctttggggtggagatccgttacggtgaaaccgttgaggcaatcgatttaagcgccaacccatgcttaagcgtacgtaacgaacagggcgaactgtaccaagttgaggcgaaatatgtgctcgatgccagcggttttggccgagtattgccacggctactcgacctcgaaacgccgtcttcactgccgacccgcagcgctatcttcacccatgttgaagataacatcagcgatcccgacttcgaccggaacaagattttaattagcgtacacccacagcatcaggatatttggtactggttaattccctttagcaacggccgctgctcgctcggcgtcgtggctgagccgcaattactcgcgcgtctcgaaggtgatttagagcagcagctactgaccatagtcaaagaagaacccggcctgaaagcattactggccaatgccaaagtcgctcagccctgtgcgacactcaagggctattccgccaacgtatcgcgcctcgccaccgacaagtttgccctgctgggcaacgcgggcgagttcctcgatcctgtcttctcatcgggcgtcaccattgccatgcagtcggcatccatggcggcgaaatgcgtgcttaaacagctgaatggcgatacagtcgattggcccaccgagtactcggcgccgttaatgcaaggggtgaacaccttccgcacttacgtgcaggcttggtacgatggtcgcttccaagatgtgattttttacgaaaatccgaatcctaaaatcaaacagatgatctgctcgattttggcaggctatgcttgggatgtgcaaaatccctttgtaaaagattccgagcgacgcctgaatatggtggtcgagctatgtcggcaagaagccgaactcaccgccgaacctgctgttagcgaattagccgaggtgtaa

SEQ ID NO: 199555 - DNA, 1399 bp, Unknown
  Bacterial polypeptide expressing nucleotide sequence isolated from the Sargasso Sea
tatgtcaacgaactatgatcacgagtatgacgtaattgttgtaggctctggcaatggtgcgctaacttctgcaatttgctcgcatgatggaggagcaaaggttttggtcattgaaaaatcaaatcaatttggtggaacaagcgctacttctggtgggggagtttggatacccaataatagatatgctaaagcagaaaatgtagatgattctgttgaagatgctagaaattacattcaaagcgtttcacctgaggggaagattaataatgacttaattgagacatacattgaacaaggcccaagaatggttgactatcttcatgagaactcgagagttaaatacaggaaccttccccattatcccgactactttccagataatcctggtggcaaggagggcaatagatcaatggagcctgaacccattaagggaacagaattaggagatgactttaaatatttaagagggcaacacccacaaacagcattcaccatgggtccaataaatatgaactttacccaagtagaaggtcaattattacttggggcattacccggatggaaaacacttttcgcaaaacttttcaccaagtatattttagatattccaatgcgctttattcatggttggagggatagacgattaactatgggaaatgcaggcatagctaggttgctcctttcatgcaaggatcgcgatattccaatttggcgtaatacctctatgactgatttgatatatgagaatggtaaggtggaaggaattattgctcttcaaaataatgaaacaattaaaattaaagccaataaaggagtgattcttgcatctggtggttttgaaaaaaaccaaacacttagagaaaaatatttacctaaaccaacagatacagcctggagtgcagcaaatattcacaatactggtgacgcaatttcagcaaccaaagatctgaatgtagctcttcatcagatggatgctgggtggtggactacaaccatgaatatacctggccacgagaaaggatggctatcaatagtagataaatctgttcccggaaactatacagttaataaaaacggccgtcgattttcaaacgaatcccagaattatgtaagttttgtaacagatatgtttgatgagtatgaaaaaggtaatccttgtgctccttgctatatgatttttgatagtaatttcagaaaaaatagaccctgtggtccattactccaagcttcaatgcagcctgattccagagtaccaaaagagtggtgggatccttcttttctatctaaagctgatactcttgaagagcttgctgaaatagttggcattgatgcaaaaggactcctcgaaactcaagtcaaagtaaatgaatacagtaagactggcaaggatttagatttc

SEQ ID NO: 199556 - DNA, 1165 bp, Unknown
  Bacterial polypeptide expressing nucleotide sequence isolated from the Sargasso Sea
atgagtgataatattttacctagtcaaaagatttttagtattaaggatgcaagagatctatcacgcaaacgtttacctaaattagtttttgattttatagatggagcatctggagatgaaaaacttgctgaaataaatagtattgctttagaccaaattaggcttgaacccaaagttttaagaaatgtagaaaaaagatcacttaagaaaaaagtattaggttatgaatttgactttccttttggatttgcacctatgggcatgacaaatctatcttggcctaaagctgactcaatgttagcagcagaaagtgcaagaaataatattccaacttgtgtttccatggcatctactacaactttagaaaaaatgtatgaactatcagagggtcattcatggatgcaattatatattttccaagatgaaaattttgttatggaacttttggatagagctaagaatactggttacgaagttgctattttaactgtagatgtgccagtgctatcaagaagaactagagatgataaaaatggtttcgcctacccctttaagataggcccaaaacagttttttgattttgcaactcatcctacttggtctttatcaactttgcttagtggaattcctaaacctatgaactacgtaacatcaaaaagtggagatggaatatttaaaagaaaagaaagcaggggtaccactgattgggatacacttaaaagagtaagggacaaatggaaaggtaagcttgtaattaaaggagtaatgtctcctgatgatgcaataaaaattaaagaagctggtggggatgctattcaagtttcaaatcatggtgggagacaattagacagcgcaactgcagcaataaatatgcttccactgatcagaaaatccgttggaagtgattttcctctaatatttgatagtggtataagaagtggaagtgatattgtaagagctcttgcgttcggtgcagattatacaatgattggtaggcccgtaatgtatgcaatgggagctgatggaaaaaaaggattaagaagaatagttgagattattaaagaagaagttagcacaactctaggcttggttggattaaatgatattaatgatgtaacatctaagatagtaatagaaaatactattaataaggtaacttactaaa

SEQ ID NO: 199557 - DNA, 382 bp, Unknown
  Bacterial polypeptide expressing nucleotide sequence isolated from the Sargasso Sea
tatgcagtcaaagtgtgcagtatttagaactgaaaaaactttaaaggaaggagtagaggaaataagaaaaccatttgaaggaatggactcaatatcagtaaaagataaatctttaatttttaatactgatttagttgaaaccttagaatttgataacttaataagacaggcaatagttacactagattctgcatatgaaagaaaagaaagcagaggagcacatgcacgagaagatcatccaaaaagagatgataataactttatgaaacatacattgtcttggtgcaaaggaagtgaaacaaaaatttcttatagagatgtgcatagatcaaccttaactaatgatgtacaatattttccaccacaagaaagagtttactaa

SEQ ID NO: 199558 - DNA, 1495 bp, Unknown
  Bacterial polypeptide expressing nucleotide sequence isolated from the Sargasso Sea
atgagaaaaattaaccattttatagatggcaaagaatatttaagcaagtcagatagactgggagatatattcaatccagcccagggtgaaaaaattgctgaagttagtctagcaaacaaaagtgatgtagatgctgccatagaaagtgccttgaatgtaaaacaaaaatgggcttctactccacctctaactcgttcaagaattttctttaaatttaaagaacttattttaagagatatggataaattggcccgcgctcttactgaagagcatggcaagatactaagtgactctcaaggttcgatcactaggggcatggaagttgttgagttcgcatgtggaattcctcatcttttaaagggagaattttctgaaaatgttggatctgaaatagatagttggagcatgagacaacctctgggtatctcggttgggatttctccttttaattttcctgcaatggttccaatgtggatgtttgttgtgtctattgcatgtggaaattgttttattttaaaaccaagtgaaaaagatcccactgttcctatgatgttggctgaacttttaactgaagctggcttaccagatggtgtctttaatattatcaatggagataaagaagcagtggatttattaattacaagcccacatgtagactctgttagttttgttggttcaactccagttgcagaatatatttatcatacttcaactcaatataataaaagagttcaatctttaggaggcgcaaaaaatcatatgattattatgccagatgctgatcttgatcaagtagttgatggccttatgggtgctggttatggttctgctggtgagagatgcatggcgttatctgttgctgttgcagtaggagatgttggagacaaattaattgaaaaacttactccgcgagttcaatcactaaaagttggaccaggaacagatcctgaagttgaaatgggaccggttattagtaagcaacatttgaacaaagttagatcttatgtagattctggtgttgaagaaggagccaagcttattgttgatggtagacctatatcacttcaagggtacgaaaatggatattttattggtggctgcttatttgataatgtcacaagtgagatgaaaatttataaggaagagatttttggtcctgtattatctgtagttagaaaaccaacatttgatgatgcgcttgaaatgcttaataatcatgagtttggaaacgggactacaatttatactcgtgatggtgacacagctcgtgcatttaccaacaaatgtcaaattggaatggttggagtaaatgttccaattccagtaccaatggcatttcatagttttgggggctggaaaaggtcattatttggtgatcacgctatgcatggaatggagggtgtaaggttctttactaggcttaagactgtcacttcaagatggcctacaggaattcgtaaaggtgcagagtttattatacccactatgaaataat

SEQ ID NO: 199559 - DNA, 739 bp, Unknown
  Bacterial polypeptide expressing nucleotide sequence isolated from the Sargasso Sea
tatgaacaaagcgcgggtggtactcataaccggctctagccgaggtataggggcagccaccgctgtttattttgcgcgccacggatatgatgtatgtattaactataagacccatttaactcaagcagaatacgttgccgatagagtaaaaagttatggtgtacgagccgaactagttagggccgatgtatctcaagagatcgatgttaacgatttattttcacgtatagataaagtatttggtcggctcgacgtgcttgtaaataatgccggtgtgcttaaacctcaaatgccgctgctaaacatggacgcaaagcgaattaacgaattactcactacaaacattaccagtacatttatatgtagccgagaagccataaagcgtatgttacccggtagcagtattgttaatgtgtcatcggtagcggctaaaacaggttcacctaatgaatacattgattatgcagcgacaaagggcgctattgatacattaaccatgggtctcgccaaagaggttgcttgtaaaggcgtgcgcgttaattgtgttaggcctggccttatttacactgatatgcacacagatggtggtgaagaggggcgggtagaacggcttaaaagtaaccttcctctgcgtaggggtgggcaacctgaagaagtggctgctgcaatatactttttagcatcacattctgcttcatttactacaggcacttttattgatgtagctggtggcttataa

SEQ ID NO: 199560 - DNA, 959 bp, Unknown
  Bacterial polypeptide expressing nucleotide sequence isolated from the Sargasso Sea
gctgaccggctcgtataactgggactactcggttcaggacgaccgcattaaaaagctgtatgagcttggtaagcagctcaactgggatccgcaaatggatatcaactgggatcagccttggccagaggaggaaggtcaggctgagctcatgaatttgcatgactaccctccctatcttgcgttgtccaacaaggagcgcgacgaattctggttgcacatgaacgcctggtctctgtcgcagtttctacacggagaacagggggcccttttggttgcgagtcagctctgttcctgcgcgccaaccttcaatgcgaagctgtatgcggcatctcagacgtttgacgaggcccgacacgttgaggtctttaatcaatacatccaaaagcgtatcggattgatgtatccgattaacactcatctcaatagcatcatcgacaaaattctcacggacccacgatgggacctgaaatttatcggcatgcagattgtgatcgagggactggctttatcggcgttcaatacgacgcgtgagacaacccccgacccggtgctgaaggatatcgtttacctcgtgacccgtgacgaagcgcgccacgtgacgttcggcgtgaattacctcgaggagttcgtgcaaacactgactatcgaagagcgggaggagcgcgccttgtttgcgttcgaggcctgtgccatcagtcgcgagcgcctggttgcaacggatgtgttccgtcgctttggctgggacgttgaggagagtcgtcgcaaagtgcttgatgggtttgtcatgtccactttccgcaacctgttgttccagagagtggtccccaacctgaggagaatcggcctgctcaccgatgcggtgcgtcctcgatttgaagagttgggtattcttgactacgagtcgctggctgatgacggcgacatcgactgggctaagctggagcgtccgctggacacct

SEQ ID NO: 199561 - DNA, 1339 bp, Unknown
  Bacterial polypeptide expressing nucleotide sequence isolated from the Sargasso Sea
aatggaaatagtccctcttctgctacttgtaataatttgtgcttctttactggtaggttttccagtggcgcttactctggcaggtgtatcaataatatttgcattgatttgcattcccttaggaatttttgatccaactatttttaaaagtattccaattagaatttttggaattatgaataatgtaacattgcttgcagttcctctatttatttttatgggaactattcttgaaaaatctggtattgctgcaaagatgcttgaaaatatggcaaaggcttttagaagtataaaaggcggattgtctatatcgataattattgttggcgctttacttgcagcaagtacagggattgttggcgcgactgtagtcactatgggtctaatgtccctcccaattctaataaatcaaggatacgataaaagcttctcagctgggttggttgcatccactgggactcttggacaaataattccaccatccatagccttagttttgcttggtgatgttatgtcaaatgcttatcaaagagctcaaaatgacatgggtatattttcccaacaaaccgtaactgttggagatttgtttataggtgctattgttcctggaattctgatatgtattgggtatcttatttatacactttataaaaatagcaataatttagatttaaaagatacttcaacagaatttgctataaataaagttgaattatttaagacgctagccctcccagtagtcttaatttttttagttctaggctctatatttgcaggtattgcaacgcctacagaggcggctgcaattggagcatttggtgccttattaattgcattaataaacagaaaagttaatttacatttcttaaaagagacttctgagaaaactgcaattgtttcaacaatgatttttacaattcttattggtgcatcaattttttcactaatatttagaggtgttggaggtgatgagttaattgacctaatctttaattctctccctggaggatcatttactgctctaatatttgtcctagttattatttttttgcttggttttattttagattttattgagatttgttatgtaatagtgccactcgttgctccacctcttttgatgatgggctttgatcctgtatggcttgctattttatttgcaataaacttacaaacatcatttttaactccaccatttggattttcgcttttttacttgagaggggttgcagataagagcatacaaactaaagaaatatataaaggtgttattccttttatattaattcaaattattattctttttgcagttatgttgtttccaattttaataatataa

SEQ ID NO: 199562 - DNA, 1165 bp, Unknown
  Bacterial polypeptide expressing nucleotide sequence isolated from the Sargasso Sea
tatgagtgataatattttaccaagtcaaaaaatctttagcataaaagatgcaagagaattatcacgtaaacgtcttcctaaattagtttttgattttattgatggtgcatctggagatgagaaacttgctgaaatcaacagtatagctctagaccaaattagattagagcccaaagttttaagaaatgttgaaaaaagatctcttaaaaaaaaggttttaggatacgaatttaattttccgtttggttttgctcctatgggaatgaccaatttatcttggccaggagcagattccatgttagctgctgaaagttgtagaaataatattccaacttgcgtttctatggcatcaaccacaacattagaaaagatgtacgaactctcagagggacattcgtggatgcaattatatattttccaagatgagaattttgtgatggaactcttggagagagcaaaaaatactggttatgaggtagtaattttaactgtagatgtaccagttttatctagaagaaccagagatgataaaaatggtttctcttatccttttaagataggtccaaaacaattttttgattttgcaactcatccaacttggtctttatcaactttgatgagtggaattcctaagcctatgaattatgtaacgtcaaaaattggagatggaatttttaaaagaaaagaaagtagaggttctactgattggaatacactaaaaagagtaagagataaatggaaaggcaaacttattgttaaaggagtaatgtctcctgatgacgcaataaaaataaaagaagctggtgcggatgcaattcaagtttcaaatcatggcggtagacaattagacagtgcttcagcagcaataaatatgcttccattgattcgaaaatcagttggaagtaattttcctttaatctttgatagtgggataagaagtggaagcgatatagtaagagcgcttgcatttggtgcagattatgcaatgattggaagaccagttatgtatgcaatgggagctgatggaaaaaaaggattaagaagaattgttgagattataaaagaagaagttagcacaacactggggttggttggattaaatgatattaatgaagtaacttctgagatagtaaaagagaacactattaataaggtaaattactaa

SEQ ID NO: 199563 - DNA, 1237 bp, Unknown
  Bacterial polypeptide expressing nucleotide sequence isolated from the Sargasso Sea
cttgataggtggcgaaataaaatattatgatggaccaacacaagctgtatacaacccatcaagcggcgaaataagtaaacaaatacaacttgcaaaaaaggaaactgttgaagaagcaattgatatagctcaaaccgtttttcctgaatggaggaatacacctgccgttaaacgcgcccgtattatgtttcgtttcaaggaattgcttgaaaaaaactctgacagaatatgccaactcattggcgaagagcacggcaaaatctcgcatgatgctatgggcgaactacaaagagggattgagaacgtagagtatgcttgctcagctcctgagatattaaaaggcgaacatagtaaaaatgttggtcagtctgtggattgctggagtgaatttcaaccattaggtgttgttgctggtattacaccattcaactttcctgctatggtaccaatgtggatgtatccactagccatagtttgtggtaactgttttattctaaaaccatctgaacgagatccgagctctactctatacattgcagaattactccatgaagctggcctgccaaatggtgtgttaaatgttgtcaatggaaataaggaagctgttgatgctttattacatgatgaacgtattcaagcggtaagctttgttggctcaacaccaattgcagaatatatttatagtactgcaacgacaaatggtaagcgttgccaggcgttgggcggggcgaaaaatcacgccattgttatgcctgatgctgatatcgataatactgttaatcaattagttggagcagcttttggttctagcggtgaacgttgtatggctctttcagttgctgttgtggttggagatgaagtgggggatgtatttgttaccaaaatgcaggaaacaatgaaaaccctaaaagtaggtgcctatagtgaaagcagtaatgattttggaccacttataacaaaggaacatcgagataaagttgcctcttacatagatagtgcagaagaacaaggcgcgtctattattgttgatggtcgtagtataaaagttaaagggtgtgaaaatggtttttttattggtggcacattaattgataacgtaacgcctgacatggtttcttataaagaagagatttttggccctgtgcttcaagttatacgagttaaaaccatgcaagaagctatggacattataagtaatcatgagtatgcgaatggtacctgtattttcacggcgtga

SEQ ID NO: 199564 - DNA, 1090 bp, Unknown
  Bacterial polypeptide expressing nucleotide sequence isolated from the Sargasso Sea
aaatattttaaatatagatgatttgcaaaatatggcaaaaaaacgcgtgccaaaaatgttttatgagtatgctgactctgggtcctggtccggagaaacttatagggctaaccaaaatgatttttctaatataaagtttagacaaagggtcggagtaaatattgaaaaccgtactttatctaaaagctttcttggaaaaaaagtttccattcctttagctttagcgcccacaggcctttgcggcatgcaacattataatggagaaatttttgcagcgcaagctagtgaagaatttggaataccttttaccctttccactatgagtatatgttctatagaagatgttgcagaagcaacaacacagcctttttggtttcaattatatgttatgagggataaagttttcatttctaatttgttatcaagagcgcaagctgcaggatgtagtgtgttacaaattaccatggacctaaatatcttaggacagagacacgcagatgtcagaaatggtttatctgcaccacctaaatttaagcttgaacatattaaacaaataataactaaacccagatgggctttaggaatgctaagggctaaaagacatttcttcgcaaatgttgttgggcatgcagaaggggtaacagatagcggcgcattatggtcatggattgctgaacaatttgattctactttttcatgggacgatttagattggataagaaaccaatggaaaggaaagatattattgaaaggaatattagacccggaagatgctgaaaaggctgttaagttagggtatgatggaattattgtttctaatcatggcggccgccaattagatggtgctttatcctcaattagggctctcccatatatagttgataaagttggaaacaaaatggaggtatatatggatggaggcatcagatctgggcaagacatctgtaaagctttatgtttaggagctcaaggcgttttaataggcaggccttttttatacggcctaggagcaaatggaaaaaaaggagttacaaggtgccttgaaataatgcgcgattctttggacgagagcatgggctttcttggtgaa

SEQ ID NO: 199565 - DNA, 892 bp, Unknown
  Bacterial polypeptide expressing nucleotide sequence isolated from the Sargasso Sea
attattacgtgaaagtgccgggttaaatgttcccggcggtaatgaacgctttaaagccattgtgcatcgtttactggaaaatatgtgcaccctgatcgacgattataatattaccgaggaagagttctggcatgcggtgaactatctgcatgaactgggcgggcgtcaggaagcggcgctgctggcagcaggtctcgggctggaacacttcctcgatctgcgtcaggatgcgatcgatgccgctcagcatcgcgaaaccggcacgccgcgcaccattgaagggccgctgtatgtcgccaatgcgccgcttgcagaagggtatgcgcggatggatgacggtcgtgacgccggtgaggtgatgtggctgcacggccaggtttgcgatacccagggccgtccggttgccaatgcgattgttgatatctggcatgctaacaccctggggaactactcgttcttcgataggagtcagagcgactataacctgcgacgccgcatccgcaccggcgcagatggccgctacagcgtgcgtagcatcatgccttctggctacggctgcccgccggatggcccgacccaaaagctgcttaaccagttgggtcgtcacggcaatcgtccggcacatattcacttctttgtctccgcgccgggccacaagcacttaaccagccagattaaccttaacggcgataagtatctgtgggatgactttgccttcgcgacccgcgatggcctgattgccgacccggttaaaatcaccgatcgggaactgattcagcagcgtaagcttgacggcgaacacaccgaagttcgcttcgactttactttgtgcacggccctgaacgccgaagaagaacagcgtatttcccgcctgcgcgcgcaagagtcatga

SEQ ID NO: 199566 - DNA, 736 bp, Unknown
  Bacterial polypeptide expressing nucleotide sequence isolated from the Sargasso Sea
atgtttggtaaattaagttgggacgcggtcccattccacgagccgatcgtaatggtgactatcgccatgatcgcgctgggtggtttggcgctggttgcgggtatcacctatttcaagaagtggtcctacctgtggaccgagtggttgacctcggtcgaccacaagaaaatcggcgtcatgtacgtcatcgttgccatggtcatgctgctgcgtggttttgccgacgccatcatgatgcgtacccagttggccatggccaccgagggttcgcctggctacctgccacctgaacactatgaccagatcttcaccgcccacggtgtgatcatgatcatcttcatggcgatgcctttcttcaccggcttgatgaaccttgccttgccgctgcagattggtgcgcgtgacgttgcctacccgttcctgaactccctgagcttctggctgctggtgtccggcgtggtgctgatcaacgtttccctgggcgtcggcgaattcgccaagaccggttgggttgcgtatccgccattgtcggggctgcaatacagtccgggcgtgggtgtggactactacatctgggcgctacagttatcagggctcgggacgacattgacgggggtcaacttcctggccaccgtcctgaaaatgcgcgcccctggcatgaaactgatggacatgccgatcttcacctggacctgcacctgggcaaacgtgctgatcgtggcttcgtttccgatcc

SEQ ID NO: 199567 - DNA, 679 bp, Unknown
  Bacterial polypeptide expressing nucleotide sequence isolated from the Sargasso Sea
atgaaaaagtttaaggcacatattttagtcgttgatgatgatgatagaatcagagatttggtaaagcaatatttaaatgaaaataattatttggtaacaacagcaattagttctgaagatgctcaagaaaaagttaaagtcattaaatttgatcttattgttttggatataatgatgccaggtaaaagtggattagattttacaactgaaaataaagaaaaattatatactccaataatattactaacagcaaaaggagaggcagaagaaagaattcaaggtttagaattgggcgctgatgattatctagcaaaaccatttgaaccaaaagaattaatattaagaataaaaaatattttaaataaaacaaaatcaaaaaatataaaaagattaatcgaatttggaaatataaaagttgatttaaataaacacataattttaaaagataataaagagtttaaaattaataataccgaaaaaactatcttggaggcaatgataaattcgccgggtaaatctttttctagagatgaaataggaaaaattataaacttagataaagaaagatctatcgatgttatcattacaagacttagaaaaaaaattgagagagaaccaaaaaatcctaaatacttacaaactttaagaggtgaaggttatgttttatggattgagtaaa

SEQ ID NO: 199568 - DNA, 1192 bp, Unknown
  Bacterial polypeptide expressing nucleotide sequence isolated from the Sargasso Sea
ctttacagagaaacaaaaaagcaagcagtttatatagcagaatactacgactattatgctggcttggcagataaagttgaaggtacagttttgcctatagataaaccaaatgttcaagcaataacaactagaatacctataggagttatagctgcaattattccttggaattcacaaatgtttttaactgccactaaagtagcaccagcacttgcaatgggtaatacagtggtaattaaatcttcagaacttgcacctgctgttttgtttgaatttgcaaaattagttgaaaaaactggtatccctaaaggtgtggtgaatgtaattacaggatttggagatccttgtggtaaaagtttaactactcataacttagttgaaaaagttgcttttactggtggtcctgaaacagcaagacatataattaaaaactcagcagaaaatttatcagaagtaagtttagaactgggtggaaaaagtccagttgcagtctttgatgatgcagagcaagaaaatgcaataaatggtattacagctggaatatttggtgcaagtggacaaagttgtatagcaggttcaagactttatttgcaaaaaggaatttatgatgaatttttagacaagctttcaaaacgtgcatctaaaataaaaataggagcaccaatggatccagaaacagaaatgggtcctttaagtaattttaaacaattagaagtaatagaaaaaaatattaaagagacaattgatcaaggtggaaaaattaagtgtggaggtgaaagacattctttttcaaataaaggatattactttcctcctacaattatagaatgtgataatcacaatctgccagtagcagaaaatgagttatttggacctgtgttatcagtaatgaaatttgatacagaagaggaagtaatttcaaaaatgaacgataatcaatatggattatcctctggggtttatacaagtaatttatctagaggcatgagagtttcaaaagcaattagggcaggaataacctttgtaaatacttatagattaatttcaccttctgccccttttggaggtatcaaagatagtgggtatggaaaagaagcaggaattgactcaattaaagactatacaagagtaaaaacaacttggttctacacatctgacgaaccttctctagaccctttctcaataagataat

SEQ ID NO: 199569 - DNA, 1276 bp, Unknown
  Bacterial polypeptide expressing nucleotide sequence isolated from the Sargasso Sea
tatgataatttgtgctgctttactggtaggttttccagtagcgcttactctggcaggtgtatcaataatatttgcgttgatttgcattcccttaggaatttttgatccaactatttttaaaagtattccaattagaatttttggaattatgaataatgtaacattgcttgcagttcctctatttatttttatgggaactattcttgaaaaatctggtattgctgcaaagatgcttgaaaatatggcaaaggcttttagaagtataaaaggcggattgtctatatcgataattattgttggcgctttacttgcagcaagcacagggattgtaggcgcgactgtagtaactatgggtctaatgtctctaccaattctaataaatcaaggatacgataaaagcttctcagctggattggttgcgtccactgggactcttggacaaataattccaccatctattgccttggttttgcttggtgatgttatgtcaaatgcttatcaaagagctcaaaatgatatgggtatattttctcaacaaaccgtaactgttggagatttgtttattggtgctattattcctggaattctgatatgtattgggtatcttatttatacactttataaaaatagcaataatttagatttaaaagatacttcaaaagaatttgctatagataaagttgaattatttaagacgctagcgctcccaatagtcttaatttttttggttctaggctcgatatttgcaggcattgcaacgcctacagaggcggctgcaattggagcatttggtgccttattgattgcattaataaacagaaaagttaatttacatttcttaaaagaaacttctgagaaaactgcaattgtttcaacaatgatttttacaattcttattggtgcgtcaattttttcactaatatttagaggtgttggaggtgatgagttaattgacctaatttttaatactctccctggaggatcatttactgctctaatatttgtcttaattattatttttttgcttggttttattttagattttattgaaatttgttatgtaatagtgccgctagttgctccacctcttttgatgatgggttttgatcctgtatggcttgctattttatttgcaataaacttacaaacatcatttttaactccaccatttggattttcgcttttttacttgagaggggttgcagatgagagcatacaaactaaagaaatttataaaggtgtttttccttttatattaattcagattattattctt

SEQ ID NO: 199570 - DNA, 962 bp, Unknown
  Bacterial polypeptide expressing nucleotide sequence isolated from the Sargasso Sea
tgataatagaattaaaaaactatatgaattaggtaaagaattaaattggaatggttctattgatttaaactgggaatatacacatccttccgatgagagaataatagagcctgatgaggaattgcctcatgaaatgttagatgcttatcaaaatctgtctgaagaagaaaaaatattatttgatagacataacacagctgagcttatgagccaatttcttcatggtgaacaaggcgcccttttggtagcatctcagcttgcaagttgtgcaccaacatataacgcaaaattatatgcagcttcgcaaacatttgatgaagcaagacatgtagaagttttcaacagatatttacaagataaaattggaatacattatccaattaacccgtctttaaaattattactagataagattcttactgatgaaagatgggatcttaaatttattggtatgcaaattattatcgaaggtcttgcacttgcagcctttcaaatgcttaaagctataacaaaagaccctttgttaaaacaattacttcattatgtagttcgggatgaagcaaggcatgtaacttttggtattaattatctagaagattatcttaagactctatcaaaagaggaacttgatgaaagagctgaatttgcatatgaggcttgtgttatatcaagagatagattaataaatacaaaggctgagcaaagattcttaaaaatgagtgaagaagaagctagagagttccaattaaatactggaacttttgaaatgtttagaaatttcttattcactcgagtaatgcctaatttaaaaagaattggcttattaactgacgaggttaggcctaaatttgaagccttgggtttacttgagtatgagaatgcaccagatgactttgaatgtgactgggctgagatgaagaaacctttagaaaaatttggtcaaataccaacagccttataac

SEQ ID NO: 199571 - DNA, 1165 bp, Unknown
  Bacterial polypeptide expressing nucleotide sequence isolated from the Sargasso Sea
aatgaatgatcttattaaacctagcactaaaatccatacaatagatgatgcaataagattgtctaaaaaaagattaccaaaattagtctttgattttattgatggagcatcaggagatgataaacttgctgagattaatagtactgcattagatcaaattagacttgaacctaaagtttttagaaatgttgagaatagaaatttaagtaaaaaaatatttgattttcattttgattatccatttggatttgctccaatgggaatgacaaatctttcatggcctgaagcagataaaatgatagcaaaagaaagtgcttataataatattccaacatgtgtttctatggcatctagtacaacacttgaagatatgtttactttttcagaaggtcattcgtggatgcaaatatatatttttcaaagtgaagaatttattatggaattattaaaaagggcagaaaatattggatacaaagttttaattcttactgttgatgtgcctgttctatcaagaagagcaagagatgacagaaatggttttggttatccatttaaaattggtccaaaacaatttttagattttgcactacatcctcaatggagtttaacaactttgttgaaaggagctccacaacctatgaattatgttacttctaaaagtggtgatcaaatttttagacgaaaagaaagtagaggagctactgattggaatactctaaaaagaatacgagatgcatgggagggaaaattaatcattaaaggagtaatgaattctgaagatgctttaaaaattaaagaggctggcgctgatgcaattcaagtatctaatcatggtggaaggcaattagatagtgctactgcttctattaatgctttaccattaattcgaaaagctttgggagataattttccaatactttttgatagtggcattagaagtggtagtgatattttacgtgcattagctctgggtgctgactttgttatgtttggcagacctttaatgtatgccattggcgcagatggtgcaagaggtcttagaagaatcattaacctaattaaagaagagttaagtacaaatcttggcttagtgggattaaccgatataaatgaagttgataaaaaaattatagcagagaaattttttaaggatataaagtattaa

SEQ ID NO: 199572 - DNA, 540 bp, Unknown
  Bacterial polypeptide expressing nucleotide sequence isolated from the Sargasso Sea
aaatgggaccacttgtaacaaaagagcatttagctaaagtaaaaggatacgtagatataggagttaaagaaggggcaaaattaattgtagatggaagaaagtttaaaatgcagggttatgaaaacggttactatattggcggttgtttatttgatcaggtcacaaaaaatatgaggatatataaagaggaaatttttggccctgtattgtctgtcgttagggctaaagatttcgatgaggcattaaaattagttaatgatcatgagtttggaaatggtgtaagcatatttactagagatggcgactccgggcgaacattttcatctaaagcaaaaataggaatggtcggtattaatattccaatacctgttccaatggcatttcacagttttggtgggtggaaaagatctttatttggagaccaacacatgcacggccctgaaggtgtaagattttatactaaattaaaaacaataacatcaaggtggccctcaggattaagatcggatccagaatttgttatgccaacaatgaaataag

SEQ ID NO: 199573 - DNA, 955 bp, Unknown
  Bacterial polypeptide expressing nucleotide sequence isolated from the Sargasso Sea
atgacctttaataagatgcccccataccgtgctgaacacgttggcagctttattaggcctaatgaattattggatgccgctcgttctttcaagaagggtaaaattactacagaaaaatttgatgcaataaaaaataaatcaatttctgatatagtctccttccaagacagtataggtatgccatcaattacagatggtgagtttcggcgccgtgtttggtcaggtggtgtgagtgatgctttaacaggaatgagtataaaagactctgggacgttaacttttaaaagtgctgaaggagatgttttaatgcccccatctccttatgcggaggggaaacttagtcgtaaacacaatatagtaactgatgactttaaatttatacagtccctaaatataaagggtcatgccaaggttaccatggcatctccacctgtgatgcatttttttctggggaaagaaagttataattcacaagtttatagttcggatgaagaatattttgcggatcttgcgcgggtttatcaggaagaaattatcgatctaaccgcagctggctgcacctacattcagttagatgatacagcgttagcatgtaattgcgattttgatgctcgaaagagcgttatcgggcggggtgaggatccagattatttaaccgacatatatgtgagagccataaattcagcaatttcgaataggcctagtagcatgtttgttggtatgcatatgtgtcgtggtaatttgaaaggactttggatggccgctggtggatatgaaccaattgcggagaaaattttcagtgaattaaatattgatgcattctttctcgaatatgataatgagcgttctggagattttgaaccgttgcgatatttgccagttggcaaggtagcagtcctaggtatagttagtacaaagacgcctgaactagaggataaagattatttaaaacgtc

SEQ ID NO: 199574 - DNA, 1333 bp, Unknown
  Bacterial polypeptide expressing nucleotide sequence isolated from the Sargasso Sea
aatgagtaaacttaaacaatataaaatgtacatagatggggaatgggtagactctgatactaaaaaaacttttgaaactttaaatccagaaaataataaaccgtgggcagtagttcctgaggcaagtgcaaatgatgttgatagagcagtgaaagcagcacaaaaagcatttgaaggagaatggccaaagttgcttccaagagaaagaggtaaatatttaagagcaatagcagacaaacttagaaagaacgctgagttacttggagaaattgaaacaattgatactggaaaattatttagagaaacaaaaaaacaagcaaactatattgcagaatattatgactattatgcaggaatggcagataaagttgaaggaacagttttacctatagataaaccaaatgttcaagcaataactactagagttcctataggtgttatagctgcaattattccttggaattcgcagatgttattaacagtaactaaactagcacctgctttagcgatggggaatactgttgttataaaatcatctgaactagcccctgcagtattatttgaatttgcaaaattaattgaacaaaccgggataccaaaaggcgttgtaaatgttattactggttttggtgatccgtgtggaaaggctttaacaacacataacctggttgaaaaaattgcttttacaggtgggcctgaaacagctcgacaaataataagaaattctgctgaaaatttatctgaagtaagtttagaactaggaggaaaaagtccagtagctgtatttgatgatgctaatcaagaaaatgcaattaatggaattactgcaggtatttttggagcaagtggtcaaagttgtatagcaggttcaagattatatttgcaaaaaggaatttatgatgaatttttaaaaaaactagttgaaagagctgagaaaataaaaataggtgcaccaatggactctgaaagtgaaatgggtccaattagtaattttaaacaattagaaataattgaaaaaaatattaaattaactgttgaacaaggcggtagaattagatgtggtggtaaaagacattcattttcaaatgaaggctattattttcctccaacaattattgagtgcgataaccataatttgccaacagcagaaaatgaattatttggtccaattttatctgtaatgaaatttgagaaagaagatgaagtaattaataaaatgaatgataatcaatacggtctttcatcaggagtttatactagtgattttgcaagaggcatgagggtttctaaatcaatcagagcaggaataacttttgtaaatacatatagatga

SEQ ID NO: 199575 - DNA, 499 bp, Unknown
  Bacterial polypeptide expressing nucleotide sequence isolated from the Sargasso Sea
atgggagtaattgacaaatttggagttcctaagcctatttctaaaattcttaattgggcaagagcgtatgatatgtggtatttccaatttggattagcttgctgtgcgattgaagtaatggcaacaagtggaccaagacatgattttatgagattaggaattattcctcttcctgcttctccaagacaagcagatttgatggtagttgcaggtactgtaacagacaaaatggcacctgcagtcaaaagattgtatgatcaaatgcctgaaccaaaatatgttatttccatgggatcttgttcaaatagtggaggtccatattgggactcgtattcagtaacaaaaggtgtcgatcaacttattcctgttgatgtatacgtgccaggttgcccacctagaccagaagcattacaagagggaattgttttactacagaaaaaaataaaaggtgaaaacattcaagaaaaatggagagagaaagacattgaaccagtctgat

SEQ ID NO: 199576 - DNA, 1472 bp, Unknown
  Bacterial polypeptide expressing nucleotide sequence isolated from the Sargasso Sea
aatgtctgagttaaaaaaatatcaaatgtttatagacggtcagtgggtagactctgatacaaaaaaaacttttgaaactttaaatccagaaaataataagccttgggctgtagtacctgaagctagcgcaaatgatgttgatagagctgtaaaagctgcacaaaaagcttttgaaggtgaatggccaaaaatgctagcaagagatagagcaaaatatttaagagccattggaagtaagctgagggaaaattctgaattattaggaaagattgaaacaattgatacaggaaaactatatagagaaacttatcaacaagcaaaatacattgcagaatattacgattactatgcaggtttagctgacaaagttgaaggaacagttcttccaatagataaaccaaatattcaggcgatcacaacaagaattccaataggtgttattgcagctatcattccttggaattctcaaatgtttttaaccgcaacaaaagttgctcctgctttagctatgggtaatacagttgtaattaaatgttctgaattagcgccagcaactatgtttgagtttgcaaagttagttgaagaaactggaataccaaaaggtgtggtaaatgtagtttctggttttggagatccatgtggtaaagctttaactactcacaacttagttgagaaagtagcttttacaggaggtcctgaaactgcaagacatataattagaaactctgcagaaaatttatctgaagtaagtttagagttaggtggaaaaagtcctgtagctgtttttgatgatgctaaacaagaaaatgcaattaatggaataactgctggaatatttggagcaagtggtcaaagttgtatagcaggttcaaggttgtacttacaaaaaggaatttataaggaatttttagataaattagcatcaagagcagaaaaaattaaaataggtgctccaatggactctgatactgaaatgggtcccttgagtaactttaaacaattagaagtaatagaaaaaaatattaaattaactgttgaacaaggtggaaaaattaaatgtggtggtaaaagacatcctttttcaaatgaaggttattattttcccccaacaattattgagtgtgaaaatcataatttaccagctgctgagaatgaactttttggacctgtattatcggtcatgaaatttgatactgaaaaagaagtaatagaattaatgaatgataatcaatatggtctatcttcaggtgtttatactagtgatctcgcaagaggaatgagagtatctaatgccatccgagcaggaataacatttgtaaatacttatagattaatttctccttcagctccatttggaggtatcaaggatagtggatatggaaaagaagcaggaattgactcaattaaagactacacaagagtaaaaacaacttggttctatacatctgatgaaccttctctagaccccttct

SEQ ID NO: 199577 - DNA, 748 bp, Unknown
  Bacterial polypeptide expressing nucleotide sequence isolated from the Sargasso Sea
gttgcaggaagctacagtgtatccaagtctaagccaaaaagtggtgttcattaccggcggagcaagcggaatcggggctgctatggttcgtgcttttgctgcgcaacaggctcaagttgcttttattgacgttgatctagatgcagctgaaaccttacagcaagagctttcctccagtcagctttggtttcgacaggtggatgtgcgtcaaccgtctttgcttcaaaaggccattcaggatgccgcaaaagatctgggtgcttttgatgtgctggtaaataatgttgccaacgataaacgccaacctactgcagaagtaacatcgatggactggcaacaatgtatgcaagtgaatttggatccggcgttttttgcttcacaaagcgcttttgagttaatgaaagtacagcagcatggctgtattattaatttcagttccataaatgcactcgtaggtcagcaacagatggcaggttatgtgactgcaaaggcgggcattattggcatgaccaaagcgctggcgaaagattatggcaacgccggtattcgtgtgaatgcgattttacctggctgggtcgctactgagcgtcagcttgcgacctggtttacctctgaagaacagcaaaaatggttggagtcttctgctattaaacgtttaattacgccacgagacattgccaatttagccttgtttctggcgtctgatcaaagtgcctttattacaggccaaaccatcagtgtggacggt

SEQ ID NO: 199578 - DNA, 1090 bp, Unknown
  Bacterial polypeptide expressing nucleotide sequence isolated from the Sargasso Sea
atgagcaaacttaaacaatataaaatgtttattgatggggagtgggttgactctgaaagtaaaaaaacatttgaaactttaaatcctgaaaataatgaaccttgggcagttgtgccagaggcaagtacaaaagatgtggatagagctgtaaaagctgcacaaaaagcatttgaaggtgaatggccaaaattacttccaagagatagagctaaatttttaagagcaattggggatcagttaagaaaaaatgctgagatgcttggtaaggttgaaaccatagatactggaaaactttttagagaaacgaaacaacaagcaaactatattgcagaatactatgattattatgcgggtttagctgataaagttgaaggcacagttcttccaatagataaacctaatgttcaagcaataacaacaagaatacctattggagttgttgctgcaatcattccatggaactctcaaatgtttttgacagcaactaaattagcgcctgctcttgcaatgggaaatactgttgttataaaatcatcagaattagcccctgcagttttatttgagtttgcaaagttaattgaacaaacgggaataccaaaaggagtggttaatgtaataacaggatttggtgatccttgtggtaaaactttgacatcacatgatcttgtagaaaaaattgcatttactggaggaccagaaactgcaagacgtataattaaaaattcagcagaaaatctctcagaagtaagtttagagcttggtggaaaaagtccagtcgctgtatttgacgatgcggagcaagaaaatgcaattaatggaataactgctggaatttttggagcaaccggacaaagctgtattgcaggttcaaggctttacattcaaaaaggaatttataacgaatttttagataagctttctagtagagcttccaaaataaaaataggagctccaatggatctggatacagagatgggtcctttaagtagttttaaacaattagagacaattgaaaaaaatataaaagatacggttgatcaaggtggaaaaattaagtgtggtggtaaaaggagactcctttcaaacaaag

SEQ ID NO: 199579 - DNA, 1315 bp, Unknown
  Bacterial polypeptide expressing nucleotide sequence isolated from the Sargasso Sea
atgccttcaaaatcttcaattaataatattatcaaattatcaatcccaattttttttgctaatttagctattccgcttgtggctattgtagatacaggattaatgggtaatcttgaaaatggtagttatttagtagctactagtattgcctccactgtattctcgatgatcttctggagttttggttttctgcgcatgggaactgttggcatggtagcgcaagcccatggatcaaaccaatttcatgaaattattaatttagttttaagaaatattatatttgttttgattatctccttattgttgatttttcttcaagcctatatttttaaactagctttattaatttttgaattaacacctgagacaacaaaatattttaaagattattttaatatacgtatttattcttcctttggtgaactcactatatttgtaattacaggtttatttattggtctacaaaaaacaaaaacatccagcattgttgttggtgttttctctattacgaatattctttttagtctagcttttgtagtttattttaatttaaatgttaaaggagttgcgcttggcaccttagtatcttcaactcttacgtcaattatttttctttttttcactttttttgaattaaaaaaaattacaactttagaatttaattacaaaaaaatttttaattttaataaaattaaaaatatatttaatattaattttaatatttttattagatcattacttcttacattttcttttttattttttacctatcttggtaactcgattagtgaagatgttgttgctgccaatactatattaatcaatctcatcatgctttcagcatttattcttgatgcttatgcattttcaacggaagggcttgtaggttattcaattggatctaaaaacaaaaaattattaaaagaaattatcaaaaactcctttattctgagtagctctacaggactaataatttcatttggatatttttttggcaaaaatcattttatagaaataatgactgacttagagagtatcaagattatttgcatatcgtattcagtatggattgtaataattccttttatttcttctttttgttaccaattcgatggcatttttgttggcgcatctaaaacaacagaactgagaaatgctatgataatgtctgttggtatttatttattaacagctattcttctagttaatttttttggcaatttaggtttatggattgcattaagtgttttctttattttaagaggattaactttgtttttatacctaggaaaaatttataaagcagcaatataaa

SEQ ID NO: 199580 - DNA, 751 bp, Unknown
  Bacterial polypeptide expressing nucleotide sequence isolated from the Sargasso Sea
atggatctgggtttgaccggcaaagttgccatcgtcacgggctcggctcgcggcctgggcgccgccaccgcgcgccggctcgcacaggaaggggcgagcgtcgtcatcaccgacatcgccgccgaactggcgcaagccacggccaaggcgctgcaggacgacggtctggccgcacactgcatcgtaggtgacatcacgcgggaagcagacgtccagcgcctcgtcgaccaaacgatcgagcacttcggtggcgtgcatatcctggtgaacaacgccggtgcaccgcgcgacaagtacctggtcaagatgagcgaagacgactgggatttcgtcatgaacgtcatgctcaagggcgccttcctggccgcgcgggccgtgatgccgcatttcatcgagcagggctggggccggctgatcaacatcagctcgcgcgcctatctgggcaatcccacgcaggccaactactcggctgcgaaggccggcctgatcggcatggccaaggcgctgtcgatggaagaaggccgctacgggatcacggcaaactgcgtggcgccgggtttcatggaaacggaaatggtgcaagcgctgccgacctacgaaacgatcaaggaacgcgccgtggccgcgcagccgatcaagcgcgtcgggcgtccggacgacatcgccgacgcggtggctttcctcgccagtgagcgcgccggtttcatcagcggcgaagtgctgcacgtcacgggcggtcgctacggctgat

SEQ ID NO: 199581 - DNA, 742 bp, Unknown
  Bacterial polypeptide expressing nucleotide sequence isolated from the Sargasso Sea
tttgatacaagataaggttgtagtaattactggtgcatctagtggaattgggcattcaactgccaaagcacttgcaaaaaaaggcgcaaaaatagttgctggagcaagaagattagatagactagaatctttgaaaaaagaaatcacagatgacggtggagaaataactatctgtgaaacagacgtaaccaaaaaagcagattgtgataatttagttaaacaagcactagacaagtatggaaccgtagatgttttggtaaataatgctggattgatgcctcttagttttgttaaatcactaaaagttgatgagtgggacagaatgatagatgtaaacatcaaaggtgtattgtactgcactgccgcagtcgtccctacaatgactgagaaaaaatcgggccatatcattaacatttcatctgttgcaggaagaatcgtctttccagctggaagtgtttactgtgcaacaaaacacgcagtgactgcattctcagaaggtttgagacaagaactttctgtacgaaaaaacatccgagttactagtatagaacctggtgttgtacagactgaattaacaaatacaatcactgaagattctctacagggattcatcgaaaaaggtaaacaaatggaagcattacaagcagatgacatatcaaacgcaataatctttgcaattgatgcaccaaatcacatgaacgtaaatgaaattctaatcagaccaactacacaagatcactaa

SEQ ID NO: 199582 - DNA, 1339 bp, Unknown
  Bacterial polypeptide expressing nucleotide sequence isolated from the Sargasso Sea
aatggaagtaatacctcttctactactgattataatttgctctgctttactagtaggttttccagtagcgcttactttggcaggtgtatcaataatatttgcgttgatttgtattcctctaggaatttttgatccaactatttttaaaagtattccaattagaatttttggaattatgaataatgtaactttgcttgcagttcctttatttatttttatggggactattcttgaaaaatctggtatcgctgcaaagatgcttgagaatatggcaaaggcttttcgaggactaaaaggtggattatctatatctataattattgtcggtgctttacttgcggcaagcacaggaattgtaggtgctactgtagtaaccatgggtctaatgtccctcccaattttaataaatcaaggatacgataaaagcttttctaccgggttagttgcatcaaccgggactcttggacaaataattccaccatctatagccttggtcttgcttggcgatgttatgtcaaatgcttatcaaagagctcaaaacgatatgggtatattttcccaaaagactgtaactgttggagatttgtttataggtgctattgttcccggaattctaatatgtattgggtatcttatttatacactgtataaaaatagtaataatttaagtataaaagatacttcaacagaattagctatagataaagttgaactgcttaagactctcgcacttccaatagttttgatttttttagttctaggttcaatatttgctggtattgctacgcccactgaagcagctgccattggagcatttggcgctttattgattgcattgatcaacagaaaagttaatttaaatttcttaaaagaaacttccgagaagactgccgttgtttcaacaatgattttcacaattcttattggtgcttcaattttttcattgatatttagaggagttggtggtgatgagttaattgatctaatttttaactctctgcctggagggtcattcactgctctaatatttgtcttaataataatttttttgcttggttttattttagattttattgagatttgttatgtgatcgtccctcttgttgcaccacctcttttgatgatgggattcgatcctgtatggcttgctattttatttgcaataaatttacaaacatcatttttaactccaccttttggattctcacttttttatttgagaggggttgctgatgaaagcatacaaactaaagaaatttacaaaggtgttgtgccttttatactaattcaaattattattctttttacagttatgttgtttccagttctaataatataa

SEQ ID NO: 199583 - DNA, 1045 bp, Unknown
  Bacterial polypeptide expressing nucleotide sequence isolated from the Sargasso Sea
aatggatgaagttttacaaggtagggtacaagttggacaaaaagccatgattaattcaaaggcagatctcaaccaacttgttccctttaaatataagtgggcctgggaaaagtatcttgatggcacagcgaaccattggatgccacaagagataaatatgactgcagatattgctctatggaaagcagcagatggactaactgatgatgaaagaatgatcgttaaaagaagtcttggtttcttctccactgctgactctcttgttgcaaataatgttgttctagcgatatacaaacatattaccaatcctgaatgtagacaatatcttttaagacaagcatttgaagaagcaatacatacacatgcttaccagtactgtatagagtctctaagtatggatgaaggagaaatctttaatatgtatagagaggttccttgtgtcgaagcaaaagctgcatgggcacttaaatacacaaaagagcttgaagatccgagctttgaaacaggaactccagagaatgataaaactttcttatctaatctgattgcattctattgtgtgcttgaaggtatgtttttttattgtggtttttcacaaatcctttcaatgggcagaagaaataaaatgactggagtatcagaacaattccaatacataatgcgtgatgaatctatgcacgttaactttggtatagatatgatcaactcaattattaatgagaatccgcatatttgggatgaagagatgcagaaaagagcatctgacatgatagtagaaggaactgaattggaggttaattatgcgaaagacacaatgccaagaggtgttttaggcatgaacgctaaaatgatggaagaatatctccaatatgtttgtaatagaagattagctcaaataaatctgccggaagcttatcctggagctaaatatccaccttcaatgcaatggatgtcagagatcatggatctaagaaaagaaaagaatttctttgagaccagagttattgaataccaagttggtggttcgctccaatttgacgattaa

SEQ ID NO: 199584 - DNA, 1078 bp, Unknown
  Bacterial polypeptide expressing nucleotide sequence isolated from the Sargasso Sea
atgaaaatagaatataccaaagaaacacctagaaagattagagactacaatcaagaagagattgttctaaatgctgaagaagtagaagacatagctgaaatatttaaaactcccttaactggtacatataactgggactattctgtacaagacaataggattgctaaattgtatgagttaggaaaaaaactcaactggaatgtttcaatggatattgattgggataggcctatggtcgtttctgatgaagtaccgcctatgttttgggatgagtaccctccttataaaaagctaactcttgaagagaagagagagttcttacgtcatagaggggctagccaattcagtcaatttttacatggagaacaaggggcactgcttgtagcatcgcaacttgtttcctgtgcacctacatatcaagctaagttatatgctgcttctcagacatttgacgaggcaagacatgtcgaggcttttaccaaatatatacaaaatagatccaaactaatgtacccagttggagctggattaaaaagtttattagacaaaatacttaccgatgaaagatgggatcttaagctaataggcatgcagataatcatagaaggcctcgcattagcagcatttaatactgcaaaagccgttacacctgatcctgtattgagagatattctgcatcttataattagagatgaagcaaggcatgtaacctttggtgtcaactacttagaagattttattgaaaatctaactgatgaagagagagaagatagggcaatgtttgcctatgaagcttgtgttattagcaaagaaagactctttccaactgatgtattcaggaggtttggttggaatgaagatgaagcaagagaattctcaaataaagcaggctttgcaacagagtttcaacgtcttttattttcaagagtagttccaaatctttcacgtatcggtctacttacagataaagtcaggccactatacgatcagttgggcgtattggagtttgaatctcattcttctgacggagatatcacctgggctgatctagaaaaaccccttgacctttcagcgtaaa

SEQ ID NO: 199585 - DNA, 751 bp, Unknown
  Bacterial polypeptide expressing nucleotide sequence isolated from the Sargasso Sea
aatgagccaattcttgcatggtgagcaaggcgcccttcttgttgcttctcaattagcaagttgtgcacctacctataatgctaagctctatgctgcatctcagacatttgatgaagcaagacatgttgaagtttttaataggtatcttcaagaaaagattggtatccactaccctattaatcctgcactcaagtcactgcttgacaagatccttactgatgaaaggtgggacttaaaatttatagggatgcaaattattattgaaggtctcgctcttgctgctttctctatgttgaaatctacatcaaaagatcctctattaaagcagctacttcattacgttattagagatgaggctaggcatgtaacttttggcattaattacttagaagattttattaaaaccttaactccagaagaaattaatgaaagagctgagtttgcatatgaagcatgtgtgatttcaagagagagacttattaataccaaatctcagcagcggttcttaggaatgtcagaagaggaagctagagagttccaattaaatactgggagttttgaaatgttcaggaacttccttttctcaagagtgataccaaatctatcaaggattggtctactcactgatgaagttaggccaaaatttgaagctcttggtcttttagagtatgaaaatgctcctgatgactttgagtgtgattgggcagaaatgagaaagccacttgaagaatttgaaaaaattcctgtttga

SEQ ID NO: 199586 - DNA, 793 bp, Unknown
  Bacterial polypeptide expressing nucleotide sequence isolated from the Sargasso Sea
atggagctgggactgaatgataaggtagttctgattactggcggtgcaagagggatcggagccgcagcagtacaggcttttcttaatgaaaaatgtaatgttgtttttgtagatcgtgattctaaatccggatccgaattggccaaatcattaggaaaccgcggaaagtttattgaagctgaacttaatacttctgaatcgtgcgagcaagctgttgaaatgacagtatccttttttggcggaattgatgtcctagtaaacaacgcgggatttaacgatggactgggtcttgatactgctcctgaagaatttatggattctgttcggaccaatctattgcatgtttattccatgactcattattccctgccacaactccgaaaaagccagggatgtttggttaacctaggctcaaaggtttctgaaacagggcaggggaatacatctgcttatgctgctgctaaaggagcaatacaggcccttacccgagaatgggcagttgccctggctccagacaatattagggtaaattgtgtcatgccggcagaatgccatactgatcagtatgagaaatttttccaaactagtaagaatcctgaagctaccagacaggcgataggcaatctcgtgccactttcccgcaggctcactacgccagaagaaatcgcccagaccatagtctttctttcctccaactgttcttcccatacaaccggtcagcatatttttgtggatggtggatatactcattttgaccgcgcggtaggtcatgatcatgataagtggcaatgag

SEQ ID NO: 199587 - DNA, 721 bp, Unknown
  Bacterial polypeptide expressing nucleotide sequence isolated from the Sargasso Sea
agcttctggacttgtaaaacctggtaaaaaagtagcccatgagatgactttaaatgatatcaaggaaacaattgatgcttatgcatcagatgcaaagatatgtgaagagattggatttgatggagttgagatacatggagctcatggttacttaatagataattttttttggagcggtacaaatattcgtgaagatgaatatggaggctcaatagaaaatcgctcacaatttgtttcagatattattaaatctgttagagagaatgtcagtgaaaattttattgttggcttaagattttctcaatggaagcagcatgactttgaagctaaactcgcatctaatcctgaagaacttaaaacgattcttacttcacctgtagaatctggtttagattatttacattcaagcatgagaaggttctgggaaagcgaatttgaaggctcaaaggaaaacctagcctattggactaagaaaataacaaagatcccaacaattggtgttggcagcgtgggactggattcagattttattgacatgactgcaccagcaacaccaacaagtattgacaaagcaatagatgatattacgaatgacaaatatgatcttatagcagttggcagagcattgttatctgatcatgaatgggttttaaagatgaaggaaggcagagttaacgatgttattccgtatacaaaagacgcattactaaatctttattaa

SEQ ID NO: 199588 - DNA, 1285 bp, Unknown
  Bacterial polypeptide expressing nucleotide sequence isolated from the Sargasso Sea
catgcataaaatcacttcatatctaacgttagatgagcaggccaaggagcttgttgaccttgttcatggaacccatatcggcctgactttttcagaaaccgccgtactcctattgctgttatcttccccgaacgcgatttttaccaaggaagaattgctgcacgtcggctggccagaacgtgtggtcgcgcccacttcattaactcagtgcatcagtaccttacgtaaaaaattagaaccctataccgaagtgcagcttaaaacggtggcgcgccgcggttatcagttgcatgtgtccgaacagtcccatgtgaagatgttggcgattaacgatgccgatgcgatccgcgatgcgattgtcggcgtctctgcctggactaaggtggcaggcattatcatgttgggggtgatccttaccttggtttggtactggagcgatcaccatgccgtggttaaacgggtcgctaaatggaatgccgataaatatatcagcctcaatattggcggcaccttagggacggcgcaggtgctgtatatcgatgatgaggagcatttacatccctcatggtggcaaaaacatttagcgccagagggtaaccatatcagtggcttaccttatttcagcgcctttgccgcgactgatggtaaaaactattcgatggccatctgcccctcgctcgatgctaaagactgcaatggtaaaggcattatcaatattacctccatagatgccactccggcgggccttgatatggctgagtttattccactcagtaaaaaaatggaggagcgtattcgctacaaccgcatcgtgctgccgattgatgataagggcgcgggtgagctgctggagcataactaccatgcggatatctatttccctgtggcgggtgagctgctggtgcgcacggatcttagtatgtcgctggtgtacgaaggggaaaatcgaggcaagttttactctacctcctgcatcaccgatcaggactgtttaaccacaccgattaagtacactatccgtggcgaattcgagcagtaccagacgcaaattgatgatctgaatgtggatgtcttccatgtcaaagtatcgcaaaaggagctaaccaaacccgatgaagtgagccattcggccatgcagttttaccgtgcgattcgcaaacacgatattcgcgacgaagatctgttctattatcgggtttatcaaaatcagggcacggcggtatggatagtcccacagatggggcaactgctggcctggactcagtacactcaagtcaaactctaa

SEQ ID NO: 199589 - DNA, 1024 bp, Unknown
  Bacterial polypeptide expressing nucleotide sequence isolated from the Sargasso Sea
ttgcgtagagggtacgcagcgctgctggcggctcggccagccctgacgtggcggatggagattcgccgcacacgcgaggcaggacagccaccgtcagcgcagataaatgcgcgcggatcacagctgcccaggcgaacggcaaaacggcaccccgcgcttcacggtgggttgttccaccttgaatccgattgtttgaaccggttctatcgccagtcacgcagggatgagcgcgttagtttattggaagaggatcgaataggcaaccggcttcccgccgccccggcgggtgcccgccaggccggttgtggcgccgccgcaagccgtgcgccaacggccgctcaaagcgggcccggaacccgctctgcgtgcctcccccagccgtttgtacggctggttcatccttgccgcagcgccgcattggaagtaggcttggggcctttctcctctaccagccaggaaactgcaatgatcgtgttcgtcaccggagcgtccgcgggattcggcgccgccatcgcccgagctttcgtcaagggcggccaccgtgtcgtcgccaccgcgcgccgcaaagaccgcctgcaggcactcgccgacgaactcggcgacgcccttctgccgtacgagctcgacgtgcgcgatcgcgccgccgtcgaggcggtgccggcctccctgcccgcggagttcgcggcgctcgacgtgctcgtcaataacgccggcctcgcactcggcatcgagccggcgcaaaaggcgagcctcgacgaatggaacaccatgatcgagaccaactgcacgggcctcgtgcaggtcacgcacgcgcttctgcccggcatggtggagcgcaaccgtggccacattttcaatctgggttcggcggcgggaagctggccgtacgcgggcggcaacgtatatggcgccaccaaggcgttcgtgcatcagttcagcctgaatctgcgagccgatctggccggcacggcattgcgcgtgaccaacatcgaaccgggcctgtgcggcggcaccgagttttcga

SEQ ID NO: 199590 - DNA, 142 bp, Unknown
  Bacterial polypeptide expressing nucleotide sequence isolated from the Sargasso Sea
tatggactccttatctgttaaagataaatcattaatatttaatacagatctagttgaaactttagaatttgataatttaattagacaagcaataactacaatggactcagcttatcacagaaaagaaagtagaggagcacat

SEQ ID NO: 199591 - DNA, 850 bp, Unknown
  Bacterial polypeptide expressing nucleotide sequence isolated from the Sargasso Sea
gatgaaaaagactccatacatttggttaatttctggctgttcctctggatttggtagagaaattgcactgcaggcactgtctgcaggagattttgtgggagtgtcatcaagaaacgttaaagatgtagaggatatctgcaaagagtatccaaaaacagcgttgccaataaaattagacgtcacaaacaaagatgaaattaaagaatcaattcaaacaattaataaagtttatggtggtttagatgtcttagtaaataatgctggatatggttatctagctgccattgaagaaggtgaaaatgaagaagtaagaaaactttttgaaactaatttttttggagctctggagctaacaaaagctgcgctcccaggaatgagggcacaaagatttggcagaataataaataattcctcacaagcagggatcatggcaaatcctggaacgggttattatagttcatcaaaatatgcactggagggtcttatggaagctttagataaagagctgagacctctaaatatttcagttacatcagttcagccaggtgcatttagaactgattggtccggcagatcaatgaaaaggagtaatattgaaatagacgactatagcgaacatgtcaaacaaagaattgacatgattggaaatattgacggtaaacagcctggagatcctgtcagagcagcaaaaataatttttgagctctcaagagattcaaatccgcctgacaaacttttgctaggtgctggagttcttgcaacatataaagaaaagctaagcgccttattaaatcaaatcgatgaatttgaagaaacttcaaaaagcgcagatttccctcaaataaaataa

SEQ ID NO: 199592 - DNA, 814 bp, Unknown
  Bacterial polypeptide expressing nucleotide sequence isolated from the Sargasso Sea
aatggacagacaccgggtgtcttggaatttaagtcaatttctccatggcgaacaaggggcattattagtagcttctcagcttgtttcatgtgcgcccactttcaatgcaaaactttatgcagcttcacaaacttttgatgaggcaagacacgtaaactgtttcaacagatatttaaaagagaaaattggttttcagtacccttcaactgatggtctgaaatctttaatggacaaaattctcacagatgaaagatgggatctgaagtttataggtatgcaaatcattattgagggccttgctcttgcagctttcaataatttgaaattaattctaaacgatggccttctaaaacaacttcttcactacgtgataagagatgaagcgcggcatgttacttttggagtaaattaccttgaagattatttaaagactttaagcaaaagcgaaattgaagatagagcgcaatttgcatttgaagcatgtgttgtaatgagagacagacttatttcaggcgaagtaatatctagatttcttgattacactccagaagaagcacacaaaatagctgaagaatctgaacaaggtgaaaattttaaaaatttgcttttcactaagataattccaaatcttacaagaattggcttaattactgataaggtaagaccaaaatatgaaaaacttggtgttttaagttatcaagaactcgaagataacttcaatgttgattgggcagagatttcaaaaccctatgaaactcaagaagaaatcgagcaagagatatcctctgtttttgaaaacagtgctcaaaactaa

SEQ ID NO: 199593 - DNA, 1110 bp, Unknown
  Bacterial polypeptide expressing nucleotide sequence isolated from the Sargasso Sea
ttgaaaaatctggtattgctgcaaagatgcttgaaaacatggcaaaggcttttaaaggtataaaaggcggattatctatatctataattattgttggcgctttactagcagcaagtacgggtattgtaggtgccactgtagtaactatgggtctaatgtccctcccaattttaataaatcaaggatacgataaaagcttttcagctgggttggttgcatccactgggactcttggacaaataattccaccatctatagccttggttttacttggtgatgttatgtcaaatgcttatcaaagagctcaaaatgacatgggtatattttctcaacaaaccgtaactgttggagatttatttgtaggagctattgttcctggaattctgatgtgtattgggtatcttgtttatacactatataaaaatagcaataatttaaatataaaagataattcaacagaatttgctctagataaagttgaattatttaagacgctcgcgcttccaatagttttaatttttttagttctaggttctatatttgcaggtattgcaacacctacagaggcggctgcaattggagcatttggtgctttattgattgcattagtaaataaaaaagttaatttacatttcttaaaagagacttctgaaaaaactgcaattgtttcaacaatgatatttacaattcttattggtgcttcaattttttcactaatttttaggggagttggaggtgatgagttaattgacctaattttcaattctctccctggtggatcactaactgcactaatatttgtcttaattattatatttttgcttggttttattttagattttattgagatctgttacgtaatagtgcctttaatagcgccgccccttttaatgatgggctttgatcctgtatggctcgctattttatttgcaataaatttgcaaacatcatttttaactccaccgtttggattttcacttttttacttaagaggagttgctgatgaaacaattcagaccagtgaaatttacaggggtgttataccttttatattaattcaattatttatacttgctacagttctaatgtttccagctatcataatttaat

SEQ ID NO: 199594 - DNA, 760 bp, Unknown
  Bacterial polypeptide expressing nucleotide sequence isolated from the Sargasso Sea
aatgtatcttcaaaaaataaatctaaaaaataaacatgcattagtcaccggtgcaggtaaagggctaggaagagcatgttccattgcattagctgaggcaggtgcaacggttatagccttaagcagaacatcttcagatcttaataaattagaaaaagatatcaaaaatgttaaaggtaaaattattaaggtttcatgcgatgtaatgaattatgaagatttaaaacaaaaattagataaaattaaaattattgatgtgttagtaaataatgcaggaactaacattccagaaccatttgaaaaaattaaacaaaaaagcatgaattatcttgtagatttaaatctgaaggcagcatttaacgtagcgcaaattgttgtaaaaaaaatgcttaaaaataaaaaaagacctggatcgattataaatatgtcgtctcaacttggtcatgtaggcatgggcggtagaaatgtttataacatgacaaaatttgggattgaaggattaactaaaggtatgggcgttgagttagctaaaaaaaatattagagttaacacagtagcacctacttttgttaaaacaccgatggttaaaaatttttttaaaaacaaaaaatttaaaaaattagcccttggaaatattcctatgggaaaagcagcgaccgaaagtgatgttgctacaacagtatgttttttggcatcatcagcatcttcaatgatcactggtacatcaataataatagatggtggatggacagctcaataa

SEQ ID NO: 199595 - DNA, 1483 bp, Unknown
  Bacterial polypeptide expressing nucleotide sequence isolated from the Sargasso Sea
atgtctaaattaaaaaaatataaaatgtttattgatggagaatgggtagactccgaaagcaaaaaaacttttaaaacgttaaatcctgaaaccaacgaaccatgggcagaagtgccagaagcaaatgaaaaagatattgataaagctgtaaaagctgcgcaaaaagcatttgaaggtagttggccaagtttatttcctagagaaagagcttcttatttaagagcaatagcaaatgaattaagagaaaatgcagaattattgggaaaaattgaaacaattgatacaggcaaattgtttaaggaaacaaaaaatcaggctaactatatagctgaatattatgattactatgcaggactagccgacaaagttgaaggaacagttttgccaatagataaagctaacatgcaagttattacaacaagggttcctattggtgttgtagctgcaattattccgtggaattctcaaatgttattaactgctgtaaaattagcaccagcgcttgctatgggtaatactgttgtaattaaatcatcagagcttgctccggcaactttatttgaatttggaaagctaattgaaaaaacaaaaattcctaaaggggttgtaaatattgtatcaggatatggggaaccttgtggaaaatcattaacttcccatgatttggttgaaagaattgcttttacaggaggacctgaaacagcaagacatattataaaaaattcagcagaaaatttatcccaagtaagcctcgaacttggcggcaaaagtcctgtggctgtttttgaagatgcagatcaagaaaacgcactaaatggaatcacagctggaatttttggcgctagcggtcaaagttgtattgcaggatcgagattatatatacagaaaaatatttatgaaaattttttagataaaattgtaaataaagcaaaaaaaattaaactgggctcccctatggataatgctactcaaatggggccattaaatagtttaaaacagttagagattattgaaaaaaatattaaacttacattggatcaaggcggtaaacttagatgcggaggaaaaagacacagtatgtcaaataaaggatactattttcctcccactgtaattgaatgcaataaccacaatttaccaactgcagaaaatgaattatttggtcctgttttatcagtaatgaaatttgatactgaagaggaagtaattaaaaaaatgaatgataatcaatatggattatcgtcgggagtttatacgaaaaatattaatagagcgttaagagtatctaaggcaatacgagcaggtatcacttttgtaaatacataccgtttaatttcaccatctgctccttttgggggaattaaagatagtggttatggtaaagaggcgggaattgagtcaattaaagactacaccagaattaaaacaacttggtttaacacatctgataaaccaatggatgaccccttcacaatgggttaaa

SEQ ID NO: 199596 - DNA, 739 bp, Unknown
  Bacterial polypeptide expressing nucleotide sequence isolated from the Sargasso Sea
atgagcgaagtttctggaaaagttgtcatcattacaggtgcaagtagcgggcttggagaagcaacggcgaaaatgcttgcggataaaggtgctaaattagtgttgggcgcccgccgtgaagaccgtcttaaaaaacttgtagatgaaattgaatcttcaggtggtcaagctacttatcaaacggtagatgtcacgaaaaaggatgaagtcaaggcgcttgcgaaagcggccatagatgcctatgggcgtattgacgtgctcgtcaacaatgctggtcttatgccactcgctccgcttgacgagatgaaagttgacgagtgggatcagatgatagatgtaaacataaaaggcgttatgtatggagtagcagctgtattaggacaaatgcgagagcaaaaaagcgggcatattatcaatctttcctctgtggcaggtcatgttgtgttccctggagcaacggtttattgcgcaactaaattcgctgtaaaagcaataagtgaaggcattcgcagagagtcaaatggtgaaattcgctctaccaacatctcacctggtgcagtggcgacagaacttactgaccacatttctcacaaagactcaaagcaaatggcagatgatatgtatgacgatgctatcgatgcagatgctattgcacgtgcagtaacgtttgccatagagcagcctggcgacgtagacataaacgaaatgatcatcagacctacccgtcaggaactctaat

SEQ ID NO: 199597 - DNA, 3466 bp, Unknown
  Bacterial polypeptide expressing nucleotide sequence isolated from the Sargasso Sea
atgaaacaaattaagaaaatattaattgctaacagaagtgaaattgcaattagaatatctcgtgcagcaactgaattgggctttaggactgtatccatttactcgtacgaggatcgttttgcattgcaccgcttcaaaacagacgaaagctatcttgttggatcaggattaggtcctattcaggcttacctagattacaaaggtatcgtacaaattgctgttaattcaggatgtgatgccatccatccaggatacggtttcttatctgaaaacccagaatttgctgatgaatgtgcaaaacataatattatttttgttggaccctctccaaagattatgcgatcacttggaaataaagtagaagctaaaaaaactgcaggcaaagctaaagtaccaaccataccttccacaggacccttgccaaaagatttaaaaaaatgcaaagatcttgcaaaaaaaattggttatccaattatgctcaaagcatcctggggtggcggcggtcgtggaatgcgagtgatcagaaaagaaacagaattagaaaatcaaatcaacactgctaggagagaagctaaaagtgcttttggaaaagatgatgtgttttttgaaaagttaatcgaaaaagcttttcatgttgaagttcagataattggtgatacgcatggaaatatagttcacctttttgaaagagattgttctcttcaaagacgacatcaaaaggtagtagaaagagctcctgctgcctacctatctgacaaagagagaaatgagatttgtaacgcaggtgttagaataggaaaacaagttaattattcatgtgcgggaactgtagagttcttaatggatgctaaatctagagatttcttcttcattgaagttaatccaagagttcaagttgaacacactgtaacagaagaaattactggtattgatatagtaaaagctcagttcctcttagcagctggtgctaaaattggagattatatatgtggtgtgccaactcaaaaagacatccatatgaaaggacatgctatccaatcaagggttacaacagaagatgccgctaatgattttgctcctgattacggtaaaattaatgtttatagatctgcaagtggcttgggaataagactagatgctggaactgcatctactggtacggttattactccttattatgactctcttttagttaaagtaaccgcaaaaggccaaacccctattgaagcaaagagacgaatgaatagagcattgagtgaatttcgcgtaagaggtgtaaaaacaaatataccttttttattaaagttaattaaccacaaaggtttcgatgttttcaaataccatacaaaatttatagatagtgaaaaaagtttatttcaattctctggtcgaaaagatagggcaaccaaaacattaaacttcttagccgaagttattgttaatggtaacccagaagtctctaatagaccaaaattaagagagacaacaccagcaaaactctcagactatggaatatctagatcaaaaaaagcacaagagactgtcaataaaacatataaacaaattttagatactaatggtccatctgctgttgctgagactgtgttaaaagaaaaacaattattgattacagacactacctttagagacgctcatcaatctttgattgcaactcgaatgagaacacaagatatgttaggcataactgacttatatgaagaaagacttaaaaatttattctcagttgagtgttggggtggtgcaacttttgatgttgcattaagattcttaaaagaggacccatgggaacgtctagaaaagttacgtgaacaaatgccctcagccctattacaaatgttattcagaggatcgaatgctcttggatatacaaactatcctgataatgttttaagaaggtttatacaactctccgctcagtctgggattgacgtttttagaatatttgatgcactaaactggattgaaaatatgagagtctctattgacgaagtattaaaatctggaaaaatctgtgaagcttctatttgttactctggcgatttatcgtctccagcagagaaaaaatatacacttgattactacttaaaaatggcgcaaaagcttgagaaaatgggagttcactttcttgcaatcaaagatatggcaggtttgtgtaaacccaaggcagcaaaaattttattcaaagaattaaaaaaaagcataaaaattccaatccatttccatactcacgatacaagtggaaatggtgttgcaacattgcttaacgcctcggaagcaggggtagatattgttgatgtagcaattgactcttggtctggcttcacatcgcaacctagttttggtgcagttttagagtctcttgatggcaataaaagagatccaaaaatttcttctgctgttgtcaggactgctgcaaattattgggaaggtgttagaaaacaataccaacctttcgaaagcaaaactcgcactagtatgtcagaggtatatttacatcagatgccaggtggtcaatacactaatttaagagagcaagcaaggtcaatgggcattacagacgagagatggccagaacttgcatcaatgtatgccgaagtgaacaaaatatttggtgatgtaattaaagttacacctatatctaaggttgttggtgatatggcaatttatatgttggcaaataatattcaaattcaagatgttttagaccctaaaaaggatgttggctttcctgcatcagtcatcgaattctttagtggccgattaggtcaaccatataaaggtttcccaaaagcactccaaaagaaaattttaaaaggaaaaaaaccaattaattatagatttggatcaaagttaccctcattaaaaatcaaaaatagaacgaaggaattggaaaagaagtatagtgagactatttcagagaaagatacaatttcacaaatattttttcctgaggtttttgatgagtatataaaacacaaaaagaaatttggtaatactagtgttatcccaacatcaaactatttctttgggatgaacacaggggaagagatatatgtttctatagaacctggtaagacacttataataagatatttcactttaagtgagccaaacgaaaaaggttacaggacagtatattttgaattgaatggccaggccagatcagttgacattaaagataattccattgcagttgacgatttagctaaagaaattgctgatcccagcaacaaagatcatgttgcggctccaatacctggtttacttgtagacgttgccgttactgagggaataaaagtgccaaagggtgctaaattatgcactattgaagccatgaaaatggaaacggttatttacgcagaccaacctggaatagttgagagactatgcgtaaaagctggtgaaaatattgaggctcagcaacttttattaattataaaataat

SEQ ID NO: 199598 - DNA, 1013 bp, Unknown
  Bacterial polypeptide expressing nucleotide sequence isolated from the Sargasso Sea
catgacactaaatttaggccctcaacaccctgctactcacggaaccctgcgcatagttgcaaaacttgatggagaaaaagttgtcgctgccgaaccaattatgggctatatgcatcgtgggtatgaaaaacttacagaggtgcgtacctaccctcaggtaaccacgctagtaaacaggatagattggctgggtagcttcgctaatgaagttccctttattcttgctgctgaacagctaatggacgtagaagcgcctcctagagcccaatggatccgtacagtgctatttgaattaagtaggatagctaatatctcactattcctaggagatatggcagtccaagtaggggcaactactcccgtgttctacgcattccgtgaccgagagtttgttctaaatcaaatagaacgagttacgggaggtcgtttccatcctaactttgatcgaattggaggtctaaaagatgaccttcctaaaggatggattgaagaaacagcaactgtaattgggaaaatgagagacttctgcgacgaaatggaggagctcgtattaggaaatgaaattttccaggcccgtacgcggggtatcggagtaataccaccagaagttgctctatcgtacggtttatccggagcaaacctccgagcctcaggtgttgattgggacatccggcgggatgccaatgtgggtttggtatatgacgaggttgattggaaagtttggactcaccctgacggcgattcctttgctcggttctgggtccggcttcaagagactcgcgaagcctgtgacattatcgaacagctactcggtggaataccagcaggaccaatcatggctaaggttcctcggatcattaaggttcctgctggtgaagcctatgttgcgaccgaaaatccccttggagaaatgggattctacgtagtaagccaaggagatctcaccccatttagagtcaagatcagatcagcaagcttttcaaatatgtctattaccccatggctgctcaaag

SEQ ID NO: 199599 - DNA, 1165 bp, Unknown
  Bacterial polypeptide expressing nucleotide sequence isolated from the Sargasso Sea
aatgagtgataatattttaccaagtcaaaaaatttttagcattaaagacgcaagggaactgtcacgtaaacgtctacctaaattagtttttgattttattgacggtgcatctggagatgaaaaattagcagaaataaatagcagagctttagatcaaattagacttgaacctaaagttttaagaaatgttgaaaagagatctcttaaaaaaaaagtattaggttatgaatttaattttccctttggttttgctccaatgggaatgactaatttatcatggcctggagcagactctatgttagcagcagaaagcgcaagaaataatatacctacgtgtgtttctatggcttctacaacaactttagaaaaaatgtatgaactatcagaaggtcattcatggatgcaactatatatatttcaggatgaaaattttgtcatggaacttttagacagagctaagaatactggatacgaagttgcaatattaactgtggatgttccagtgctatccaggagaactagagatgataaaaatggtttctcctaccctttcaagatcggtccaaaacaattttttgattttgcaactcacccaatttggtctctttcgactttgctgagtgggattcctaaaccaatgaactatgtaacatcaaacagtggagatggtatttttaaaagaaaagaaagtagaggctctacagattgggatactcttaaaagagtgagagataaatggaaaggtaaacttataattaaaggagtaatgtctcctgacgatgcagtaaaaattaaggaagctggtgctgatgcaatacaagtttcaaatcatgggggcagacaattagatagcgccacagcagcaataaatatgcttccgctaatcagaaaatcagtgggaagtgattttcctttaatctttgatagtggaataagaagtggaagtgatatcgtgagagcacttgcatttggtgcagattatgcaatgattggtaggcccgtaatgtatgcaatgggtgctgatggaagaaaaggattgaggagaattgtggaaataattaaagaagaagccagcacgacactcgggttagtaggattaaatgatattaatgatgtaacttctaatatagtaatagataatactgtaaataaggtagattactaa

SEQ ID NO: 199600 - DNA, 1000 bp, Unknown
  Bacterial polypeptide expressing nucleotide sequence isolated from the Sargasso Sea
tatgaaaataaaaaaacaaagcggaccacctgaagatttaatctattttgatgatgaccttcctctctcacagtcgcaagttgaggatgtcgttgaaatctttaaaactcctttaactggatcatataactgggactatacagttgcagataatagaataaaaaaactatatgagctcggaaaagaattgaattggaatgggtcaattgatcttaattgggattatacgcatccagcagatgagagaatacttgagactgacgatgaattacctcatgaaacccttaaagcatatgaaaatctctcagatgaagaaaaaattctttttgatagacatgatgttgcagaattaatgagtcagttcctgcatggtgaacaaggcgctcttcttgttgcgtcgcaactagctagttgcgctcctacctataatgcaaagctctatgctgcatctcaaacatttgatgaagcaagacatgttgaagtttttaatagatatcttcaggagaagattggtattcactatccaattaatcctgcgttaaaatcgctactcgataaaatcctcactgatgaaagatgggatcttaagtttatagggatgcaaattattattgaaggtctcgcccttgctgcattctctatgcttaaatcttcatcaaaagacccactgctaaagcaactacttcactatgtcataagagacgaagcaagacatgtaacttttggtattaattacctcgaagactttattaaaactttaagtccagaagagataaatgaaagagctgaatttgcatatgaagcttgtgtgatttcaagagaaagacttataaatacaaaggctcagcaacgtttcttaaatatgtctgaggaagaagctagagagttccaactaaatactggaagctttgaaatgttcagaaatttccttttctcaagagtgatacctaatctatcaagaattggtctacttactgatgaagtaagaccaaaaatttga

SEQ ID NO: 199601 - DNA, 859 bp, Unknown
  Bacterial polypeptide expressing nucleotide sequence isolated from the Sargasso Sea
tctgggtgtagtaaattctgtcaatgaaaatggtatcgagataggaaccgttttagctacacatcctgagattgatgtaatcactttcacgggctcctctcgtacaggtaaaatagtaatggagaaagcggcgccaaccctaaagcggttatcactggaattaggtggcaaatcccctgctatagtcttccctgatgcagacattaataatgcagtatctgagattgtgaaggcaacaatcgtcctcaatggacaaatgtgtacttgtattagtcgagtattagtttccaaaaagattgagcaagaattgacagcaagtttaaaaaatgctttgggttcagtaaaaattggtcacggccttgacccatcaaccaatcttggacctttgattgacatggaaaatcagaaacgtgcaattggtttaatagaattggctgaaaaagaggctaaaatgattcttcggggtgaaccaggcttaggtgatttatccaaaggatcttttatttcaccaacaattttccgaattgacgacactacacattcgcttgtgcaaaatgagcatttcattcctatgatctctatagaaacttttgataatgaaattgaagccattgaaaaatctaatgctactcgttatggccttgctgcaagtgtgtatacaaatgacctaaatcttgcaatgcgtgtaagtcgtgcaattaaaacagggacagtttggttaaatagccataatcgtcatatggctgaagctgaaactggaggttatcgtgaaagtggaatgggtcgcttgcatggtccagaagctttgaatgatttccttgaaactaaacatatatatttagaggctggcaagaattga

SEQ ID NO: 199602 - DNA, 835 bp, Unknown
  Bacterial polypeptide expressing nucleotide sequence isolated from the Sargasso Sea
aatgagttcaaaattaaaaattggcagccgagttgctctaagtgacgggaatagtatgcctttgctcggacttggcgtatgggatgctaaatcaggtaaagaaacttatgatgctgtcattcatgcactgagtaaaggatacaggcatatcgacactgcagaattgtacggaaacgaaaaagatgtaggcagtgctgttattgactccggaatagcaagggaagagatttttataacaaccaagctttgggatagtggcctaggctatgatcatgccttaaatgcatttgatgtcagtttaaaaaagttgaatctagaatacattgatctttacctgattcactggccggaaaaaggatcccggcgggagatatggagtgcgcttgaaagaataaaaaaagaagggagaagcctttcaataggtgtaagcaattttgctccaaaacaccttaatgagatattaatcaacgctaatttcaccccggcagttaatcaaattgagatgagcccttttttacatcagcaggaaatttcatcattctgtaaaaaagaaaacattcatttgacaggatattgcccgttagccagaggaacccgctttaacaatcctttactttgtagggtagcagaagaaacgaataaaactgcagcgcaggtaatgattcgctgggctattcaaaatggtaatactgttattcccaaatctgtgcgtccaaaaaggatcgaagaaaatgcaaatgtatttgatttcgaattgagagaagatcagattaaaattcttgatgaattggaagaaggactgcgtttttgtcctgatcctcttgtacttccatga

SEQ ID NO: 199603 - DNA, 1501 bp, Unknown
  Bacterial polypeptide expressing nucleotide sequence isolated from the Sargasso Sea
atgaccacacaagttaagcattacatcgatggcgaattcaccacaggcacaggaacatcacaaatcgtggtgaccaatcccgccaataacgagccaatcgcccttatcaacagcgctacggccgatgaagtgcacgcggccattgccagtgccaaggcggcttttaagacgtggaaagaagtgccagtgtctgagcgtgcccgtgtcatgttgcgctaccaacacttgttaaaagaacaccacgacgaactggcgacaatccttgccaaagaaacgggcaaaacctttgaagatgccaagggcgatgtgtggcgcggaattgaagtggcagaacatgcctgcaacattgcttcattattgatgggtgaaaccgttgaaaacgtcgcgcgttcaatcgatacctacagctacactcagcctttgggggtgtgtgcgggcatcacgccgtttaactttccagcgatgatccccctgtggatgttcccactggcgattgcctgcggtaacacttttatccttaagccatcagagcaagacccaatgacgccgcagcgcttagttgagctgtttgtcgaagcgggcgcgccaaagggcgtattacaactggtgcatggcgataaaacggcagtcgatattctgctggcagaccctgcggtgaaagccatttccttcgtcggctctgtggctgttggtcaatacatttacaaaaccggtaccgataacttaaaacgcgtgcaagcctttgctggggcaaaaaaccactgcgtgatcatgcctgatgcgaataagcagcaagtgatcaacaacctagtgggcgcatcggttggcgctgctggtcaacgctgtatggcgatttcggtcgcggtatttgtcggcgcggctaaagagtggatcccagagctcaaagaagcgctggcaaaggttcgcccaggtttatgggacgataaagaagccggttacggcccactgattagcccagccgctaaagcgcgcgtgctcaaacttatcgcccaaggtaaggaagagggcgcagagtgtttactcgatggcagcgactttagcgtggcgggctatgagtctggtaactgggtcggaccgaccatgttcactaaggtcacgaccgatatgagcatctacaaagaagaaattttcggccctgtactttgctgtatggagtccgattcattagaagatgccatcgaactggttaacgccagtccctacggcaatggtacctctatctttaccgcaagcggcgccgccgcccgtaaatatcaacacgaaatcgaagtcggccaagtcggtatcaacgtgcctatccctgtgccattacctttcttctcgttcacgggttggaagggcagtttctacggcgaccaacacgcttacggtaagcaagcggtacgtttctacactgaaactaagaccattacctctcgctggttcgagtcggacattgccgtggccgcaggtccaaatatgagcattaacttgcgctaag

SEQ ID NO: 199604 - DNA, 748 bp, Unknown
  Bacterial polypeptide expressing nucleotide sequence isolated from the Sargasso Sea
atgatcgtgttcgtcacaggcgcgtccgccggcttcggcgccgccatcgcccgtgccttcgtcacgggaggccaccgcgtcgtcgcgaccgcgcgccgcaaggatcgtctcgatgcactcgccgccgaactcggcgattcccttctgccgctcgagctcgacgtacgcgatcgcgcggccgtcgaggccgcgccggccgcccttcccgccgaattcgcggcgctcgacgtgctcgtcaacaacgccggcctcgcgctcggcgtcgagccggcccacaaggccagcctcgacgagtggcacacgatgatcgacacgaactgcacgggcctcgtcacggtcacgcacgcactgctgcccggcatgatcgatcgcggccgcggccacatcttcaatctcgggtcggtcgcgggttcgtacccttatgcgggcggcaacgtctacggcgcaaccaaggcttttgtcagacaattcagcctgaacctgcgcgccgacctgctcggcacgccgctgcgcgtcaccgacgtcgagcctggcctgtgcggcggcaccgaattctcgaacgtccgctatcgcggcgacgacgccaaggcggcgaacgtctacaacaatgtccagccgctcatgcccgaggacatcgccgatgcgatctactggatcgcgacgcgccccgcgcatgtcaacgtcaatacgatcgagctgatgccggtcgcgcaagcccccggcggcccgaccgtccaccgcggctgaa

SEQ ID NO: 199605 - DNA, 742 bp, Unknown
  Bacterial polypeptide expressing nucleotide sequence isolated from the Sargasso Sea
ttgatacaagataaggttatagtaattactggtgcatctagtggaattggtcattcaaccgccaaagcacttgcaaaaaaaggagcaaaaatagttgctggagcaagaagattagatagactggaaactttgaaaaaagaaattactgatgacggtggggaaataactatttgtgaaacagacgtaaccaaaaaagcagattgtgataatttagttaaacaagcattagacaagtatggaaccgtagatgttttggtaaataacgctggattgatgcctcttagttttgtaaaatcactaaaagttgatgagtgggacagaatgatagatgtaaacatcaaaggtgtattgtactgcactgctgcagtcgtccctacaatgactgagaaaaaatcgggccatatcattaacatttcatctgttgcaggaagaatagtcttcccagcaggaagtgtttactgcgcaacaaaacacgcagtgactgcattctccgaaggtttgagacaagaactttctgtaagaaaaaacatccgagttaccagtatagagcctggtgttgtacagactgaattaacaaacacaatcaccgaagattctctacagggattcattgaaaaaggtaaacaaatggaagcattacaagcagatgacatatcaaacgcaataatctttgcaattgatgcaccaaatcacatgaacgtaaatgaaattctaatcagaccaactacacaagatcactaat

SEQ ID NO: 199606 - DNA, 1291 bp, Unknown
  Bacterial polypeptide expressing nucleotide sequence isolated from the Sargasso Sea
aatgatgcgttttgctcacttattaaaagaacaccaggctgacatggctgagattatctgccgtgaattaggcaagacagtggaagatgccaaaggtgacgtctggcgtggtattgaagtggtggaacaagcggcgaatattccgtcgttgatgatgggcgagacggtggaaaacgtagcacgcagcatcgacacctacagctatattcagcctttaggtgtgtgcgctggtattacgccttttaacttcccggctatgatcccgctgtggatgttccctatggctattgcctgcggtaacacttttattctgaagccgtctgaacaagatccgatgacagtgaataaaatcgctgagctttttgctttagccggtgcacctgcaggcgtattgcaggtggtgcatggcaacaaagaacaggtggatgtgttattacgtcacccggacatcaaagctatttcttttgtgggctctgttaatgtcggccagtacatctacaaaacaggcactgatcatttaaaacgagtacaggcttttgcgggtgctaaaaaccatatggtagtgatgccagatgccaacaaacagcaggtgattaatgctttagttggtgcttcagtaggtgctgcaggtcaacgttgtatggcgatttctgtggctgtttttgttggtgattcgcagcagtggatccccgaagtagccgctgctatcgcgaaagttcgtcctggcgtgtacacggaccctgaagctgcctacggtcctcaaatcagccctcaagcgaaagctcgtattttgtccttaattgaacaaggcaaagtcgaaggcgccacttgtttagtggatggctcggatatcaaagtggcgggttatccaaacggcaactgggtgggtcctactgtatttagcgatgtcacacctgatatgaccatctacaaagaagagatctttgggccagtgctggccacagtgaatgccgcttcgttggatgaagccattgagctggtcaacaacagcccatatggcaacggtacttctattttcaccgccagtggcgctgcagcgcgtaaataccagcatgaaattgaagtaggtcaggtcggtatcaacattcctattcctgtacctctgccatttttctctttcacaggctggaaaggttccttctacggtgaccaacatgcctatggtaaacaagcggtgcgtttctacacagaaaccaaaaccattaccgcccgttggtttgacgactctattccggtgtcaggcccaaatatgtcgattaacctgcgttaa

SEQ ID NO: 199607 - DNA, 832 bp, Unknown
  Bacterial polypeptide expressing nucleotide sequence isolated from the Sargasso Sea
tatgcaaattaaagatgcaatcgaatattcaattaacgtactaacgctatcagatagtaaacaaattgactctgaagttttgctttgctttgtattaaaatgtaatcgcactaagctctatactcactcaaaagaagaattatcaaatcaaaataaaaatattttcaaaaaacttgtaaaaaaaagagcgaagggttgtccaatagcctatattacaaatgaaaaagaattctggtctcacacattatttgtcaatgaaagcactttgatacctagacctgaaacagaattactagtagagatatcaataaaattaataaaaaaccattctctaaatgaaattctagaattaggaacaggatctggtgctgtagcaattgccatagcatcggaaaatctagatactaatattgacgcaaccgatataaatgatgaagctattaatgttgctacaaaaaatattttgaaacataacattaaaaatattaactttatcaagtcaaattggtttaacagtataggtataaaaaagtatgatttaatcataacaaaccctccgtatattgagacaaatgatccatgcttaactaatagtgatattaaatttgagcctataatagctttagcttccggaattgatgggcttgatgatttacgtaaaattatttctaattcacataataaattaaaaaataatggctggttagtagttgagcatggccataatcaaggaaatgatgtaagaaatttgtttataaaaaactgtttcacaacaacaactataaaagattacaatcaattagaaagggttacttacggaaagttaatataa

SEQ ID NO: 199608 - DNA, 1108 bp, Unknown
  Bacterial polypeptide expressing nucleotide sequence isolated from the Sargasso Sea
atgaaaattcataaacaggatggaccgccagaagatcttttatattttgatgaagatataaatctaactcaaaaacaagttgaagatgttgtagaaatttttcacacacctcttaccggtgcatataactgggattacactgttgcagataatcgaattaaaaaactttatgagcttggcaaagaattaaattggaatggctctattgatcttaattgggattatacacatccagctgataaaagaattatggagcctgatgaggaacttcctcatgaagctcttgatgcttacaatgatcttacagaagaagaaaaaatactttttgataggcatagtactgctgaactaatgagccaatttcttcatggagaacaaggtgccctattagtagcatctcagttagcaagttgcgcccctacctataatgcaaaactatatgcagcttctcagacatttgatgaagctaggcatgttgaggtatttaataaatacctacaagataagattggaatccattatccaatcaatcctaatttaaagttattgcttgataaaattcttacagatgaaagatgggatcttaaatttatcggtatgcaaataattattgaaggactagctttggctgctttccaaatgcttaaagcaattacaaaagatcctttgttaaagcaattacttcattatgtagttcgtgatgaagcaaggcatgtaacttttggtataaattatttagaagattatctaaaaacactatcacctgaagaaatagaagatagagctcaatttgcatatgaagcttgtgttatatctagagatagattaattaatacaaaatcagagcaaagatttttaaaaatgacagaagaggaagcaagagaattttctttaaatactggaagttttgaattgttcagaaatttcttatttactagagtgatgccaaatcttaagagaattggtttattaactgattcggtaagaccaaaatttgaggctttaggtcttcttgagtatgagaatgctccagatgattttgagtgtgactgggctgaaatgaaaaagcctttagaaaagtttggtcaaattccagaagttgtctaat

SEQ ID NO: 199609 - DNA, 1102 bp, Unknown
  Bacterial polypeptide expressing nucleotide sequence isolated from the Sargasso Sea
atgaaaataaaaaaacaaagcgggccaccagaagatcttatctattttgatgatgatcttcccctctcacaatcacaagtagaggatgttgttgaaatcttcaaaactcctttaactggatcatataactgggactacacagttgcagataacagaattaaaaagctttatgagcttggtaaagaattaaactggaatggttcgattgatcttaattgggattatacgcatcctgcagatgaaagaattcttgagaccgatgatgagctacctcatgagacactagaagcctatgaaaacctatcggatgaagaaaaaatcctttttgatagacatgatgttgctgaattaatgagtcaatttttgcatggtgagcaaggcgcccttcttgttgcttctcaattagcaagttgtgcacctacctataatgctaagctctacgctgcttctcaaacatttgatgaagcaagacatgttgaagttttcaataggtatcttcaagaaaagataggtattcactaccctataaatccagcgttaaagtcactgcttgataagatccttactgatgaaaggtgggacctaaaatttattggtatgcaaattattatcgaaggtcttgctcttgcagctttctctatgctgaaatctacatcaaaagatcctctcttaaaacagctacttcactacgttataagagatgaagctaggcatgtaacttttggtattaattacttagaagattttattaaaaccttaagtccagaagaaataaatgaaagagctgagtttgcatatgaggcttgtgtgatttcaagagaaagacttattaataccaaatctcaggagcgcttcttgaagatgtcagaggaagaagctagagagttccaattaaatactggtagctttgaaatgttcagaaacttccttttctcaagagtaatacccaatctatcaaggattggcctacttactgatgaagtgagaccaaaatttgaggctcttggcctattagagtatgaaaatgctccagatgattttgaatgtgattgggcagagatgaggaagcctcttgaggcttttgaaaaaatcccagtttaaa

SEQ ID NO: 199610 - DNA, 1579 bp, Unknown
  Bacterial polypeptide expressing nucleotide sequence isolated from the Sargasso Sea
atgacgacccgcatctacgttccgcgcgattcgtccgcgctggcactcggcgccgacgcgctcgccgccgcgatcgaggcggaagccgaacgccgcggcatcgccatcgaactggtccgcaacggttcgcgcgggctgctgtggctcgagccgctcgtcgaggtcggcacagccgccggccgcgtcggctatgcgaatctgtcggccgccgacgtgccggccctgttcgacgcgaactggctcgaaggcggcacgcatccgagcgctgtcgggctcgtcgatgcactgccgtatctcgcgcgccagcaacgcctcacgttcgcacgcatcggcctgacggacccgctgtcgatcgacgactacctgcgatacgaagggctcgtcggcctgaagaacgcgctcgcgctcgacggcgatgccgcgtgcgaaacgctgatcgaatcggggctgcgcggccgcggtggtgcagcgttcccggccggcatcaagtggcgcacggtccggcaggcgcgcgccgcgcagaaatacatcgtctgcaatgcagacgaaggcgattcgggcaccttctccgaccgcctgatcatggaatgcgatccgtactgcctgatcgaagggatgatcatcgcgggcgtcgcgaccggcgcgaccgtcggctacatctacgtgcgcagcgaatacccgcacgcgatcgccacgctcgaagccgcgatcgtccgcgcacgtgaagccggctggctcggcgagcacgtgctcggctccgcgcacgcgttcgagctgcacgtcgcgaaaggcgcgggctcttacgtgtgcggcgaggaaacggcgctgctcgaatcgctcgaaggcaagcgcggcgtcgtgcgtgcgaaaccgccgctgcccgcactcgccggcctgtacggccagccgaccgtcatcaacaacgtgatcacgctcgcaacggcgcccgtgatcttcgcgcgcggcgcggcgttctatcgcgactacgggatgggccgctcgcgcggcacgctgccgttccagctcgccggcaacatccgccacggcggcctcgtcgaactcgcgttcggcgtcacgctgcgcgagctgctgttcgacttcggcggcggcacggccagcggccggcccgcacgtgccgcgcaggtgggcggcccgctcggcacctacctgcccgaccaccagtgggacgtgccgctcgactacgaagcgtatacggcgatcggcgcggtggtcggccacggcggcatcgtgctgcacgacgacacgtcgaacctcgccgagctcgccgaatacgcgatgaagttctgtgcgatcgagtcgtgcggcaagtgcacgccgtgccggatcggatcgacacgcggcgtcgagacgatcgcacgcatccgccacggcgatacgtcggagcggcaggtcacgctgctgcgcgacctgtgcgacacgatgctcgccggttcgctgtgcgcgatgggcggcatgacaccctacccggtgctgtccgcactcgaccatttccccgaagatttcgggctcgctgccggcaaacatgccgcgtcgggtccggtcaaggctgcggcctgac

SEQ ID NO: 199611 - DNA, 642 bp, Unknown
  Bacterial polypeptide expressing nucleotide sequence isolated from the Sargasso Sea
cagttgctgtagcggtaggaaagattgccgaccccttagtaaacagtctttctaaaaaagttgagtcacttaaaattggtccaggattagataagaaatctcaaatgggaccattggttactaaggagcatttagaaaaagttaaaggatatgttgatattggggttaaagagggagccaagcttgtggtagatggaagaaatctaaaacttcaaggttatgaaaatggtttttatatggggggatgtttatttgataatgttaaaaaagatatgaagatttacaaagaggaaatttttggacctgttctttcagttgtaagagcaaaagattacagtgaagcattatctttagttaatgatcatgaattcgggaatggcacaagtatattcaccagagatggagacacagggagatcattcgctagcaatgtaaaaatcggaatggtcggtataaacataccaataccagttccaatggctttccatagttttggaggatggaaaagatccttatttggagatcaaagtattcatggacctgaaggtgttaggttctacacaaaattaaaaacaattacatctagatggccatcaggaattaagtcagatccagaatttgtgatgcctacaatgaaataaa

SEQ ID NO: 199612 - DNA, 514 bp, Unknown
  Bacterial polypeptide expressing nucleotide sequence isolated from the Sargasso Sea
ggttaaaccaaacacacctcatgaaaattctccacaaagtgagatggacaaatgtttggatagattcgacaaaataagaaactctaaaggtgagacaaatacatctcaactaagattatctatgcagaaaacaatgcaaagcaaatgtgcagtttttagaactgaaaaaactttaaaagaaggtgtagaagaaattagaaagccatttgaaggattagaggacatatcggttaaagataaatcacttttattcaatacagaccttgtagagtctttagaatttgataatctgataagacaagctatgaccactatggactcagcatatcataggaaagaaagcagaggagctcacgcaagggaagatttttcaaaaagagatgataaaaaatttatgaaacacacattagcttggcagaatggcaaggaagttaaagtaaaatacagagacgttcacgcaaaaacattgaccaatgatgttcaatattttccacctaaagaaagagtttactaa

SEQ ID NO: 199613 - DNA, 970 bp, Unknown
  Bacterial polypeptide expressing nucleotide sequence isolated from the Sargasso Sea
attgttagaaaaccctgtttataagccttttagatatccatggtgttatgatgcttggttaactcaacaaagaattcattggttgccagaagaagtaccacttggcgatgacgttagagattggcaaaaaaatttatctcaagccgaaaaaaatttacttactcaaatatttagattttttactcaggcagatgttgaagttaacaattgttacttgagacattatacaacagtgtttaaaccaacagaagttttaatgatgatgacagcctttgcatcaatggagacagttcacattgcagcttactcacatttattggatactattggaatgcctgaaacagaatattctgcttttatgaaatataaagaaatgaaagacaaatacgactatatgcaaaatttcaatgtaaattcaaaagaagatattgcaaagacagttgccgtatttagtgcttttacagagggtctacaactttttgcaagttttgcaattttattaaacttcccaagatttaataaaatgaaaggtatgggccaaattgttacttggtcggtaagagatgaaactttgcattgcaactctatgattagaatttttaaagaattcataaaagaaaatcccgaaatttggactccaaaacttaaaaaagaaatttatgaagcatgcagaacaattattgagcacgaagatgcatttatagatttagcttttcaaatgggaccaatgaaaggactgactgctcaagaggttaaagattatattagattcattggcaacagaagattatctcagcttggactagaaccaatttataaagtagaaaaaaatcctctaggatggttagacacaatgttaaatgctgttgagcatatgaatttttttgaaggaagagctactgagtactctaaagcatctacaaaaggaagttgggccgaagcttttagtaatttaggttctaatcaataa

SEQ ID NO: 199614 - DNA, 829 bp, Unknown
  Bacterial polypeptide expressing nucleotide sequence isolated from the Sargasso Sea
ctttgttggatctactccaattgcaaaatatatttacgaaaattcagctaaaaatgaaaaaagagtacaagcacttggaggagcaaaaaatcatttagtggttatgccagattgtgatttggatggtgcagtaaatggcttgatgggtgcagcttatggatctgcaggtgaaagatgtatggctcaatccgttgctgttgctgtaggagatattggtgatgaactggtctcaagactttctaaaaaagcagaagccttaaaggtaggacctggtatggataaaacttcagagatgggacctctagttacaaaagagcatttagaaaaagtaaaaagttatgttgatttaggagttgaagagggagcaaaattagttgttgatggaagaaacttaaagctccaaggttatgaaaatggattttatattggtggttgtttatttgataacgttaacaaagacatgagaatttataaagaagaaatttttggtcctgttctatctgtagttagagttaaaacttttgaagaagctgcaaaactaatcaatgatcatgaatacggaaacggagtaagcatttatactagagatggtgatgcgggcagaacatttgctagtaaaattcaagtaggaatggttggtattaatgttccaatcccagttcctatggcctttcatagttttggtggctggaaaagatcattatttggagatagcggcatgcatgggatggaaggaataaaattctatactaaacttaaaacagtaacatcacgatggccttcaggtgtgcgtacaaacgcagaatttgtaatgccaacaatgaaataa

SEQ ID NO: 199615 - DNA, 1264 bp, Unknown
  Bacterial polypeptide expressing nucleotide sequence isolated from the Sargasso Sea
tttggcaggaatatcaatcttatttgctttgatatgcattccttttgggatatttgatcccactatatttaaaagtattccaataagaatttttggaatcatgaataacataacattgcttgctgtacctttatttatttttatggggaccattttagaaaaatcagggattgcagcaaaaatgttagaaaatatggctgctgcttttaagaaaactaagggtggtttatcgatatcaattattgtcgttggagctctacttgctgcaagcaccggtattgttggggcaacagtggtgactatgggtttaatgtctttgccaatattaataaatcaaggatatgaaaagggtttctcagcaggattggttgcatcaacagggactttagggcaaatcatacccccttccattgcattggttttgcttggtgatgttatgtcaaatgcttatcaaagagctcaaaatgatatgggtatattttctcaacagacggttacagtaggagatctttttataggcgcagtaatcccaggaatgatgatatgtcttgggtatcttatctatacgacttatagaaatggtaaaaataaagatttaaaagactactctaataaagtcccaattcaaagaattgagttattaaaaactcttgcacttccaatagtattaatctttcttgtgcttggttctatatttgctgggattgcgaccccaacagaagcagcagcaattggagcttttggagcaatgctaattgcatttgtaaatggcaagattaattttcaatttatcaaggaaacctcagagaagacagcaatagtatctactatgattttcactatactaattggagcttcaattttttcattaatctttagaggtgtgggtggagacgagttgattaatctgatttttagctctcttccaggtggaccgctcacagcacttatctttgttttaatagtgattttcttattagggtttattttagactttatagaaatctgttatgtaatagttcctttgatagccccgccacttttaatgatgggctttgatccagtttggctggcaattctttttgcaattaatttacaaacctctttcttaacaccgccttttggattctcattattttatttgagaggagtcgcggatgaaaatattcaaacctcagagatttataatggtgtaataccctttattctaattcagttattagtgctattaatagttatgatttttcctgtttttgttttataa

SEQ ID NO: 199616 - DNA, 793 bp, Unknown
  Bacterial polypeptide expressing nucleotide sequence isolated from the Sargasso Sea
gatgagcaagtacgcaaatgtccgaggattgtcgcgtggcctgcaggtgctgcaggccctcaatgcgctggagaacggccgcgcgacgagccagcagctgagcgaagtcacggggctgcaccgcacgaccgtgcggcggttgctggaaacgctggtggaaggcggattcgtgcgacgcagcgagtcggatgacacgttccgactgacgctgcgtgtgcgcacgctgagcgaagggttcaccgacgacgaacacattgcgacggtcgcgccgccgatcatggccacgttgctgcagcgcatcgtgtggccgtcggacctgacgacgccggacggcgattcgatgatcattcgcgagacgactcatcggttcagcccgctgtcatttcatcgttcgatggtcgggcgccgactcccgatgctgctgacggcatcgggccgcatctacttcgcgtcgtgccaggacgcggagcgcgaggatattctcgacctgctgcgcaccggtgccggcggtgaacaacaacagcgactcgcatcggacgatgcattcattcgcaatcttgtaaggcggacacgcgccgacggtttcggatcgaaccatggcgactggaccgaacaacgcaaaatcggctcgctcgccgtcgcggtcagcgcgcatgatcgagtgatggcggcgctgaacgtgatctacctcgaacacgcgatcaatccggcggacgccgtgagacgctttctgccttcgctgcaacacgccgcgcaggagatgacgagcgcgctcgatgcaccagggaattag

SEQ ID NO: 199617 - DNA, 1069 bp, Unknown
  Bacterial polypeptide expressing nucleotide sequence isolated from the Sargasso Sea
gatgaaatccatttttgactcgatcactttaggtaaaaataccctacaaaacgcacttgttatggcgccaatgacccgttcaagggccaatcgggatggtactcccggtgcattagcagccgactattacagtcaacgcgcaagtctgggcttaattgtcaccgaaggcatacaaccatcagacgacgggcaaggctatatctttacgccagggatttacacccaagcccatatcgacggctggaagccggtcacgcaagcggtgcatgcaaaaggcggacgtatttttttccagctgatgcatgctggccgaatgtctcatccagacaatacaccgcatcaccgggctggtttggccccttcagccatagctccaggtacgcaaatgtttaccttgaaaggcatgctggacattccggtgcccgaggccatgactcaggtgcaaattaagcaagccattggcgaattcagacatgccgcacgcagtgccattgaagcgggcgccgatggtgtcgaaattcacggtgcgaacgcttacctcatccaacagtttcttgccccaagctcaaatactcgtacggatgaatatggtggttctatagagaacagagctcgctttgctatcgaaattgctaaggctgtcgccgaagaaatcggtgcagaaagaacagctatccgcttgtcaccgggcacaaaattgtggggcattgatgaaggcgctgagggatcagccttataccgctatttggttactgagttgaacaagctgcaattggtttatttgcacgtgatgcatcaaggtgatgacgagcttctgcaggatatccgtgatggttgggatggcattttgatcgttaacaaaccaggccgtgcccgcgaaaacatcggtgaagatattcgaagtggcttagccgatttagaggcttatggtcagatggtgctggctaatcctgattttgtcgaacgtctgaaacaggacattccgtttaatacggcggatcgcaatactttctttggtggctcagcacaaggttataccgattatccgctggccaaggttgcaggctga

SEQ ID NO: 199618 - DNA, 1081 bp, Unknown
  Bacterial polypeptide expressing nucleotide sequence isolated from the Sargasso Sea
atgatctttgaaaattacaaacttaaaaatattactcttagaaatagaattgtaatggcgcctatgactagaaatcagtctcctggagggattcccacgcaggaggtggttgcctattattctaggcgagcaaaagcagaagttgggttgattattacagagggaattgaagtaagtcataaggcttcaagtgcatatccaaatgttcctagattagatagtaatgaggctaaagaagcgtggaaaaaggtcgtagagggaattaaaaataacaatggggcagttattgcacaattatggcattgtggtggttttagaaagctaggcatgcaaccaaatcctgaagtacctggtcatacagcctctggacttgtaaaacctggtaaaaaagtagctcatgagatgactttaaatgatatcaaagaaacaattgatgcttacgcatcagatgcaaagatatgtgaagagattggatttgatggagttgaaatacatggagctcatggttacttgatagataattttttttggagcggtacaaatattcgtgaagatgaatatggaggctcaatagaaaatcgctcacaatttgtttcagatattattaaatctgttagagagaatgtcagtgaaaattttattgttggcttaagattttctcaatggaagcaacatgactttgaagctaaacttgcatctaatcctgaagaacttaaaacaattcttacttcacctgtagaatctggcttggattatttacattcaagcatgagaaggttctgggaaagcgaatttacaggctcaaaggaaaacctagcctattggactaagaaaataacaaagatcccaacgattggtgttggcagcgtaggactggattcagattttattgatatgactgcaccagcaacaccaacaagtattgacaaagcaatagatgatattacgaatgacaaatatgatcttatagcagttggcagagcattattatctgatcatgaatgggttttaaagatgagggaaggtagagttaacgatgttattccgtatacaaaagacgcattgctaaatctttattgat

SEQ ID NO: 199619 - DNA, 1084 bp, Unknown
  Bacterial polypeptide expressing nucleotide sequence isolated from the Sargasso Sea
caacctttaggagtagttgcaggtattactccatttaattttcctgcaatggttcctatgtggatgttccctattggaatagcgtgtggaaatacatttattttaaagccatctgaaaaagatccttcatgttctataatgttagctcagttactttcagaagcaggtcttcctgaaggtgtttttaatgtagtgaatggtgacaaagagtctgtggatgcaatactagagaactcagatatcaaagcagtaagctttgtaggctcaacgccaatcgcaaaatatatttatgaaaattcggctaaaaatgaaaaaagagttcaggctttaggcggagcaaagaatcatttggttgtaatgccagattgtgatttagatggagcagttaatggtttgatgggcgcagcttatggttctgcgggcgaaagatgtatggcccaatctgttgcagttgcagtgggtgatattggtgatgaacttgtttcaagattatctaaaaaagctgaagcgcttaaagttggtccaggtatggataaaacttctgaaatgggtcctttggtcacaaaagaacacctagaaagggttaaaggatatgttgatttaggagtggaagagggtgcgaagttagttgttgatggaagagatctcaaacttcaaggttacgagaatggattttatataggtggatgtttgtttgatcatgtcgataaagacatgagaatatataaagaggaaatttttggccctgtgttatcagttgttagggttaaaacttttgaagaggctgcaaaattaattaatgatcatgaatatggaaatggtgtgagtatttatactagagatggagacgctggaagaacatttgctagcaaaatacaggtaggcatggtaggtattaatgttcctataccagtacctatggcctttcacagttttggaggctggaaaagatctttatttggagacagcgcaatgcatggcatggagggtataaaattttatacaaaactcaaaacaataacttcaagatggccttctggtatccgttctaatgcggaatttgtaatgcctacaatgaaataag

SEQ ID NO: 199620 - DNA, 772 bp, Unknown
  Bacterial polypeptide expressing nucleotide sequence isolated from the Sargasso Sea
atggaattggcaaataaaacagcttttatcaccggcggagcttcaggcttggggttagcaaccgcgcggaactttgtaaaagctggagctaatgtctgtctatatgatatgaatgaggaatcactggaattagcagctaaagaattcggatctaaagcaagttgtttcaggggcgatgtagctgatgaagctagtgttaaggaagcgattaaagagacaatttcttcttttggctccattcatataaacgttaattctgcgggaattggcggtgctgctaggaccgttggtcgtgatgggcctatgccccttgaaaaatttgagcacataatcagggtgaatctaatagggacctttaatgtgcttaggttgtgtgctgaggcgatgcagcttaatgaaccgcaaaatgaagatcaggaaaggggggttatcgtaaacgttgcttccatagcggcgtttgatggtcaaacggggcaagcaggttatgccgcgagcaagggcggtattgtctccatgacgttgccagttgcaagagatttggcgaaaagaggtataagggttgttacggtagcgccaggtatctttgaaaccccgctgttggcgggcgcgccagatgaagtaaaagaaccgttgattgcgataacgcaatttcctaagagactgggtaatccagaggaatttgctgaagaagtagcccacattgtcaattgcagttacttaaatggagaagttattcggttagatgcaggtattcgaatgccggctatgtaag

SEQ ID NO: 199621 - DNA, 1365 bp, Unknown
  Bacterial polypeptide expressing nucleotide sequence isolated from the Sargasso Sea
atcaagcagttttaattgcaaaaaaagcgtttgatgagtggtcattaaaaccttctcttcaaagagccagaataatgttcaaatttaaggagttaatagaaaaaaattcagatgaactgacacaattaattgtagcagaacatgggaaagtttatgaagatgcaaaaggatctttaactagaggacttgaggttgttgaatttgcatgtggtattccacacttacttaaaggagaattttcggaaaatgttggaactaacgttgatagttggtctatacgacaacccttaggagtcgttgcaggaattacaccattcaattttccagccatggttccaatgtggatgtttcctatagctattgcttgtggaaatacttttatattaaagccatcagaaaaagatccatcatgttcaataagattagcagaacttttaaaagaggcaggtttaccaaacggtgtttttaacgttgtaaatggagacaaagaggctgtggatgcaattcttgcaaataaagatattaaagctgtaagttttgtcggctcaactcctattgcaaaatatatatatgaaaattctgctaaaaacgaaaaaagagttcaagcattaggtggcgctaaaaaccatttagttgttatgcctgattgtgatttagatggtgccgtaaatggattgatgggagctgcttatgggtcagcgggcgaaaggtgtatggcacaatcagttgcggttgctgttggagatattggagatgaattagtatcaagattatcaaaaaaagcagaggctttaaaagttggtcctggaatggacaaaaattctgaaatgggtcctttagtgacaaaagaacatttagaaaaagtaaaaagttatgttgatttaggagtaaaagagggagcaaaattattagttgatggaagaaatttaaaattacaaggatatgaaaatggattttatatcggtggttgtttgtttgaccatgtaaaaaaagaaatgagaatttataaagaggaaatatttggacctgttttatctgtagttagagtaaagacttttgaggaagctgcaaaattgataaatgatcatgaatatggaaatggagttagtatttatactagagacggtgatgctggaagaacatttgcgagtaaaattcaagttggcatggttggaataaatgttccaataccagttcctatggctttccatagttttggaggctggaaaagatctttatttggtgacagtgctatgcatggcatggaaggcataaaattctatactaaattaaaaactataacttcaaggtggccttctggaattcgctcaaatgccgaatttgtgatgccaacaatgaaataaa

SEQ ID NO: 199622 - DNA, 551 bp, Unknown
  Bacterial polypeptide expressing nucleotide sequence isolated from the Sargasso Sea
taaaaattctgaaatgggacctctgataactaaagaacatttagaaaaagtaaaaggatacgtagatttaggtgtcaaagagggtgcaaatctcgttgttgacggtagaaatttaaaacttcaaggttatgaaaatggtttttttatgggtggatgtttatttgataatgtaaaaaaagaaatgagaatttataaggaagaaatctttggaccagtattatcagttgtgagagcaaaagacttccatgaagcctcggaattagtgaataatcatgagtatggtaatggtgtaagtatttttacaagagatggcgacgctgcaagatcattttcaagtaaaataaaagttggaatggtaggaataaatatacctataccagttccaatggcattccatagttttggtggatggaaaagatcactattcggggatcagcatatgcatggtcctgaaggtgtgagattttatactaaacttaaaacaataacctcaagatggccatcaggaataagatcaaaccctgagtttgtaatgcccactatgaaataaa

SEQ ID NO: 199623 - DNA, 2407 bp, Unknown
  Bacterial polypeptide expressing nucleotide sequence isolated from the Sargasso Sea
atgagtacacagagctatttcaaagacttacaacaactaaaatatcgagatgaaataaatcttgtttctgatctcattgatcataatgattggattaacgaaaaggtaatatctcaaaatgctgaagaaatagtaaaaaattgtcgacgagatagaaataaaacaaggttagataatttttttctcgaatatggtttgagcaatcaagaaggtgttgcgttaatgtgtctggcagagtcgcttcttagaatccctgataaccaaacatgtgacgagataatagaggaaaaaattggtggaaagaaatggctagcccactttaatagttctccatctctatttgtgaatgcaacaacttttggtctatttttagctgaacaagtggttgagttagataagaatataagtgctaatccaataagttggtttcaagggttaacttcaagattaggtgatccaattctaagagaagcaattaaaaaaggtatggaaatcttaagtgaagaatttgtatcgggtattgatattgatgacgctttaaataaattcgatcttcctaaaaccccttgttcatttgatatgcttggtgaagctgctaggacacaatcagatgtagattttttctttaatgcttatgaagaagcaataagaaaagttggtgaaaaaaatgccttgctttcgaagtcttttcatgaaatttccataaaactttcagccattcatccaagatacgaagctacaaaaaaagatagagttatggatgagcttttagaaagagtctatcagttgtgtgttcagtctgctgcacatgatatagctttaactattgatgctgaggaacaagataggttggaactgagccttcatctaattgagaatcttgctaaacgtaaagacttaaaagattggagcggtttgggtttagcaatacaagcttacggcaaaagagcgccagtcgttgttaaattcattgatgaacttggtgcaaatagaaacggcatgatgatgcgattagtcaaaggtgcctattgggatcaggagataaaaatacatcagattaaaggcgcagcagatttgccagtttttacctctaaatcttttacggatttaaattatctttcaactgcaaaaataatttctgaaacaaaaaatctacgtccttattttgctacacacaatgcccatacaattgcagggattatgcagctttatcaaggcagagaagatcaatttgaatttcagagaatatttggaatgggtgacctaacatatagaaatgcccaaaaagtatattcagattttccgttgactagagtttatgctcccgtaggttcaaaaaaagagctgctaccctatttggtcagaaggcttttagaaaacggggctaatagttctttcgtaaacaaatacttgtccaaagatattccagtaaaagaagttgttaaaaatccaatagagatagcaactaaaaacctttcaggaaaaaatttcttaaaacaggttccaagacctaataaaattttctctgacagagagaattcacaaggttttgattttggagatttaatggagatagaaaatttaaccaaaaatataactgcttttgataataatgatttttatgcttgctcattgcttaatggtgaggaagttatagacaaatatgaagataaattttcacccaccgaccaatcaaagaaaataggaagggtatcttatcttacaaaagataatctaagcaaaataaacttcaacaatggtgatgattggaaaaaagcttcagttgaaaatcgcatagaagttctaaaaaaagttgcaaatttactccaagcaaatgcaaatctattttttgcattgttagttaaggaggcaggcaaaagcttaaaagactgcgatgccgaaataagagaatcgatagattttattaattattattgtttacaagcatctaagattttcaaaccaatagatttagaaagcccatcaggagaaagaaactttttatcggttgctccaaagggcaatttcctatgcataagtccttggaatttcccaatggcaatttttattggacaaattgctgctgcattagttgctggaaataaggttttagcaaaacctgcagaagatacatctctaattgcttttcaaatagtaaagctttttcatgaaagtggtgtacctgaatctgtactgcaattagttatcggaggaaaagacattggtaatgaattaacaaaacttactgagttgaatggtgtggcatttactggctcaactacagctgctaaatctataaatctcaatctagcaaaatcagaaggaccaattaagactctcattgctgaaacaggtgggcaaaatgttatgttcgtggattcgtcatcattaaaagaacaagttatag

SEQ ID NO: 199624 - DNA, 1052 bp, Unknown
  Bacterial polypeptide expressing nucleotide sequence isolated from the Sargasso Sea
tggagtaattgctgcaatcgttccatggaattctcaaatgtttttaactgcaactaaacttgctccagctcttgcaatgggaaatactattgtaatcaaagcatcagaacttgcgccagcaacaatgtttgagtttgcaaaattaattgaagaaactgaaattcctaaaggagtagtaaatgttattacaggttttggagacccatgtgggaaagcattaacaactcataatttagttgaaaaagttgcattcacaggtggtcctgaaactgcaagacatattattagaaattctgcagaaaatttatctgaagttagtttagaacttggtggaaagagtccagttgcagtattcaacgatgcacatcaggaaaatgcagttaatggaattactgctggaatttttggtgcatctggacaaagttgtattgcgggttcaagattatatttacaaaaagaaatttataatgaatttttagataaacttacagctagagcagaaaaaataaaaataggagcgccaatggatccagaaactgagatgggaccattaagtaatttcaagcaattagaagttatagaaaaaaatataaaattaactgttgagcaaggtgggaaaattaaatgtggtggtaaaagacattcatattcaaatgaaggatattattttccgccaacaattattgaatgtgataatcataatttgccagtagctgaaaatgaattatttggtccagttttatcagttatgaaatttgatacagaaaaagaagttattgaaaaaatgaatgataatcagtttggattatcctctggagtttatactagtgatctggctagaggattaagagtttcaaacgcaattagagcaggaattacattcgttaatacttacagattaatctcaccatcagctccatttggtgggattaaagatagtggatatggaaaagaagcgggcatcgactcaattaaagactacacaagagttaaaactatttggtactacacatctgaggaaccaacccttgatccttttgcaattagatagt

SEQ ID NO: 199625 - DNA, 751 bp, Unknown
  Bacterial polypeptide expressing nucleotide sequence isolated from the Sargasso Sea
catgaagaccgtattgatcaccggctgttcctccggcttcggcctcgagattgcccgctatttcctggcccgcgactggcgggtcgtcgcgacgatgcgcacgccgcgcgaggacgtgctgccgccgtcggcgaacctgcgcgtgctggcgctcgatgtcacgaatcccgacagcatccgcgcggcgatcgacgccgccggcccgatcgacgtactcgtcaacaatgccggtttcggcgcggcggcaccggccgaactcatgccgctcgacacggtgcgcgccctgttcgagaccaacacgttcggcacgatcgcggtcacgcaggccgtgttgccgcaattgcgtcagcgcggagccggcgtggtcgtgaacgtcacgtcgagcgtcacgctgaaggtgctgccgctgctcgccgcctatcgcgccagcaaggcggcggtcaatgcgtacaccgaatcggtggcgctcgaactcgcgccgttcggcgtgcgtgcgcatctcgtgctgccgggccgtgcgcccgacacgcgtttcgccgagaacgcacgcgcgcacatgcacggcttcgagcacgaggcttatgcggaatttgccgcggcggtctttgcgcgcatcgtcgacgaagccgcgccgatcacccacgcgcaggacgtcgccgaagccgtgtggcgcgcggcgaccgatccgtcgagcccgatgcgcattccggccggcgccgatgccgtcgcgtgggcggcggaagcgggctga

SEQ ID NO: 199626 - DNA, 892 bp, Unknown
  Bacterial polypeptide expressing nucleotide sequence isolated from the Sargasso Sea
cttaaactgggattatacgcatcccgcagatgaaagaatccttgagactgatgatgagctgcctcatgaaacactagaagcatatgaaaatctatcggatgaagaaaaaatcctttttgatagacatgatgttgctgaattaatgagtcaattcttgcatggtgagcaaggcgccctccttgttgcttctcaattagcaagttgtgcacctacctacaatgctaagctctatgcagcatcacaaacatttgatgaagcaagacatgttgaagttttcaatagatatcttcaagaaaagataggtattcactaccctattaatcctgcattaaagtcactgcttgataaaatccttactgatgaaagatgggaccttaaatttatagggatgcaaataattattgaaggtcttgctcttgcagctttctctatgctgaaatctacatcaaaagatcctcttttaaagcagttacttcactacgttattagagatgaagctaggcatgtaacttttggcattaattatttagaagattttattaaaaccttgagtccagaagaaataaatgaaagagccgagtttgcatatgaagcttgtgtgatttcacgagaaagacttatcaatacaaagtctcaacaacgctttttaaatatgacagaggaagaagctagagagttccagttaaatactggaagttttgaaatgttcagaaacttcctcttctcaagagttatacctaatctttcaagaattggtcttcttactgacgaagtgaggccaaaatttgaggctcttggtctattagaatatgaaaatgctccagatgattttgagtgtgattgggcagagatgagaaagccgcttgaagaatttgaaaaaatcccagtttaa

SEQ ID NO: 199627 - DNA, 748 bp, Unknown
  Bacterial polypeptide expressing nucleotide sequence isolated from the Sargasso Sea
attgaaaggtaagaaatgtatagttacaggtggatcaagcggtattggtgaagcaactgttagaagatttatcagcgaaggggcagaagttctaattgcagatatcaatcttgaagattcaaaaaaattatcagaagaaattggcgaaggcgttgattatatcaaatgtgatgtaaggcttgaggatgatattatttctgtttcagaaaaagcttatgaaatgtgggatcaggttgatgtgttggttaacaatgctggatctgaactcaatcagtcctatgataagatgacagaggcagaatgggataatgttcttaacacagatctaaaagggccttggttaatgtgtaagcacattgtaccaaagatggtagaggcaggatcaggaagtgttatcaatatttcctctttaaatggtttagttggctttcctctttcaactgcttacggaagtgccaaaggcggattagtagtatttactcgcgatatggcgattgagttagcttcgactggtgttagaattaactgtgtttgtccgggtgttatccaaacaggtatgatggaaagatggacagatcttatgcctgataaagctgaggcacaggaaatgcttaggaacacaatgccgattggaagaatgggaacagcagaagaagtcgcaggttcaatcttcttttttgcttcagatgattccagtttatgccaaggatctgttttgagtgttgatggtggatttactgcacagtaa

SEQ ID NO: 199628 - DNA, 1105 bp, Unknown
  Bacterial polypeptide expressing nucleotide sequence isolated from the Sargasso Sea
aatgagtgataatattttaccaagtcaaaaaatctttagcataaaagatgcaagagaactatcacgtaaacgtcttcccaaattagtttttgattttattgacggagcatcaggagatgagaaacttgctgaaatcaacagtatagctttagaccaaattagattagagcccaaagttttaagaaatgttgaaaaaagatcgcttaaaaaaaatgtattaggatacgaatttaattttccttttggttttgctcctatgggaatgactaatttgtcttggccaggagcagactctatgttagccgctgaaagtgcgagaaataatattccaacttgtgtttctatggcatcaaccacaacattagaagagatgtatgaactctcagagggtcattcgtggatgcagctatatattttccaagatgaaaatttcgtgatggagcttttggaaagagcaaaaaatactggttatgaggtagcaattttaactgtagatgtgcctgttttatctagaagaactagagatgataaaaatggtttctcttatccttttaagataggtccaaaacaattttttgattttgcgactcacccgatttggtctctatcaactttgatgagaggaattcctaaacctatgaattatgtaacctcaaaaagtggagatggaatctttaaaagaaaagaaagtagaggttctactgattggaacgcgcttaaaagagtaagggataaatggaaaggcaaacttattgttaaaggagtaatgtctccagatgacgcaataaaaataaaagaagctggtgcggatgctattcaagtttcaaatcatggaggtagacaattagacagtgccacagcagcaataaatatgcttccattgattagaaaatcagttggaagtaattttcctttaatctttgatagtggaataagaagtggaagcgatatagtaagagcgctagcatttggtgcagattatgcaatgattggaagacccgttatgtatgcaatgggagctgatggaaaaaaaggattaagaagaatagttgagattataaaagaagaagttagcacaacactagggttagttggattaaatgat

SEQ ID NO: 199629 - DNA, 790 bp, Unknown
  Bacterial polypeptide expressing nucleotide sequence isolated from the Sargasso Sea
cactctaggacggttaatgatacgattgactttcaaaaattaaaaattgaacgagactgggtttcaaataaaaatattttcacagttacaggcgagattttagatacaactgatctggatacgctctacagaaacatttatgatccatcgctatttactgcaacaatttttaaagagttattagaagataatggtacaaaagtaagatacctatctaaaaagcctcaagacttaagcaaatacaatactctagcaacacacctatcggactcattactaatatcagcaataaatctaatgaatgagagcgataacctaaccgctgagctttttgtgaaattgatgggtgctatggatacaatacctgggacatggaacaacgggattgacagcattaaatcttttttatccagggaagtagaaattgacacttcacagatcaaacttgctgatggatcaggtgtatctagatataccctcacaagctctgatcaacttatatcgcttttaacctgggtatacaaaagccaatataaaaatgattttatatcaaccctacctggaggaggttggccaaaaagcactttagaaaaaaggctggttaaagagggtgataaggttcgtgcaaaaaccggcggactttctggagtacgaaatttagctggatatattgaatcttctagatatggacccgttgcattctcaatactaatgaacggatacatcggatcttcctctaaatatagacatgttcaaaatcaaattgtaaaatcattgatctatgattaaa

SEQ ID NO: 199630 - DNA, 463 bp, Unknown
  Bacterial polypeptide expressing nucleotide sequence isolated from the Sargasso Sea
ttgaaaaaaaaacacaatatcaacagacgggatttcatcaatggctttgcactgagtcttgctgctggcggaagcctctcacccgttgagatactcgctaatgataaaagacgctatccccctgcactcatggggatgcgcggcagcaatccaggatcctttgaagcggcacacgcgcttgcttggggcggtgcaaaatttgataagcctaaaatacaaacagatcatgattatgatctcgttgtagtggggggagggatatcaggtctttctgcagcttatttttttaggcagcgatacggtaatgacgcaaaaattctgatactggataatcacgatgattttggtgggcacgccaggcgaaacgaatttaatggtcatggcgagggagctatctgctacggtgggagccaatcattgatacgcccagtgcatattcatccgtctcagcaaaattgttaaa

SEQ ID NO: 199631 - DNA, 742 bp, Unknown
  Bacterial polypeptide expressing nucleotide sequence isolated from the Sargasso Sea
tttgatacaagataaagttgtagtaattacaggagcatctagcggaattggatattccactgctaaagaacttgcaaaaaaaggtgcaaagatagttgcaggagcacgtagattagatagattagaaacactacaaaaagaaatcactgatgatggcggagaaatcgtcatttgtgaaactgatgttaccaaaaaaactgattgtgataatttggtaaaacaagctcttgataaatttggaacagtagatgttttggtaaataacgctggattaatgcctcttagttttgtgaaatcactaaaaatagacgaatgggatcgaatgatagatgtaaacatcaaaggtgttctatattgtactgcagcagtaatccctacaatgactgagaaaaaatcaggtcatataatcaacatttcatctgttgcaggaagaattgtttttccagcaggaagtgtttactgtgcaaccaaacacgctgtaactgcattttctgaaggtttgagacaagaacttagtgtaagaaaaaatattcgagttacaagcatagaacctggtgttgtacagactgaattaacaaatacaatcactgaagattctctacaaggattcattgaaaaaggtaaacaaatggaagcattacaagcagatgacatatcaaacgcaataatttttgcaattgatgcaccaaatcatatgaacgtaaatgaaattctaattagaccaactacacaagatcactaa

SEQ ID NO: 199632 - DNA, 1717 bp, Unknown
  Bacterial polypeptide expressing nucleotide sequence isolated from the Sargasso Sea
gtacatatagatgttcttgacactgttgctcgggatacaaaattgggtaaagaagagattacaagggatattccaaatgtaagtgaagacgccctcaaaaatcttgatgatagtggaattatcgctgttggtacaagcgtcaagtcaaatgatatcttggtaggtaaagtaaccccaaaaggagaatctcaactaaatcctgaagaaaagttgcttcgtgcaatttttggtgagaaagccggggacgtaagagatacctcattgcgagttcctcaaggtgttgatggagtggttacagatgttgttgtatttaatcgtgaaggagttgaacgtgatgaacgtaccagacagatagagcaggaactgctggcacgctatgaaaaagatcactatgatgagatgcgcattgtgcatagtaatcttgtgaatcgtattatttctgttgctgacaaaaagccacttgttgcagatgttctttcccttcagggcgaattgcttgcttcgaaaggcacaaaaataagtcaggaaatacttcagggaatacctttgaaatcaactgacggaattcagattaaagataaaaatatcaacttaaaaattggaacttttgtacgtaatgctctccagcaaatgtacttactggaaaatgtttatcaagatcgttgcgaaaaagtttccaagggtgatgacctgcctccaggagtaatccgcatgattaaagtctatattgcaattaagcgaaaactttccgttggagacaaaatggcaggaaggcatggcaataaaggagttgtttctactgttcagccaattgaaaatatgccttatatggaggatgggaatcctgttgatatagtacttaatccacttggtgtcccttcgcgcatgaatgtcggacaagtacttgagactcatcttggtcgagttgctaagggcttaggaaaaaaagttcaggagttccttgaccagaataatcctgctgctgaccaaatcaggagttttctgaaaaaagtatatgattgtccaatcgctcaaaaacattttgaatctatggatgataaaacctttttggagtttgtaaaaaaatacaagcccggcattcatatgtctacaccagtatttgatggagcgaaagagtcggatattcaaaaaatggcagaaatggcagatttatcaaaatcaggtcaggtctggctttatgatggcataactggagagcgcttcagtcagaaagtgactgtgggttatgcttacataatgaagttacatcacctcgtagatgaaaaaattcatgccaggtcaatcggtccatattctctagttacacaacaacctctgggaggtaaagctcaatttggaggtcaacgttttggagagatggaagtatgggcacttgaagcctacggagctgcttacacacttcaagaattacttacagttaaatctgatgacgtgcatgggcgtaataaaatttacgaatctattgttaaaggaaggcatcaacttaatacgggtttgcctgaatcattcaaggttcttattaatgaactgaaaagtttgtgtctaaacattgaactccttcaaaaagctgatgaagatgaattgggggaaagccttgaagaggattcaggcagtaattcaatcgctgcacctgatactgaaatcgaatctgagaaaaaaccggaagaggttgttgatcttacagtaacaccataga

SEQ ID NO: 199633 - DNA, 1078 bp, Unknown
  Bacterial polypeptide expressing nucleotide sequence isolated from the Sargasso Sea
tatgaaagtaaagtacacggatgatacacctagaaagattaaagattttaatgatgaagaattagagcttaatcctgaacaagtagaggatatagcagagatctttaaaactcccttaacaggaacctacaattgggactatacggctcaagataataggatttctaaattatatgaactaggaaagaagcttaactggaatacttctatagatatagattgggatagacccctagtggtttcagacgagatccctcctatgttttgggatgagtatcctccttataaacaattagatgatgatgggaagagagaatttttaaggcacagaggagctagccaatttagtcaattcttacatggtgaacaaggggctttattagtcgcttcccagttggtttcatgtgcacctacttatcaagcaaaactctatgccgcctcacaagcatttgatgaagctagacatgttgaagcctttaataggtatatccaagaaagatctaaattgatgtatccagtaggggctggtttaaaaagtctccttgataagatattaactgataaaagatgggatcttaaattaattgggatgcaaatcatcatagaaggtttagctttagcagcattcaatactgcaaaagcagttacaccagatccagttttaagagacttattgcatttcataattagagatgaagctaggcatgttacttttggagtaaattatttagaagagtttatagaaaatttatctgatcatgagaaagaagatagagcaatgtttgcttatgaggcttgtgttataagtaaagagagattatttccaactgatgtctttagaaaatttggttggaatgaagatgaagcaagagaattttcgaacaatgcaggtttcgctctagaatttcaaagattactctttgcaagagtcatgcctaacttatctagaataggattattaactgataaagttagacctttgtatgataagcttggtgttctagaatttgaatctcattctaatgatggagatatttcttgggctgagttagagaaacctctagatttatctgcataa

SEQ ID NO: 199634 - DNA, 766 bp, Unknown
  Bacterial polypeptide expressing nucleotide sequence isolated from the Sargasso Sea
tatgcaaatcgatttcactaacaaacgtattcttgtgaccggcggtacacgaggaatcggtcgcgcaatcgtggaggcttttcttgaagctggggcgcgcgtcgccgttaatggaagtacggatgaaactaccgatagggcgatttctgagctaaaggcgggagacctggctgtggctgcgcccgggtcggtaggctctgttgcggcttgcgaatctatagttactgctgctgttcaaggtcttggtggtcttgatgttctcgttaacaacgcaggtgtaggcggaggaggtccggtagaggagaccaaagaggagttgtttgatcgagtcatggacatcaatttgaagggcgtctattttatgaccaaatatgctgcaccgcatctaagagagtcagggggcaatattatcaatgtcgcttctgttatgggaattgttggagcaccatatgggtcgatctacggagcttctaaggccgcggtcatgagtcttacccggtcgcatgccttggaatttggttctgctattcgtgtcaactcggtggttcctggcggcgtcgacactgatatgcttcggggccttgcgaagaaaatcgcgaaagatgttgagtcgggctacgagatcctatcaaaggataccgcagctcagcacaggatcgccgatgctagtgaaattgccgggcctgtgctttatcttgcgtcggatttagctagctttgttacgggctccacgcatgttgttgatggaggagaggttgtcgactaa

SEQ ID NO: 199635 - DNA, 394 bp, Unknown
  Bacterial polypeptide expressing nucleotide sequence isolated from the Sargasso Sea
atgcaaaaaacaatgcaatcaaaatgtgcagtatttagaaatgaaaaaactttaaaagaaggtgttgatgaaattagaaaaccatttgaagcaatggagtcactttcagttaaagataaatctttaatatttaatactgatttagttgaaactcttgaatttgataatttaataagacaggcaataactacaatggattctgcttatcacagaaaggaaagcagaggtgctcatgcaagagaagattatcctagtagagatgatgataaatttatgcaacatactttatcatggtgtgaaggaattaaaacaaaaatagattatagaccagttcatagatcaaccttaacgaatgatgttcaatattttccaccccaagagagaatttattaat

SEQ ID NO: 199636 - DNA, 388 bp, Unknown
  Bacterial polypeptide expressing nucleotide sequence isolated from the Sargasso Sea
ggtgttggtctcccagatggttgtgaaagtggctattatgttaaaccaaccatattttctgatgtaacaaatgatatgacaattgcaagagaagagatctttggtccagttttatgtttaattaaatatgaaacagaagaggaagctattgagatagcaaatgatacaccttatggtcttgccggatatgttcaaggtgagcaatctcatgcagttgaagttgcttcaaaaattagagctggccaggtcactattaataaaggagctagagttaggtctgcaccttttggtggttacggctcctctggcaatggaagagagcatggcacgcatggtcttgaagagtgtttagagaccaaagctgtaataggtgctttagtcgaataaa

SEQ ID NO: 199637 - DNA, 769 bp, Unknown
  Bacterial polypeptide expressing nucleotide sequence isolated from the Sargasso Sea
aatgtatttaaaaaaatataatcttaaaggcaaatatgctttagtgactggagcaggtaaaggcttaggaaaagcatgtgctatagctttagctgaagctggtgctaatttgatcatagttagtagaacaaagaaagatttagatacggtatcaaaaacaattaaaaaattaagagttaagtgtaaatcttatgtatgtgatatcaccaattatgaagatttaaaaaatattattaataaacaatctagaatagatgtgctcgttaataatgctggaaataatatccctgaacattttacaaaagtaaaaaccaaaaatatggaatatcttgttaaaattaattcaattgctgcttttaatacagcacaattatgtgcattaaaaatgattaaattaaaaaatagaaagaaaattggaggttctattatcaatatgtcttcgcaaatgggacatgtcgggggtccaatcagaagtgtttacaatatgaacaaatggggtttggaaggattgactagaggaatggctttagatcttgcaaaatttaatattagagtaaacacggttgctccaacatttgttgtgactccaatgacaaaaaaattccttaaaaataagaaatttaaaaaagaaacacttaataatattccgctaggcagatttgcggaaatgtcagaaatagcatctacagttgttttcttagcatctgatgcagcttcaatgatacatggaacctctttattagtagatggtggatggacagcaaagtaa

SEQ ID NO: 199638 - DNA, 151 bp, Unknown
  Bacterial polypeptide expressing nucleotide sequence isolated from the Sargasso Sea
atgaattatacagatcataaattagatgtagttgtattaggtgctggtggagcgggcttaagagcagctttggggtgctctgaacaaggtctaaaaactgcatgtgtctcaaaagtttaccctacaagaagtcatactgttgcggcccaag

SEQ ID NO: 199639 - DNA, 592 bp, Unknown
  Bacterial polypeptide expressing nucleotide sequence isolated from the Sargasso Sea
gtcgaaaaaagcagaggctttaaaagttggacctggaatggacaaaaattctgagatgggtccattggtgactaaagagcacttagaaaaagtaaaaggttatgttgatttaggagttaaagagggtgcaaaattattagttgatggaagaaacttaaaattacaagggtacgaaaatggattttatattggtggttgtttatttgatcatgtaaagaaagaaatgagaatttataaagaggaaatatttggacctgttttatctgtagttagagttaaaacttttgaggaagctgcaaaattaataaatgatcatgaatatggaaacggagttagtatttatactagagatggtgacgctggtagaacatttgcaagcaaaattcaagttgggatggttggaataaatgttccaatacctgttcctatggctttccatagctttggaggctggaaaagatctttattcggggatagtgctatgcatggtatggagggtataaaattttatactaaattaaaaactataacttcgagatggccatccgggattcgctctaatgccgaatttgttatgccaacaatgaaataa

SEQ ID NO: 199640 - DNA, 1150 bp, Unknown
  Bacterial polypeptide expressing nucleotide sequence isolated from the Sargasso Sea
aatgactgaagtaataccaacaaaacaaatgcctccaggtctacaagttgacaaagtagacgaccgaataatgactctcaatgttggtccacagcatcctggttctggacatatgagaataattgtaaaaattgatggtgattacattgttgatgcagatcctgatcctggttacgttcatcgtggcgaagaaaaaatggctgaagcaagaaattacatcacaaacatacctcatttagaaagaccagtaattcacgattcttgtaatattttgtatccatacgtcttaggagttgaagacttggtaggaattgaagttccagaacgagcaaaatatgttcgcgttattgcagcagaactaaacagatgtatctatattcaatactggcttgcaatctatggaatatttcttggacactctacaatgttcatgtggcctgcaggagacagagaactcttaattgatttaatggaaaaaattacaggtgcaagagttacacacgcatactttattccaggcggtgtcagaaacgatgtacctgcaaactttgaagatgtatgtcttcgtcaagtaaactactttgaaaaacgtatcaaagaatatgctgatatcttttatgataatccaattctaaaagcaagaacagaagatactggcgtattgtctagagaagatgcaattcgtttaggaacgactggttctgttttacgtgcaagtggtgttgattatgatgttagagtcaaagaaccatacgatgtctatgatgagcttgatgttcacaccaatgtactaaaagcaggtgattcatatgcacgctcaaaagttccatggcttgacatgttggagagctgtaacattattagacaagcattagaaaaaatgccaaagtctggttcaattagaacaaaactcaaaccaaatccaaaaggtggtttaggcgaagtttatcgtagagttgaaagtggaagaggtgcagcaggttgttatatcatttcaaaagaaaaacctgaaccttatcgtctaaaacttagtgttggttcttttagaaacttaatcgcattaccatacttgttaaagggtgaaaaacttggaaacatgccagcagtttactggagtctaaactattggcctgtggaggctgaccgataa

SEQ ID NO: 199641 - DNA, 748 bp, Unknown
  Bacterial polypeptide expressing nucleotide sequence isolated from the Sargasso Sea
attgaaagataagaaatgtatagttacaggtggctcaagcggtattggtgaagcaactgttagaagatttattaacgagggagcagaagttctaattgcagatatcaatcttgaagattcaaaaaaattatctgaagaaattggtgaaggcgtcgattatatcaaatgtgatataaggctcgaggatgatattatttctgtttcagaaaaagcttatggcatgtgggaccaggttgatgtattggttaacaatgctggatctgaactcaatcagtcctatgataaaatgacagaggcagaatgggataatgttcttaacacagatctaaaaggcccttggttaatgtgtaaacatatcgtaccaaatatggttgaggcaggatcaggaagtgttatcaatatttcatctttaaatggtctagttggttttcctctttcaactgcttacggaagtgctaaaggtggattggtagtatttactcgcgatatggcgatcgagttagcttcaactggtgtgagaattaactgtgtttgtcctggagtcattcaaacaggtatgatggaaagatggacagatcttatgcctgataaagctgaggcacaggaaatgttaaggaacacaatgccgattggaagaatgggaacagcagaagaagtggcaggtgcaatcttcttttttgcctctgatgactctagtttgtgccaaggatctgttttgagtgttgatggtggatttactgcacagtaa

SEQ ID NO: 199642 - DNA, 401 bp, Unknown
  Bacterial polypeptide expressing nucleotide sequence isolated from the Sargasso Sea
aatgaagaagaagctttcaataacaagaagggatttcataaacggtgtcagctatggtttagcagcatcagttgcaccgattgattttttgaaagcaaagaatattgatccttttaagtatccacctgcgttaacaggaatcagaggcaatcaccctggttcttttgatcatgctcataggcttgcattggccggaggaaattttcttgaagagatcatagatcttggggagagcaatgatttaattgttgtaggaggaggaatatcgggtttgtcagcagcatatttttatcaagagcgcaccgctttaaatcaaaacatacttatactcgacaatcatgatgactttggcgggcatgcaaagcgcaatgaatttcaagtcgatggaagagaaatcttaa

SEQ ID NO: 199643 - DNA, 269 bp, Unknown
  Bacterial polypeptide expressing nucleotide sequence isolated from the Sargasso Sea
attgattaaaacagacgtacttattatagggagtggagctgcaggaatgacagctgctattgagttatctaatcaatttaatgtcaccctcataacaaaaaattctctggtagatagttctacatggtatgcccaaggcggtattgctgctgttatagattcgaatgattcaatcgaagagcatttgagggatacactaatagctggcgatggcttgtgcgatgaaaatgcagtaaggcaatgtgtgagtcatggcaaagaagcaattg

SEQ ID NO: 199644 - DNA, 811 bp, Unknown
  Bacterial polypeptide expressing nucleotide sequence isolated from the Sargasso Sea
gaccggcaggaaaggcaccctcggcaccctcagcaccataggagcccacgcacagtgaacaccttcgatctgaccggcaaggtcgctatcgtcaccggcagcaatgcgggcctcggtgccggcatggccgtcgcgcttgccacggccggctgcgatatcgtcggcgtgagccgcgcggacgccggcgctacgcccacccatgtcaaggcggccggccgccgcttcgcggatgtgcgcgccgacctcgcgtcgatcgccccggtcgaggacatcgtgcgcgccgctgtcgaagcatttggccgcgtcgacgtgctcgtgaacaacgcgggcctcatccgccgcgaagacgcactcgacttcagcgaggccgactgggacgccgtcatggacgtcaacctgaagagcgtgttctttctttcgcaggccgtggcgcggcagttcgtgcaacagcaaagccgcggcaagatcatcaacgtcgcgtcgatgctgtcgttccagggtggcatacgcgtggcgtcctacacggcgtcgaaaagcggcgtgctcggtctcacgcggttgctcgcgaatgaatgggccgcgcacggcatcaacgtgaacgcgatcgctccaggctatatggcgaccgcgaacacagcagcgctgcgcggcgacgcgcagcgtaacgaagaaattctcagccgcgtgccggcaggccgctggggtacgccggaagatctcgcgggaccggttgtattcctcgcttcgtcggcatcggactatgtgcatgggcatacgcttgccgtagacggcggctggcttgcgcgctagc

SEQ ID NO: 199645 - DNA, 1162 bp, Unknown
  Bacterial polypeptide expressing nucleotide sequence isolated from the Sargasso Sea
aatggataacattaaagccagtaaaaaaatttttagcattgaagatgcaaaaaaactatcaaagaaaagattaccaaagatagtttacgattttattgacggtgcatcaggagatgaaaaattatcagaaattaatagttttgctttagaccaaatacgtcttgaaccaagagttctaagaaatgtagaggaaagaaaattaaaaaaaagtattcttggatttaactatgactatccatttggttttgccccaatgggtatgacaaatctttcatggccgggcgcagactcaatgctggcaaaagagagtgcaagaaataatatacctacttgtgtatcgatggcttccacaactaccttagaaaaaatgtatgaactttcagagggtcattcgtggcttcaactttatatttttcaggatgaagcttttgtcatggaattgctcgatagagcagaaaaaactggttatgaagttgctatacttactgttgatgttccggttttatctaggagaactagagatgataaaaatggattttcatatccatttaaaattggacctaaacaattttttgattttgcaactcatccagtttggtcaatatctacattacttaatggaataccaaagccaatgaactacgaaacttcaaaaagtggaaaaggtatttttaaaagaaaagaaagtagaggaaaaacagattgggaaactttaaaaagagtaagaaataaatggaaaggcaaattaattgtaaaaggtgtcatgtcatctgatgatgcagttaaaattaaagaaatgggcgctgatgctattcaagtttcaaatcatggaggtagacaattagatagtgcctcagcagcaataaatattctaccttttattagagaggcagtaggaaataattttccaattatttttgatagtggaataagaagtggaagcgatattgtaagatcattagctttaggagcagatttttcaatgattggaagacctgtaatgtatgcgatgggtgctgacggagccagtgggctaagaagaattgtagacataattaaagaagaaactagcacaacactaggtttggttggattaaatgatattaatgaagtttcttctgatataattgaacagaaactttttatgaatacaacttactga

SEQ ID NO: 199646 - DNA, 1398 bp, Unknown
  Bacterial polypeptide expressing nucleotide sequence isolated from the Sargasso Sea
tactctcatccaagtcctatgggtgaaaaatgggcaagttggtggctagatttagctaggtatgcagacactaaaggatatgagtcagacctaggtcgtttaatatggaaatatcgtgattgggtaattaatgccttaaatgatgatatgccatttgatgaatttacaattaatcagctcgctggagatcttctagaaaatccaacggttgataattatgttgccaccggttttcacagaaatacaatgtcaaatgatgaagggggaaccccgaatgaagaatatagaattgcatccgttatcgacagagtaaatactacatttgatgtatggcaaggaacgactattagttgtgttcaatgtcatgctcatccttatgatcctatacgtcataaagaatattatgaaataatgtctttttttaataacacccaggatgctgaccaccctaccgaggaacccaaatatagattttatgaggagaaagatcaacagaaaataaatgaagtttttaattggatagatcaatatggtgatgaaatattaaaaaataaatatgaagactttctttttcttttgaagcctaaagttcttgcaaatgaaaggtatgtggaacctatttcaaattcaggtaatgtaaatacaggtcatgaattgtatttttacaatcgcggaactgctttaataaaaaatgtcaatacagagagaaataaaagaatggttgctctttttagttttggtattaagggtacaaaagttattctaagaaatggatcaagtactggagaaattttggctgaattcaaaaatccatatgaaagtggttggatttcagatccagatcctaccgatttaatccctggaaaacctggatttataatagattttccactaaaagaaattgatgattcaattgatttacatattgaggtagagaatgataatttatcagataaagatctaaaaattaatgatggaagactgatacaccttcattggttagctttcatgccagatcttcctggaaaaaataaaaaaggatattcaaaaattaaaaattatgtttccgaattactatttacccatgtcgatacctcaccaataatgcttgaaaataaaaatcataattctagatctacctatttatttgaaagaggaagctggcttagcccaacagaaaaagtttcgtctaatgtacctaagagctttagtgactggaagccaaactgggagcgcaacagattaggactagcacagtggttaattgacaaggaaaattccctaacatcaagaacattagttaatcgaatatggcatcaaatttttggtactggaattgtttcaactatcgaaaatatgggtactcaatccgagccaccaactcatcctaaactttgg

SEQ ID NO: 199647 - DNA, 358 bp, Unknown
  Bacterial polypeptide expressing nucleotide sequence isolated from the Sargasso Sea
atgaaagatattttagatttacaaaaacaaaactttattgagaatggacatccatctctagaacaaagattagatagattaaaaagatgcgttgctcttatagaaacgcatgatgatcaaataatcgaaagcttaaatgctgattataagatgagatcgaagtacgaaataattacatcagaaatatctcaaactcttagaacactaaatttttctattaagaatacaaaaaaatggatgaaggcgataaaaagaccatcggaatacggagctggatttctcggagcaaagtcatatatgattccttctccgctaggaagtgtaggagttattgcaccttggaattttcctgttggga

SEQ ID NO: 199648 - DNA, 601 bp, Unknown
  Bacterial polypeptide expressing nucleotide sequence isolated from the Sargasso Sea
acaggccaaagttgtatttcagctaaacgaataatagttacaaaatcattatatcatgatttattaaaaaaacttaagatacagttatctaaaatgataatgggtgatccgatggataatgttgatattggccctatggtgacattaagtgctagagatgaagttcatgatcaggtcatacgttctatagattctggtgcaatacctgaacttggtggtgaaataccagatttaaaaggatctttttatccggtaactttattatctaatgtgaaaccaggtatgccagcatttgatgaagagatatttgggccagttttttcattaatcatggcaaatgacgaagctcatgcaattacattagctaatcaaacaccgtttggattgggagcagctttgttcaccaaagatataaagaaaggtgaagagattggcagagctcaaataaatgctggattgtgctttgtgaatgattttgtaaaatcagaccctagattaccatttggtggggttaaggaatctggatatgggagggaattgtcaagttatggtttgatggaatttgtaaatataaaaactgttgttgttaacaatgaataat

SEQ ID NO: 199649 - DNA, 1483 bp, Unknown
  Bacterial polypeptide expressing nucleotide sequence isolated from the Sargasso Sea
atgtctgaattaaaaaaatataaaatgtttattgatggagaatgggtagactctgagagtaaaaaaacatttaaatcattaaacccagaaaataatgagccctgggtagaagttccagaagctagcgaaaaagatattgatatagctgtaaatgctgcacaaaaagcttttgaggggtcttggcctaatttgtttccaagagaaagagcaaaatatttaaaagctattgctaatgaattaagagaaaatgcagagttgctaggtaaaatagaaacaactgatacaggaaaactatttaaagaaacaaaaacacaagcaaattatatagctgaatattatgattactatgcaggtcttgcagataaagttgagggaacggtgctgccaattgataaagccaacatgcaagtaattacaactagagttccaatcggagtagttgcagcaattattccttggaattcacagatgcttttgacagcagttaaattagcacctgcgcttgcaatgggtaatactgttgttattaaatcttctgaactagcaccagcaacattatttgagtttggaaaattgattgaaaaaactggaatacctaaaggggtagtgaacatagtttcaggttttggtgagccttgtggtagagctttaacttcacacaaattaatagaaagagtcgcttttaccggtggaccagagactgcgaggaatataataaaaaactcagctgaaaatttatcacaggttagtcttgagttgggtggcaagagtcctgttgctgtttttgaagatgctgaccaagaaaatgcattaaatggaattactgcaggtattttcggagcaagtggacagagttgtatagctggatcaagactttatatacaaaatagtatttatgaaaattttttagaaaaaattgttaatagagcaaataaaattaaattaggatctccaatggatagtgaaattcaaatgggtcctttgagtagcctcaagcaattagaaataattgaaaaaaatattaaacttacattagatcaaggtggaaaactaagatgtggaggtaaaagacatgcgatgttgaataatggttattattttccacctacaataattgagtgtgataatcacaatctaccaactgcagaaaatgaattatttggacctatactttctgttatgagatttgatgatgaaaaagaagttataaataaaatgaatgataatcagtatggattatcatctggagtttacacaaaggatataaatagaggtctaagagtttcaaatgcaataagagcaggaattacttttgtaaatacttatcgattaatttcgccatccgctccttttggaggtatgaaggacagtggatatggaaaggaagccggtattgaatctataaaagattatactagaattaaaacaatatggttcaatacttctgacaaacctatggatgacccttttacaatcggctaat

SEQ ID NO: 199650 - DNA, 460 bp, Unknown
  Bacterial polypeptide expressing nucleotide sequence isolated from the Sargasso Sea
taatgaggatttctcacaacaacctcaccataaaatacctccaactttggttctaaaccctacagaggatatgaaaattatgcaggaagaaatttttggacctgtattaccagtaaaaccttatgaagatttaagtgaaactgttgagtatgttaatagcaaagagagacctttaggtctttattacttcggaaaagataagaaagatcaacagtatgttttatcaaataccacctccggaggtgttaccgtaaatgatgtaatctctcatataacacaagaagatctgccatttggaggagtaggaccaagcggaatgggttcttatcatggacatgatggttttaaagagtttagtcatgctaaggcaatttataaccaagcaaaaccgaatttaaataaattagcaggattagtaccaccttacaaaaaggaaaaagataaagcttctgcttcttaa

SEQ ID NO: 199651 - DNA, 943 bp, Unknown
  Bacterial polypeptide expressing nucleotide sequence isolated from the Sargasso Sea
ttgtatgagggtcgccagcgaaagcatcatcccttcgaatccgcagcgaggcatcgtcttttcagactacgaggcagcgccgcatttctcctaccatcgggcccacatggacagacggagacagcggcaatgacagggttcgatttcagcggcaaggtggtgctggtgacgggcggcaccaagggaataggcgcggccatcgcgcaggcttttcaagcggcaggggcaaccgtttacatatgcggacgcacaccacccgcaagcaccgcggcgggcatgtctgagaacaccccacgcttcatcgccgcagacgtacgcgagatcgatgccatcgacgcgatgctcgcgcggatcgaacgcgaaacgggccggctcgacgtgctcgtgaacaacgcgggcggcgcgccgttcgcgctcgctgcgcaggcctcgccgcgctttaccgaagccgtcatccgcctgaacctgctggcgccgctgcatctcgcgcaacgagcgaatgcgctgatgcagcaacaagcggaaggcggcgtcctgctgttcatcggcagcgtgagcggtttgcggccctctcccgggacagcagcctatggtgcggcgaaagcgggtttgctgaatgcagtgcgctcgctcgcagtggagtgggcgcccaaggttcgcgtgtgcgcggtcagcccgagtctcgtcgaaacagaagccgccacgagcggccacacgggttcctccgcggcggatgccgcgtccgctctcgccagcatcgccgcgacgattcccgccggccgtctcgcgaaacccggcgatgttgcatccgcgtgcctgttcctcgcctcgccgcacgccgcctatgcctcgggcagcaacctgattctcgaaggcggcggcgaagtgcccgcctttctcgccgccaccgatctgcacaaggcgttcgccacccactcataga

SEQ ID NO: 199652 - DNA, 1429 bp, Unknown
  Bacterial polypeptide expressing nucleotide sequence isolated from the Sargasso Sea
aatgcttaaatttgttaaattaggtcaacaaaacccacctaaaagagaaattattgagcgtaaggacgactttaatgaaatctataaagaattcataaatgaaaaggcaaaagaacagtctagtaggtgttcacaatgtggagttcctttttgccaagttcattgtcctttaagtaacaatattccagattggttaaaacttacagctgaaggaaggcttaaggaggcttatgaactttcacaaagtaccaataacatgcctgaggtttgtggaagaatttgtccccaagatagattatgcgagggcaattgtgtaattgaacaatcaggacacggaacggtaacaataggatccgtagaaaagtttattactgaaaatgcatgggaaaataaatggatagaacccataaaggtaaaatcagaaaaaaaacaatcaataggtataataggtgcaggaccggcaggactagcttgcgctgagcaattgagaaaagaaggttatcaagtgacaatttatgacagatatgatcgtccaggaggtctccttatatatggtattccaaattttaaactagaaaaatttgtagttgaaagaagaacaaatcttttaaaaaaaggtggcataaaatttattcaaaattttgaagtaggaaaagatgcaacattaggcgaactaaaagaaaaacatgatgcaatacttatcgcaaccggagtttataaacctcgtgaaatagaaattcctggaagtgatttaaaaaatatttttcctgcaatggattttttaacagcatcaaataaaaaaggattaggcgacaaagttgagatgtttgataatggcacacttaatgctcaaggcaaggatataattgttataggaggcggagataccgcaatggactgtgtaagaacatccataaggcaaaatgcaaaatctgtaaaatgtttatataggagagatagagagaatatgccaggttcagcaagagaagtgttcaatgcagaagaagaaggtgttgagtttgtgtggttatctagcccaaagaagtttgaaggtattgataaagttgaaaatatcttaattgataaaattaaattaggtgaacctgatgaaagtgggagaagtaagccagttgttgaaaataattcagaatttagtttaaaagcagatatcgtaattaaagctcttggatttgatccagaaaaccttccatatttatttaacgaaactaatcttcaaattactagatggggaacaattaaaactgattttgatacaatggaaactaatttacaaggtgtttttgctgcaggagatattgtaagaggagcttcattagttgtttgggcgattaaagatggaagagatgctgccatgtcaatcagcaagtatttaaaaaaaagttatgaaaaaaagaaacaagtcgcatga

SEQ ID NO: 199653 - DNA, 3469 bp, Unknown
  Bacterial polypeptide expressing nucleotide sequence isolated from the Sargasso Sea
atgaactgggcttttaccgcaatcggcttcatcgtgggcgggattgccgcattgatcggggatttctccggcatcaccggcgcagtgctcggtgccgcgatcggattctgcctcgacaacacgctgcaacagcgcaagcgcaagaacaacggcacggcccccggcgcgttcgcgatgcaggcaccgcccgcccagccgccggttcccttggccgagcgcgtcgcgcgcctcgaggcgaccgtcgagacgctgacgcgtgaagtcgcgtcgttgcgcggccagttggccggcgcgaaggccggctcggccgcgactggcgcgaccgtgtacacgccgaccggggccgcctccgcctccgcctccgcctccgcctccgcctccgcctccgcctccgcctccgcctctgcctctgcctcggcatccccatccgcatccttgccgccttcggtcgccctgccgccgcgcatgcctgcccagccggccgccgcacgcccggacgcatcggtatccgcatcggcacccgttccctcccccgttcgcgccgccacgccggcaccgacaccggccgccgcgatccgcgcgagcgaaacgcctgccgccgcggcgcccgcaccgtcggctccccccgcgccgcccaaaccgcgcgaacccgacctcgtcgagcgcgcattccgcgccgcgcgcgactggctgctcggcggcaacacggtcgtgcgcgtcgggatcatcgtgctgttcttcggcgtcgcgttcctgctcaagtacgcggccgacaacaacatgctgccgatcgaattccgcctcgccggcaccgcgctggccgcggccgcgctgctcgcgatcggctggcgcgtgcgcgcacgccgtgcggcgtacgggctcgtgctgcagggcggcggcgtcggcatcctgtacctgacgatcttcgccgcgaccaagctttacgcactgctgcccgtcggcgccgcgttcccgctgatggtggccgtgtgcgcgctgagcgcgttcctcgcggtgcggcagaacgcactgccgctcgcgttcatgggcaccgcgggcggctttctcgcgccggtgctgctgtcgaccggccacggcaatcatgtcgcgctgttcagctactacgcgctgctgaacgcgggcatcttcgcgatcgcctggttcaaggcctggcgtccgctgaacctgctcggcttcgtgttcacgttcacgatcggctcggcatggggcgtgacggcctaccgccccgcgctgttcgcgagcaccgagccgttcctcatcctgttcttcctgatgtacgtcggcatcgcgctgctgtatgcggtgaaacgcgaactcgcgctgcggcactacgtggacggcacgctcgtgttcggcacgccgatcgtcgcgaccgcgctgcaggcatcgctcgtgaaggacatgccgttcgggctcgcgtggagcgccgtcgcgctgtcggcgttctacgtcgtggtcaccgcgtggctcgcgcggcgccgcgaccgcctcgcgctgctgttcgaatccacgctcgcgctcgcggtgatcttcgcgacgctggccgtgccgctcgcgttctccggcccgacgaccagcgccgcgtgggcgatcgaaggcgcggccgtcgtgtggctcggcgtgcgcgagaaacgcatgctgcggttcggcttcgggctgctgatgcaggttgccgcggccggcgcattcttcacgagcctgctcgggccggccgacgccgccgcactgccggtgctcaacagcccatacatcgcgatgctgctgatcgcgctcgccggcctgttcaccggctggtggctgcacgggcgcggcgaagcgcgcgcgtggcatgcgtggatgcccgagatcggcgccgcggccgccgcttgggggctgctgtggtgggtgagcggcggcctgcacgagatcctcgtctacgcgagccgtcacgtcgacctgcatgccgaccgcttcgtcgtcgatacgactgcgctgttcgcggccggcaccgcgtggctcgcgcatgccgcgcgccgccggctggcgtggccgctcgccgaatggcccgcgctcgcgctgacgccggtgctggcgctgctcgcgctgcgtgcgttcgatgcacacgaggctccgctgtcggggatgggcgcgttcgcgtggcccgtcgcggtcggcgcaggacttgcgctgctgtggcgccagtcgcgcggcacggcaggcgccggttccgcgtcaggctcggcacgcggcggcgcgccatccctctccgcaggcatcgtcgcgccgctgcatacgctgatgttctggaccgtgtgcgggctgctgtcgctcgaaggcttctggcgcctgcgtgcgtacgtgcccgaaggcgcgtggagctggagcgcatgggcctacggtttcggtgcgctgctcctgctggtgtcgggcccaggctcgcggctgcgctggccggttgcggcgtttccgcgcgcgtaccaggtatggggcgcggcgccgctcgccgcgctgctgtggctgtggagcatcgccagcgtgatcagcgacggcaacgccgcgccgcttttctggctcccgctgctcaacccgctcgacgtcgcgcagtgcctcgtgttcgtcgcgttcgccgtgtggctgcgccgcctgaaaacgctcggcatcgcgtggcatccgcgcgtcgtcgactacgcggccattgcgaccgtgttcctgtggttcaacgcactgatgctgcgcacgctgcatcatcgcttccacctggcctacgacatcgacaccgtgctgtcgtcgttcggcatccagcaggtgttcatggtcggctggagcctgttcgcttttgccgggatgtggctgacgcgccgcgacggcatcgcccgcatgtgcgcgctcgcgtcgctgccgctcatcgtcgtgatgtgggtgtggaccttctacgcgaacttcacgcaggacggcggaagctgggcgcgcgtgcccctcttcaacccgctcgacctcgtgctcgcggtcgtctatgcactcgccgcgtcgtggttcgtgcgcgcacgcaagcttggctggtcgttcggcaagtatcgcgtcgagctggtgagcgcggccggcgcgaccgcgttcctgtggctgaacgcgatcctgttgcgcacgctgcatcactgggccggcgtgccgtacgaactcggcgcgatggcggcatcgacgctcgtgcaggcgtcggtgtccgtgtactggacgctctgcgcgctcgcgatcacgatctgggccacgcgccgcgggctgcgtccgctgtggttcgtcggcgccgcgctgctcgcgctcacggtcgtcaagctgttcctgttcgacctgtcgcacgtgtccggcatcgagcgcatcgtgtcgttcatcggcatcggcgtgctgctgctgttgatcgggtatttctcgccgctgccgccgaaggccgccgcgcaacaggacgaccacgcatgaa

SEQ ID NO: 199654 - DNA, 790 bp, Unknown
  Bacterial polypeptide expressing nucleotide sequence isolated from the Sargasso Sea
aaactttgctaaaaatgaaaaaagagttcaagcattaggtggcgctaaaaatcatttagtcgtaatgcctgattgtgatttagatggtgctgtaaatggtttgatgggagctgcttatgggtcagcaggtgaaagatgtatggcacaatcagttgccgttgcagttggagatattggagatgaattagtatcaagattatcaaaaaaagcagaggctttaaaagttggtcctggaatggacaaaaattctgaaatgggtcctttagtgacaaaagaacacttagaaaaagtaaaaagttacgttgatttaggagtaaaagagggagcaaaattattagttgatggaagaaacttaaaattacaaggatatgaaaatggattttatatcggtggttgtttgtttgaccatgtaaaaaaagaaatgagaatttataaagaagaaatattcggacctgttttgtctgttgttagagtaaaaacttttgaggaagctgcaaaattaataaatgatcatgagtatggaaatggagttagtatttacactagagatggtgatgctggaagaacatttgcgagtaaaattcaggttggaatggttggaataaatgttccaataccagttccaatggctttccatagttttggaggttggaaaagatctttattcggtgacagtgctatgcatggtatggaaggtataaaattttacactaaattaaaaactataacttcaagatggccttctggaattcgttctaatgccgaatttgtgatgccaacaatgaaataa

SEQ ID NO: 199655 - DNA, 823 bp, Unknown
  Bacterial polypeptide expressing nucleotide sequence isolated from the Sargasso Sea
atggatgcgccgctcccgccgatatctgccccgatttccgaaacggaacctgaaaccgaaaccgtcgccgagccgcgcgcgtcgcggctacatcggccggtcgcgctcgtcaccggttcgacgtccgggatcggcgcggcgatcgcgcgccgtctcgcggcggacggctacgcggtgatcctgcattcgcgcagctcggccgacgtggggcgcgcgatggcgcgcgaactcggcgcggcctatgtgcaggccgacctcgccgacgacgccgaacgcgtgcggctgatccgcgaagcggttgccgtgcacgggcggctcgacgtgctcgtcaacaacgcgggcgtcagccgcgtgattccgcatgacgacctcgctgcggcgacgcccgacgtgtggcgcgagatgcacgagatcaacgtgatcgcaccgttccggctcgtcgccgaggcggaggctgcgttgcgcgaggcggcgtcgcacgggcgggccggctgcgtggtgaacgtcagctcgcatgcgggcgtgcggccgaagggcgcgtcgattccgtatgcggcggcgaaggcggcgctcaatcacacgacgcggctgctcgcgaaaacgctcgcgccggcgatccgcgtcaatgcggttgcgccggggctcgtcgatacgccgctcacggccgactggaccgacgcgcagcagctctggcgcgagcgcgcgccgatgcgccgtgcggcgacgccggacgacatcgcgcagacggtcgcgatgctcgtcgcgtccgattacgtgacgggcgagatcgtgatgctcgacgggggaatgaacctgacgtgaa

SEQ ID NO: 199656 - DNA, 838 bp, Unknown
  Bacterial polypeptide expressing nucleotide sequence isolated from the Sargasso Sea
atgaaaaatgttgtaattacagattaccttttcgatgatttatcagttgaagaagaaatatttcaagaaagcaaaataaaattatcatcagaaaaaagtccaaacaaggaagagttaaaagttttgactcaaaatgcggattatataatcactcaatttgcaaaattagataatgaaattataaataatctaaataaagcaaaaattattgtgagatacggtgttggctatgataacgtcgacataaaatctgcaagattaaaaaatatacctgtttgtaatgttcctcattactgtatagatgaagtagcagatcacactataggttttattttaaattcaactcgagccctaaataaaaatcatcaaaaagtcatacagggtgaatggggcctggcagtcccaatggaagaaatgaaatcactaaatgatttaaagattggagttataggttttggccgtattggtcaggctgtagtagaaagactaataccatttaagcctaaaatattaatttatgacccttttataagtaatcctgtgaaaaaagatggtttatcttttgtagaaattaacgagttgtttaaaaattcagacattattacattgcattgcccttctactgaaaaaactaaaaatataattaatgatcattctctttctttaatgaaaaaaggggtaataattataaatatcggtaggggggatcttatcgatatgggaagttttataaatgctttgaagaataaaaaaataaattctgcggcattagatgtttttgatactgaacctctaactgaaaaccatccaattagatcatttgacaatgtcttatttt

SEQ ID NO: 199657 - DNA, 1099 bp, Unknown
  Bacterial polypeptide expressing nucleotide sequence isolated from the Sargasso Sea
atgacgaccacttcttctgcccgtactcacaccatcaatccgctcggcaccgatggttttgaattcgtcgagtacacggcgccggatgccaaagggattgccgccctcaaggcgctgttcgtctcgctgggctttgccgaggtggcgcagcacaaacacaagcagtgctggctctaccgccagggggacatcaacttcgtggtcaatgccgagccccactcccaggccgagcagtttgccagcctgcacgggccgagcgtctgcggcatggcatttcgggtgagcgatgccggcaaggcccagcagtacgccatcggcaagggtgccaagcccttcgtcggcaagattggccccatggagctcaacatccccgccatctacggcatcggcgagagcaccctctctttcgtcgaccgctacgctgacaagggctccatctatgacgtggacttcgtcttctaccccgactggcaggcgcgcatggccgaggtggatgccgggctgtacgagattgaccacctgacccacaacgtgcagcgcggcaacatggatgtctggtccaatttctacgagcggatcggcaactttcgcgagatccgctacttcgacatcgagggcaagctgaccgggctccattcccgcgcgatgaccgccccctgcggcaaaattcgcattcccatcaatgaatcctccgacgacaagtcccagatcgaggagtacctgcgtcagtacaagggggaggggatccagcacatcgccatggcgtcgagcgacatctaccacaccatccgcaccctgcgcggccgtggcaccggctttatgccgaccccggacacctactacgagaaggtggacagccgggtcgaggggcaccaggaggatctggcggcgctcaaagagctgcgcatcctgatcgacggctcccccaccaaggacggcatcctgctgcagatcttcaccgacaccgtgatcggcccggtgttcttcgagatcatccagcgcaagggcaacgaaggctttggcgagggcaacttccaggcactgttcgaatccatcgagctggatcagatccgtcgcggggtgctcaatgatgcgtaac

SEQ ID NO: 199658 - DNA, 205 bp, Unknown
  Bacterial polypeptide expressing nucleotide sequence isolated from the Sargasso Sea
gttgcagaatcaacgggcaatttctgcatatcagagaactgaaagtagaggcgcacatgctagagatgattatcctgacagagatgacgaaaattggttatgtcatactatatatgatcctatttcaaaaaaagtttctaaaaggggagttaattttgaacccaataaggtagaggcttttccgcctaaggtaaggacatattaa

SEQ ID NO: 199659 - DNA, 1483 bp, Unknown
  Bacterial polypeptide expressing nucleotide sequence isolated from the Sargasso Sea
aatgcctgaattaaaaaaatataaaatgtttatagggggacaatgggttgactctgatactaaaaaaacttttgaaactttaaatccggaggataataaaccctgggcagttgttcctgaggcaagtgcttctgacgtagataaagcagttcaagcagctcaaaaagcctttgaaggagattggcctaaaatattaccgcgtgaaagagcaaagtttctaagagctattggaaataagcttagagataacgcagaattacttggaaaaattgaaactatagatactggaaaactttatagagaaacaaataaacaagcaaattatattgctgagtattatgattattatgcaggtatggcagacaaggtcgaaggcacagttctgccaatagataaaccaaatattcaagccataacttcaagaatacctattggtgttatcgctgcgattgttccatggaattctcaaatgtttttaacagctacaaaacttgcgcctgctttagctatgggaaacacggtggttattaaatcatcagaacttgctccagcagtaatgtttgaatttgcaaaacttattgaagaaactggtattcctaaaggagttgttaatgttattacaggatttggagacccatgtggaaaggctttaactacacataatttagttgaaaaagttgcttttacaggaggacccgaaactgcaagacatataattagaaattcagcagaaaatttatcagaagtaagcttagaacttggaggaaaaagtcctgttgcagtatttgatgatgctcatcaagaaaatgctattaatggaattactgcaggaatatttggagctagcggacagagttgtattgctggttcaaggttatatctacaaaaaggaatttacgatgagttccttgacaaactcacaaaaagagctgaaaaaataaaaattggtgctcccatggatccagacacagaaatgggaccattaagtaattataaacaattagaaattattgaaaaaaacataaaaaaaaccacagaacaaggtggaaaaataaagtgtggtggtgaaaggcatccattttcaaatgagggatactactttcctcctacaataattgaatgtgataatcataatcttccaactgcagaaaacgagctttttggaccagttttatcagttatgaaatttgatacggaaaaagaggtaatagagaaaatgaacgataatcaatatggattatcttctggggtctatacaagtgacttctccagaggtctaagagtttctaatgcaataagagcaggtataacatttgtaaatacttatcgattgatttctccatcagcaccttttggtggtattaaagatagtggatatggaaaggaagcgggaatggactcaattaaagattatactagagttaagacaacttggtattacacatctgatgaaccaactttagatcctttctctataagataa

SEQ ID NO: 199660 - DNA, 1123 bp, Unknown
  Bacterial polypeptide expressing nucleotide sequence isolated from the Sargasso Sea
atgagaagtgatagttttctttataaaacttattatcaatggtggaaaaatattgataaatctattttttttataattagtttattatttattattggtctatttttttctttagtttctacttctttaatagcctctgataaattagacacaaatagttacttctttttttttaaacacttagtttatgttgctcttggtgtttttatcgtttttgttttttcttcttttaagaaagaacaattaatcaaatattcaataatacttttttttgtttctttaatttcattagtattagttccgatattgggtgttgaggtcaagggctctaagagatggatagatctattttttttaccaaggtttcaacctatagaagtacttaagccctttttaatagtttttttagctacaattctttgtactgaaaaaactaatttaatgattaaatacttattaacgacattaactatctctattgtatctcttttactaataattcagccagatattgggcaaactttattagtagttttttcttggtctgtgttaatttttacatcaggaattaatatatttattcttttagtatttttcttcctagcaataattttgctaacatatttaataatatacgtacccaagtttgactacattcagggacgtatactttctttctttgatagagaaactggaactcacaatttccaatctgacaaagcgatagactctattactagtggaggtttttttggcaaaggaattggagaagggatacttaaaaacagagtgcctgaggcgcatacggactatatcatctccgtaatttctgaagaatttggagtagtggccataatgttaatattattattgtttttaattttcgtttatatggtctttaaaaaaattagttttgaaacagatgataaaactaagttaatattaattggttcaataagtttaatattgatgcaagcaacaattcatattggggtaaacattagattatttccaacgacaggtatgaccttacctttcttaagttatggaggctcgtcgattattagcacatctatattagcaggcatcatattaaatttgactaaaagaaaaataaattaat

SEQ ID NO: 199661 - DNA, 1465 bp, Unknown
  Bacterial polypeptide expressing nucleotide sequence isolated from the Sargasso Sea
catgccccgcacgctaccgcaactgatcgacggccaatggcaaaccagccaggctcgtgagctgatcgaagtcaccgacccgaccacccaggaggtgatcgccctcgcccccaaggccactgccgaggaaatcgaggcggcagtggcaagtgcgcagaaagccttcctcgcctggcgcgaagtaccggtatcggagcgcgcccgtctgatgctgcgctaccagcacttgctcaaggaacaccacgacgagctagcggagatcctctcggcggaaaccggcaagaccttcgccgatgccaagggtgacgtctggcgcggcatcgaagtggccgaacatgcagccaatatcgccagcctgatgatgggcgagacggtagagaacgtcgcccgcgagatcgacaccgccagttggatccagccgctgggcgtgtgcgttggcatcaccccgttcaacttcccggcgatgatccctctgtggatgtttccgctggccatcgcctgcggcaatagcttcattctcaaaccctcggaacaggacccgatgacgcccaatcgtctcgccgagctgttcctcgaagccggcgcgccggccggcgtactgcaagtgctgcatggcggccgcgagcaggtcgatgcgctgctggtgcatccgctggtacgcgcggtgtccttcgtcggttcagtcgcggtcggccagcatgtctatcgcaccggcacccagcacctgaagcgcgtgcaggccttcgccggggcgaagaaccatatggtgatcatgccggatgcacccaaggatcaagtgatcagcaacctgctcggcgccagttgtggcgccgccgggcagcgctgcatggccatcagcgtggcggtgttcgtcggtgaatcgaaacaatggatcgatgagctggccgaacagatggccgcgctgcgccctggtcattggcaggacagcggcgccgcctacggtccgctgatcagcccgcaggcacgccagcgcgtgttgcacctgatcgaacaaggcaaggccgaaggcgccgagtgcctgctcgacggctcgcaatgcaaggtagacggttacccggacggtaactgggtcgggccaacgctgttccgtggcgtgaccacggagatgggcctgtaccgcgaggaaatcttcggcccggtgctggtgtgcatggaggttgcgaccctggaagaagccatcgaactggtcaacgccagtccctatggcaacggcaccagcctgttcacccgttccggcggcgctgcgcggcatttccagcacgcggttgaagtcggccaggtgggtatcaacgtaccgattccggtaccgctgccattcttttcgttcactggctggaagggctcgttctacggcgacctgcacgcctacggcaagcaggcggtgcgtttctacaccgagaccaagaccgtgaccagccgctggttcgacgacacaccgctcggc

SEQ ID NO: 199662 - DNA, 1192 bp, Unknown
  Bacterial polypeptide expressing nucleotide sequence isolated from the Sargasso Sea
tagttatttagcagcaaccagtattgcttcaagtgtattttccatgattttttggagttttggttttctgcgaatgggaactgttggcatggtagcgcaagctcatggatctaaccaattgcatgaaattattaatttagttttaagaaatattatatttgtttttattatctctttgttgttaatttttttgcaaaactacatttttaaactttctttactaatttttgatttatcatctgatacaaaaaaatgttttaaagattattttgatatacgaatttattcttccttcggtgaacttactatatttgttattacaggtttgtttattggcttacaaaagacaaaaacctctagtattgttgttggttttttttctgttactaatattcttttcagtataatttttgtagtttattttaatttaaatgttcaaggagttgcacttggcaccttagtatcttcaactcttacatctataatttttttattttttactttctttgaatttaaaaaaattacaaattcagattttaattataaaaaaatttttaattttaaaaaaataaaaaatatatttaatattaatttaaatatttttattagatcaatacttcttacgttttcttttttattttttacctatcttggaaactcaattagtgaagacgtcgtagcggccaatactatattactcaatctcatcatgctttcagcctttattcttgatgcatatgcattttcaacagaaggacttgtaggttattcaattggatctaaaaataaaaaattattaaaaacaattatcaaaaactcttttattctgagtagctctacagggctaataatttcatttggatattttttaggcaaaaatcattttatagaaataatgactgacttagagagtattaagatcatttgtttatcgtattcagtctggattttaataattccctttatttcttctttttgttaccaatttgatggaatttttgttggggcatctaaaacaaaagagctgcgaaatgccatgatcatatctgttggtatttatttattatcagctttttttctagttaatttttttggcaattttggtttatggatatctttaagtattttctttattttaagagggttaactttatttttatatcttggaagaatttacaaaggatttaaataa

SEQ ID NO: 199663 - DNA, 577 bp, Unknown
  Bacterial polypeptide expressing nucleotide sequence isolated from the Sargasso Sea
aatgtttcttaaaaaacaaaacttaaaaaataaaattgcccttgttaccggggctggaaaaggtataggaaaagcttgcgctatagctcttgccgaagctggggcaagtttaataattgttagtcgaacaaaaaaagatttaaatcaagtttcaaaaattgttaaaaaatttagatcaaagtgtaaatcgtatgtttgtgacgtaacaaaatattctgaaattaaatcagtaatagactctcaaaaaagaattgacattttagtaaataacgcaggaacaaatattccagagcattttactaaggtaaaaagaaaagatatggaatatgttgttaagattaatacaatggctacatttaatattgctcaactatcagctttaaaaatgatcgaattaaagaatagaaaaaaagttggaggtgtaattattaatatgtcttcacaaatgggccatgtaggcggccccataagaagtgtttacaatatgactaagtttggttttgagggacttacaaaaggaatgtctatagatcttgcaaaatacaatattagagtaaatacagtgtgccctactttt

SEQ ID NO: 199664 - DNA, 336 bp, Unknown
  Bacterial polypeptide expressing nucleotide sequence isolated from the Sargasso Sea
aaggtgttgaggaaatacgaaaaccttttgatggaatgagctctatatcagttaaagataaatcattaatatttaatactgatttagttgaaactttagaatttgataatttaataagacaagcaataacaacaatggattccgctttttatcgaaaagaaagtagaggagcacatgcaagagaagattttcctaaaagaaatgatgaaaaatttatgcaacacactttatcctggtgcagcggtagtgaaactaaaattgattatagaccagttaataaatcaactttaactaatgacgttcaatattttccacctcaagaaagagtatattaat

SEQ ID NO: 199665 - DNA, 760 bp, Unknown
  Bacterial polypeptide expressing nucleotide sequence isolated from the Sargasso Sea
aatgtatcttcaaaaaataaatcttaaaaaaaaatatgctttagttacaggtgcaggtaaaggactaggaagagcatgttcaattgcattagctgaggcaggtgcaacagttatagctttaagcagaacaccttcagatttaaataaattagaaaaggatattaaaaaagttaaggggaaaattattaaagtttcgtgcgatgtaatgaattatgaagatttaaaacaaaaattagaaaaaattaaaattattgatgtgttggttaacaatgcaggaactaatattccagagccttttgaaaaaattaaacaaaaaagtatgaattaccttgtggatttaaatctaaaagcagcatttaacgtggcacaacttgttgtaaaaaaaatgcttaaaaataaaaaaagacctggatcaattgtaaatatgtcatctcaactaggtcacgttggtatgagtggtagaaacgtttataatatgactaaatttggaattgaggggttaaccaaaggtatgggtgtcgaattagctaaaaaaaatatcagggttaatacggtagctcctacttttgttgaaacgccgatggttaaaaatttttttaaaaacaaaaaatttaaaaaattagcccttggaaatattcctatgggaaaagcggctaccgaaagtgatgttgccacaacagtatgttttttggcatcctcagcatcttcaatgataactggaacatcaataattatagatggtggatggacagctcaataa

SEQ ID NO: 199666 - DNA, 1393 bp, Unknown
  Bacterial polypeptide expressing nucleotide sequence isolated from the Sargasso Sea
tgtcaatataggtagtattcaatttgatgatattaagaaaattcaaaattctcttaaaaaaaataatgatgatgaatggtcaaaaactgctgtcataaaaagatcaacaatcttgaacaaagttgcagatttaatagagaaagatccttatgaattaattttttatcttattaacgaggcaggaaaaacaatacaaaatgcaattgatgaaattagagaaggtattgattttttgcgttattactcggagcaggctaaagaaataattcaagaaaaagacttagatgggccaactggagaggataataaaatttactatagcccaaaaggaaaatttttatgcataagtccttggaattttcctgttgctattcttatagggcaaatatctgcagctctggcatgtggcaataaagtcataattaaaccctctgaacacacttcgatactcggatatcttgtaataaaaaaatttcatgagagcggagttccaattagctgtcttgagcttattcttggagatggtaaatatggtgaagcattaactcaaataagttcattagatggggttgcttttactggatcgcttccaacagcaaaaaaaatacaatctaatcttattcaatatcaagatcaaataattcatcttatagccgagactggcggcatcaatactatgcttgttgattcgagcgcacttttagagcaagttacagatgatgtggtcaggtccgcattcgatagtgctggtcagagatgctctgcattgagaattctttgtattcaggaagaaatatatgaagacttagttgaaatgattaaaggaaatatgagtgttcaaaaaattggtgatcctaatgagtttgatacagatattggtcctataattagtactgaggctacaaagaaacttaataattatatagaggaatgtaaaaaagaaggtttagatgtatttcaatcatcagaaccatctgaaaaaaattatatttcacctacactgatctcagttaataaaatatcagatatcagcagtgagcaatttggaccaatacttcatattctaaaatatgcttcaaatgatatagataaattaattaatgatattaataataccgggtatggactaactatgggaattcactcaagaatagaatctcaagctgatcatcttggcaaaaattctaagatagggaatatatatataaatagggatatggtaggtgcggttgttggatcacaaccctttggaggtgttggtctttctggaagtggttataaggctggtggtccaaactatttattacagtttttgaatgaaaaggttatttcaaaaaattcagttgcctttggcggaaatacagaactgcttaatcttcaagaagacaaatga

SEQ ID NO: 199667 - DNA, 1420 bp, Unknown
  Bacterial polypeptide expressing nucleotide sequence isolated from the Sargasso Sea
atgagtcagaacgtataccaatttatcgacctgcagcgtgttgatccgccgaagaagccgctgaagatccgcaagatcgagtttatcgagatttacgagccgttttccgaaggccaagccaaagcacaggcagatcgctgcctgtcctgcggtaacccgtactgcgagtggaagtgcccggtgcataattacatcccgaactggctgaagttggcgaatgagggacgtatttttgaagcggcagagctttcgcaccagaccaacaccttgccggaagtctgtggccgtgtatgtccgcaggatcgactgtgtgaaggatcctgtacgctgaacgatgagtttggcgcggtaaccattggcaacatcgagcgctatatcaacgataaagcgtttgagatgggctggcgtccggatatgaccggtgttcgccagacggacaagcgcgtcgccattatcggtgccggtcctgcaggtctggcgtgcgctgatgtgctgacccgcaacggcgtgaaggcggaggtctttgaccgtcacccggaaatcggcggcttgctgaccttcggtatcccagccttcaagctggaaaaagaggtcatgacccgtcgccgtgaaatcttcaccggcatgggcattgagttcaaactgaacgtggaagtaggccgtgacgtacagctcaacgatttgctgaaggattacgacgccgtgttccttggcgtaggaacctatcagtcgatgcgcggcgggctggaaaacgaagacgctgatggcgtgtttgatgccctgccgttcctgattgccaataccaaacaattgatgggctttggcgaaagcagcaatgagccatacatcagcatggaaggcaaacgtgtcgtcgtgctcggcggtggcgataccgcgatggactgcgtgcgcacctccgtacgtcaggaagcatcacacgttatctgcgcctatcgtcgtgatgaagagaacatgccgggttcgaaacgcgaagtgaaaaacgcgcgcgaagaaggcgtcgagttccagttcaacgtccagcctttaggtgtggaagtgaatgccaacgggaaagtgtgcggcgtgaaaatggcgcgcactgaaatgggcgaaccggatgcgaagggacgtcgccgtgcggagatcgtcgctggctccgagcacgttgttccggctgatgccgtggtcctggcgtttggtttccgcccacacagcatggaatggttgaaagagcacagcgtcgagctggattcacaggggcgcattattgccccggaacgtagcgacaacgctttccaaaccagcaacccgaaaatcttcgcaggcggcgacatcgtacgcggttcggatctggtggtcaccgcgattgccgaaggtcgtaaagcggcagacgggattctgaattacctggaagtgtaaa

SEQ ID NO: 199668 - DNA, 1276 bp, Unknown
  Bacterial polypeptide expressing nucleotide sequence isolated from the Sargasso Sea
atgacaccaaagatcgtaaccagcttcatagggggggaatgggtagagcccaatgagagctcacacaaaataaaaataattcatccggcagatgaacaacatatttcaaccctttatgaggcagacaccaatgaagtgagcaatgctgcagagacagcaaaaaaaacatttcatagtggcgtttggtcaaatgcgagtgtcgacgatagaaaaagcgttttgttggcaatcaaggatctcattattgagaacaaagaggagatcgcagaacaagaggtaatgaatactggtgcaccaataacacaagcctatggcagacaaatacctagaagcgcgatgaacttcgaattttttgcagaatttatttctcaagcctcaagcccagtctttgatcaaaacccagattatattacctatgtcagaagagagccgattggtgttgctggtttaatcgctccatggaatgcaccgatggcattagcaacaatgaaaattgcaggagcaattgcttttgggaatagctgcatattaaaaccatctgaattaacaccacttggatttgttccattcatgaatttactcaaaaaagcaggcctgccagacggcgtgataaacatggtcaatggaagagggtcagtaacaggtactgcgatcacacaaaatgaaaacatcgatgtaatcgcctttactggggggactgagacaggaagggtcataggcgcagagtcgggtaaaacacttaaaaaaattgttactgaactgggcggtaaatcagcaaacattatattttcagacgcagattttgaacgagcactggacgcagcaatggttgcaatattttcaaataacgggcaacaatgcttagctggctccagaatccttgttgaaaaacccattgcaaaggagtttaaaaaaaggatggtagaaagagcgagaaacttgattatcggcgatccttttgactcaaaaacagagattggcccccttatttcaaaagagcaaattgagaaagtcatgtcttttgctcaaacagccgaagaatcagatgacatcaacatactttgcggaggaaagagatgtgagtcctttcaaaaaggctattattttgagcccaccattgtagaaacgaagagcaatcaaaacactgtctgccaagaagaaatttttggacctttcgcgactatactcgagtttgatggcattgatgaggcaatagaattagccaatgacagcgagtttggtttggtctcatacgtatggtctactgacataaaaa

SEQ ID NO: 199669 - DNA, 1165 bp, Unknown
  Bacterial polypeptide expressing nucleotide sequence isolated from the Sargasso Sea
tatgaataatgtaacattgcttgcagttcctctatttatttttatgggaactattcttgaaaaatctggtattgctgcaaagatgcttgaaaatatggcgaaggcttttagaggtataaaaggtggattgtctatatcgataattattgttggcgctttacttgcagcaagtacagggattgtaggtgcgactgtagtaactatgggtctaatgtccctcccaattctaataaatcaaggatatgataaaagcttttctgctggattggttgcatctacagggactcttgggcagataattccaccatctatagccttagttttgcttggtgatgttatgtcaaatgcttatcaaagagctcaaaatgacatgggtatattttcccaacaaaccgtaactgttggagatttgtttataggtgctattgttcctggaattctgatatgtattgggtatcttgtttatacactttataaaaataacagtaatttaaatataaaagatacttcaacagaattaactatagataaagttgaattatttaagacgctggcgcttccaatagtcttgatttttttagttctaggttcaatatttgcaggtattgcaacacctacagaagcggctgcaattggagcatttggtgctttgttgattgcattaataaataggaaagttaatttacgtttcttaaaagagacttctgagaaaactgcaattgtttcaacaatgatttttacaattcttattggtgcttcaattttttcactaatatttagaggggttggaggtgatgagttaattgacctaatttttaattctctccctgggggatcatttactgctctaatatttgtcttagttattatttttttgcttggttttattttagattttatagagatttgttatgtaatagtgccactcgtagctccacctcttttgatgatgggatttgatcctgtatggctagctattttatttgcaataaacctacaaacatcattcttaactccaccatttggattttcgcttttttacttgagaggggttgcagatgagagcatacaaactaaagaaatttataaaggtgttgttccttttatattaattcaaattattattctttttgcagttatgctatttccaactctaataatataa

SEQ ID NO: 199670 - DNA, 1339 bp, Unknown
  Bacterial polypeptide expressing nucleotide sequence isolated from the Sargasso Sea
atggaaataatacctcttctgcttcttatattaatttgtactgctttgttactcggatatcctgtagcttttactctagcaggagtatcaattttatttgcattaatttgtgttccttttgggatatttgatcctactatttttaaaagcatccctattagaatctttggaattatgaataatgtaacacttctagcagtcccattatttatttttatgggaactattcttgaaagatctggaattgcagcaaagatgcttgaaaatatggcagcagccttcagaaatactaaaggcggtctttcaatatcaattattatagttggagccctgcttgcagcaagcaccggaattgttggagcaacagttgttacaatgggtctaatgtctttgccaattttaattaatcaaggatatgaaaaaagcttttctactggattggtggcttcgacaggaaccttagggcaaattatacctccatcgattgctctggttttgcttggagatgttatgtccaatgcttatcaaagggctcaaaatgatatgggtatattttcacaaaaaactgtaactgtaggagatctttttattggtgctattgttcctggaataatgatatgtattggatatcttatatatacaatctataaaaataataacaataaaaatataaaggctaattcaaatggattatcaattgagaagattgaattatttaaaacgctcgcacttccaataattttaatttttctcgtacttggatcaatatttgcaggtattgcaacaccaacagaggcagcagctattggagcttttggtgccttagtaattgcattaataaatagaaaaataaatttcaattttttaaaggaaacttcagaaaaaactgctgttgtatcaactatgatttttactattcttataggagcttcaattttttcgttaatctttagaggagtcggtggagatgagttaattaatcttatttttaactcgcttcctggtggttcatatactgcccttatctttgtcttgctagtaatattttttttagggttcatcttagactttatagaaatttgttatgtaatagttcccttaattgcgccgcctcttttaatgatgggttttgaccctgtatggttagcgattctatttgcaattaatcttcagacatcttttctaacgccaccttttggattttctttgttttatctgaggggtgttgcagatgagagcatacaaacaaaagaaatttataaaggtgttgttccttttatattaattcaaattattattctttttgcagttatgctattcccaattctaataatataag

SEQ ID NO: 199671 - DNA, 1027 bp, Unknown
  Bacterial polypeptide expressing nucleotide sequence isolated from the Sargasso Sea
atcgtcatggcaactgggggggctggggaattatttcccgttcacagtaatacgccagattcaaccggtgatggctatgcccttgcactcaatgccggcgctgacctggtggatatcgaatttttgctaatgctcggccacgcggttctgcacccggccacagtgcgcggcgttttgttcacttttcaatacctactcactaagggcgccaagccactatttaattcagagggaaattcattcctttccaactacgaccctgaaggtaacgacaacccagcgaggcatatctatgctcgtgccatctatggcgaggtgcgggcggggcgggggagcccgcatggcggggctttcttcgaccccggttcggtatcaagagaaaccctgatggcctctcttccatcgcaaaccaaatatctggaatcttttggtgttgacataacaaaacccatagaggtgggggctgcggcgcattacgtctgcggtggtataaaaataaatactcaatcacaatcaactgtgcccggcctatttgcagtcggggagtgctctggcggaccacacggggctgggcgcatcggcggtaattccctcaccgaaatattagtctttgggaaacgcgctggggcagaggctgcagcatttgctaattttacaagtctaagcatacccgatcgcgatgaagttttttcagaggtgaatagggtgacatctcaactcagccgcgaacgaaccggagagcgcccgaatgtaatcaaggcgcgcttgcaaaagctaatgaacgattatgttggtgtcgtccgcaatgaagaaggcctagttaatactattgctgaattcgaacgaatggagcgggaagatttacccgcaatgtcaatcgcggaaaataaccgaataggaaactatgattggattgaggcactagaggtcactgcgatgactgggttcgcgcgcgctatggcaggagctgctcttctgcggacagaaagccgcggcgcacattatcgcgaagattatcccgatcttg

SEQ ID NO: 199672 - DNA, 769 bp, Unknown
  Bacterial polypeptide expressing nucleotide sequence isolated from the Sargasso Sea
atgtatttaaaaaaatataatctaaaaaataaatattcactagtaactggagcgggcaaaggtctgggtagagcttgtgcaatagctctagcagaagcaggatctaatttaattataattagtcgtacaaaaaaagaccttgatagtgtttcaaaaattataaaaaaattaaaggtaaagtgtaaatcttacacatgtgatgttacaaattataatgaaatcaaaactataataaacaagcaaccaagaattgatgttctggttaataacgctgggaataatattcctgaacactttacaaaagttaaaacaaaaaatatggaatatcttgttaaggttaatactatagctacttttaatattgctcaattatgtgcaatcaaaatgatgaaattaaaaaatcgtaaaaaagttggaggttctattattaatatgtcttctcaaatgggacatgttggggggcctataagaagtgtctacaatatgaataaatggggcttagaaggtttaacaaaaggtatggctgtagacctagcaaagtataatataagagtaaatgcagtagcaccgacatttgtcgttaccccaatgacaaaaaaatttctgaaaaacaaaaaatttaaaaaagaaactttaaataacattccgcttggtagatttgcagaaatgtcagaaatagcatcaactgttgtttttttagcgtctgacgctgcttcaatgattcatggaacttctatattagtagatggcggatggactgcaaaataat

SEQ ID NO: 199673 - DNA, 664 bp, Unknown
  Bacterial polypeptide expressing nucleotide sequence isolated from the Sargasso Sea
tatgccgcttcacaaacttttgatgaagctagacatgtggaaagctttaatagatatgttcaatcgagaatggagctcatgtatccaattggtaatgctcttaaatcaattttagataaaatccttacagatccaagatgggatcttaagttcattgggatgcagttaattattgaaggactggcactagcagcttttagaacctcaagggacttaacaccagatcctgtcttaaaagatatgcttgatttaataatccgagatgaagcaaggcatgttacttttggcattaattatttagaagagtttgtaacaactttatccgaaaaagagattgaagaaagagctcagtttgcctatgaggcatgctacttaagtaaagaaagacttgtttccatagaagtctatgaacactttggttggaacgttgaagatgcaagacaatttcagctaagttctgaaataatgcaaacattccaaaaacttctgtttcaaagggttatgccaaatcttaagagaattggactactaactgattcaattagaccaaaattcgagaaactcggtattcttgagtatgaaaatgatgcaagtgatgctgacattgattgggctgatctatcaagaccattattcaaagaaactgcagagttagccccataaa

SEQ ID NO: 199674 - DNA, 1162 bp, Unknown
  Bacterial polypeptide expressing nucleotide sequence isolated from the Sargasso Sea
aatggataatattaaagccagtaacaaaatttttagcattgaagatgcaaaaaaactatcgaagaaaagattaccaaagctagtttatgattttattgatggtgcatcaggagatgaaaaattatcagaaattaatagttttgctttagatcaaatacgtcttgaaccaagagttctaagaaatgtagaggaaagaaaactaaaaaaaaatattcttggatttaactatgactatccttttggttttgccccaatgggcatgacaaatctttcatggccaggcgcagactcaatgctggcaaaagagagtgcaagaaataatataccaacttgtgtatcgatggcttcaacaactaccttagaaaaaatgtatgagctttcagaaggtcattcgtggcttcaactttatatttttcaggatgaagcctttgtcatggaattgctcgatagagcagaaaaaactggttatgaagttgctatacttactgttgatgttccggttttatctagaagaactagagatgataaaaatggattttcatatccatttaaaattggacctaaacaattttttgattttgcaactcatccagtttggtcaatatctacattgcttaatggaataccaaagccaatgaattacgaaacttcgaaaagtggaaagggtatttttaaaagaaaagaaagtagaggaaaaacagattgggaaactttaaaaagagtaagaaataaatggaaagggaaattaattgtaaaaggtgtcatgtcatctgatgatgcagttaaaattaaagaaatgggcgctgatgctattcaagtttcaaatcatggaggtagacaattagatagtgcctcagcagcaataaatattctaccttttattagggaggcagtaggaaataattttccaattatatttgatagtggaataagaagtggaagtgatattgtaagatcattagctttaggagcagatttttcaatgattgggagacctgtaatgtatgctatgggagctgatggagctagcgggctaagaagaattgtggatataattaaagaagaaactagcacaacactaggtttggttggattaaatgatattaatgaggtttcttctgatataattgaacagaaactttttatgaatacaacttactaa

SEQ ID NO: 199675 - DNA, 885 bp, Unknown
  Bacterial polypeptide expressing nucleotide sequence isolated from the Sargasso Sea
tatggataaatttacactaggcataattgcttttcctattttattttctatgcttgcactaagaatgccaatcggtttggctatgttaatagttggttgttcaggtaccattataatagctggatggcttccaattttatctcaagttaaaactagtgcatggcatttgttttctaattattctttatctgtcattccactatttttattaatgggaaattttgctggtaaagctggtatgagcgaggcactttttaaatttactggggcttgtcttggccacagaaagggtggggttgcaatggcagcaattggtgcttgtgcaggatttggagctatttgtggatcatcactggcaaccgcagccactatgggcaaagttgcacttcctgaactaagacgattagggtattctggagctctaagtacaggaactctggctgctggtggaactttaggaatattaataccaccatctgtaatactcatcatctactcaattttaacagaacaaaatattgctaaaatgtttttagctgctttcattcccggtattctagctgctttaggatacatacttgcaattgctttatatgttaggtttgtaaaggattctgggccaactaaagatagaattggctggaaaaaaagattgtctttatttaagaatatatggcagataattctaatttttttagtgatgattggaggtatttatttaggttggtttacccctacagaaggtggtgctatcggtgcaggtggggctggtctgattgcaatttctagcaagaattttaagtttaaagatttggttgaagtaattgagagtactgcaattacctctgctatgatatttttagtgcttttaggcgcagaattttt

SEQ ID NO: 199676 - DNA, 1524 bp, Unknown
  Bacterial polypeptide expressing nucleotide sequence isolated from the Sargasso Sea
tatggccccaggaaaaatgagagtcattaaaagaaatggaaaagtagtttcttttgaagaggaaaaaatcaaagtagcaattatgaaagctttccttgcagtagagggcggctctgctgctgggtcatccaggatccatgaggaagtcgatcaaatggcacaagagatcattaaagtatttgagagacgaatgccatctggagggactatacacatagaagaaatacaagaccaggtcgagttacagctgatgagaaacgaacatcataaagttgcgagaacttatgttttatatagagaagcaaggaaaaacgaaagggttgaagagagagacgaaaagggactagaaaagaatgtacaagaagttattgaatcagctgtcaaaaaagcatgtattggattagataacgttgatgagatattgcttgtcacagaaatcaaaaatgccacgtatgaaggaatttccgaaaaagacttagctgaaagcatgctgatgactgcaagaacattggttgaaaaagagccaaactattcttacgtcacagcaagattgttgctgaataacatggaaaatgaggtcggtgcattcctaggtgttaaagagagaaaagatcgaggaaaaatgtacgttgaagcacttgcaaaaacaattgacaaagggattgaattagattttttaaatgacgagctcaagtcatatgatttaaacaaacttggtaaagctatccttcaagaaagagactttcagttcacttatctggggctgcaaactttatatgatagatacttcattacttgtgatgaaacaagatacgaattgccacaggtgttttttatgcgtgtcgcaatgggccttgcgttaaacgaagaaaatagagatgagagagcgattgagttctacaaactcttatcaagcttcgattatatgagttcaactcctacattatttaattcggggactcaaagacctcaactttcatcttgctacttaacaactgtgcctgacgacttgtctgggatatatggagcaattagagacaatgctttattatcaaaatgggctggaggcttagggaatgattggacaaatgtaagagctttaggttcaaaaattaagggaacaaatggaaaaagccaaggaattgttcctttcttaaaagtgtcaaatgacactgcagttgctgttaatcaaggtggcaagagaaaaggagcattttgcgcttatttagaatgctggcatcttgatgtggaagaattcttagatctaagaaaaaacaccggtgatgatagaagaagaacacatgatatgaacacagccaattggattccagatcttttcatgaagagattagaaaaacgtgaaaagtggacacttttttctccttcagatgttccagatttacatgatatttacggaaaagagtttgaatctaagtacactgaatatgaaaagaaggccgaggctggggaaataaaacattttaaaactttggaagctaaagatctctggagaaaaatcctttc

SEQ ID NO: 199677 - DNA, 1348 bp, Unknown
  Bacterial polypeptide expressing nucleotide sequence isolated from the Sargasso Sea
aatgcctgagttaaaaaaatataaaatgtttataaatggcgagtgggttaactcagatactaaaaaaacttttgaaacacttaatcctgaaaataataaaccttgggctgtagttccagaggcaagtgcaagcgatgttgacagagctgtcaaagctgcacaaaatgcatttgaaggcgagtggccaaaattgttaccaaaagatagagcaagatatctgaggatgataggagataaacttagagccaatgctgaacatttaggaaaaatagagacaattgatactggaaaactttatagagaaacatataaacaagccaactatatagccgagtattatgattattatgcaggtcttgctgataaggttgaaggtactgttcttccaatagacaaaccaaacattcaagcaataacgacaagaataccaatcggtgtaattgctgcaattgttccttggaattcacaaatgtttttaactgcaacgaaacttgcaccagctttagcaatgggtaacactgttgttattaaatgttctgagttagcacctgcaacaatgtttgaatttgcaaagttaattcaagaaactggtattccaaaaggagttgtaaatgttatttccggttttggagaaccttgtggtaaagctcttacatcacataatctagttgaaaaaattgcatttactggcgggccagaaacagcacgtcatatcattagaaattctgcagaaaatttatctgaagtaagtttagaacttggaggaaaaagtcctgttgcagtatttaatgatgcaaaccaggaaaatgcaattaatggtattactgcaggaatttttggtgccagtggacagagctgtattgctggatctagactttatttgcaggaaggaatttatgatgaatttttagacaaactatcaaaaaaagctgagaaaataaaaattggagctccaatggatcctgaaactgagatgggtccaataagtaattataaacaattagaagttattgaaaaaaatattaaactaacacttgaacaaggtggaagattaaagtgtggaggacaaagacattcattttctaatgaaggttattattttccagctacaattatagaatgtgataaccataatttaccagttgctgagaatgaattgtttggacctgttttatcagtgatgaaatttaaaactgaagatgaagtaatttctaaaatgaatgacaatcagtatggattatcatcaggtgtatacacgtccaatcttgcaagaggtatgagagtttcaaaagcaattagagctggaattacttttgtaaacacatatagattaatatctcccaactgc

SEQ ID NO: 199678 - DNA, 1282 bp, Unknown
  Bacterial polypeptide expressing nucleotide sequence isolated from the Sargasso Sea
tcgagggagctcgggaggctcaccgcgccgttcgtccaccgcgcgtccgcggcggagatccacgccgacgcgctcccgcccaagacggagtacgtcatcttctgccgcctcaccccgacgcaggcggcgctgtacgcggagtgcctcaaatcgacgacgacgcggggggagttcctcaaatcgacgccgctcaccgctctgcagagactgcagcggctgtgcaactcggcgacgctcttcttcgcgagggaggaagacgccgaggagaagacgaaggcggcggcgcgggagggccgaggagaggcgccggaggaaagggaggcccgaggagaagggcacgcgcgtctcctccccgcggacgccgcggacccggcggacccgaacgttcccgcgcaccacccggggatgagcgggaagctcgcggtcctggctcggctgctcgctcgcgcaccttcttcgggtccttcttcgggtcgttcgggtccgggttcgagcggttcgtctccgtcgcgcgatcgcttcgtcgtcgtgtccgggttcacgtctaccctggacgtcgtccaggcgatgtgcgagtcgacgctggggatgcgcgggaagatctcgcgcctggacgggagcgtggcgccgaacctgcgcacggggctcgtgaagcgcttcaacgagggccgcggcggggacgtgttcctgctgagctgcaaagccggcggcgtcgggctcaacctcgtcggggcgaaccggctcgtcctgttcgactcggactggaatccggcgaacgacctccaggcgctcgcgcgcgtgtggcgcgaggggcagacgaaacccgtcgtcatctacaggctcctctccaccgggaccgtggaggagaaggtgttccagcggcaaatcctgaagggcgacgtcgcgaacgcgatggggtacgcctccgcctccgcctccgcctccgcctccgacgccgcctccgcctcggacgccgcccccgcggcgctcaactccttctccaaggcagagctccgcgacctgttcaagctcaacgcgtccaccgcgtgcgacaccgtggacgcgctgcggcggaggggcgatcgacggggcggcgggggcgcgccgcgggagatcccggaacactggcggcggtgcggggagggggtggagacgggcgcggacgacccgcccctcgccgacgccgcgcggctgacgctcgcggggggaggcgagacgatcgtctctgccgtgtgtaagctgccgagcacggcgcgcgccggggggggtgaggcgacctaga

SEQ ID NO: 199679 - DNA, 967 bp, Unknown
  Bacterial polypeptide expressing nucleotide sequence isolated from the Sargasso Sea
aatgaaagtcggaattgtgggagatattcatccaagtggatatgagttttttgataaaaataatattgagtattttgtaacaaataacatagaagaaaataatttatctaaggaattatcagatgtcgatgggataattatccgaacagcagaattaaataaaaatattctttcaaaaagtcaaaaccttaaaattgtagcaagacacggagtaggttatgacaatgttgacacagaatatttaaataaaaacaaaatcgctatggcaattactggcaaagcaaatgcagtaagtgtagctgagcatgtgatgacaatgatgttaaatcttacaaaaaatatttctaaatctgataaactaacaagagataataaatttaaagaaaaagcaaatttaccaaatttttttgaactctataataaaaaaattctaatcatgggttttggaagaataggaaaggctcttgcaaaaagatgtttagggtttgatatggaaatatttgttcatgacccttttattagtgacaatgaaattataagttataattgtattccaatcaataaagatgaaggttttaaaattgctgattatatcagtatccatctacctctaaataataaaacaaaaaatttaatttcttcaaatgaatttaaaattttcaaatctaatttaatattaatcaacacagctcgaggtggtataattaatgaagatgatctatttgatgctctgaactgtaatagaatatttggcgcaggaattgatgtctttgaacaagaaccccctataaatgatcacaaattattttcattggaaaatattattttaacacctcataatgccgcccttacattagagtgtaggaaaagaatggcaattgagtgctgtgaaaatgtttttaactttttatctaaaagtaaaaacttaatagaaagtaatataattaatttggatatattaagttag

SEQ ID NO: 199680 - DNA, 1056 bp, Unknown
  Bacterial polypeptide expressing nucleotide sequence isolated from the Sargasso Sea
gatgaatgagagatataaaatattatttgaatcagttgagataggcccgaaggtagccaaaaatagattctaccaagttcctcatgcaatggggtctggcaatgatatgccaaacacaagagccgcccaaagaggaataaaagcagagggtggttggggagttgtaaatacaggttattgctcaatacatccttcaagcgatgacaggccacttccttttgcaagattgtggtcagaaaaagacattgaatcccatgttccaatgatagaggcagttcatgagcatgatgctcttgctggcattgaattttttcatggtggtgcctacacagcaaacagacacactcgaatgccgcccatttcaccttccggaatacaacaaaaagtgagtgagctaatggacatgcatctgacggctccaaaagtcatggataaaaaagacattaaagatttaatccaatggcatgtgattgcaacggaaagggccattcaagctggttttgatattatctactgttatgcagggatgggttttttgccgtatcattttcttcatcccacattcaataatcgaactgatgaatatggagggagtcttgagaatcgctctcgactcatgagggaattaatcagtgaaatgaaagaagttgccggcgatagagctgcaattgctgttcgaatgtccactgacgaattgctgacttttaagagtgaatcgagtgaaagtgaggcccatgagttttttgagataaatggtgaatttcccgatttatgggatataaaaatgtcctcttggtttaaagaatgtccgagtggaagattcgctgagtctggtcacatggaaccttataatagtttcgtcaagaaactgacttcaaagcctgtcgtgggagtgggatggtttacttcacctgacattatggctaaacaaatcaatgatggcattcttgattttgtgggtgcagcaagagcatccatagctgatccattcctaccaaataaattaaaagaaggaagagaagacgatatcagagagtgcataggatgcaatatatg

SEQ ID NO: 199681 - DNA, 1462 bp, Unknown
  Bacterial polypeptide expressing nucleotide sequence isolated from the Sargasso Sea
atgtcaagcacgctttttagcgacgatcattggaatggaaaactgttcaccggcatttggaccacgggcagcagcaatagtccagttatcgagccggcgacaggcgcggtgttaggtcaagtagcgatggcagatgcccagatcattcgcaaatccgccgcgacggcacgtgaatgccagaaagcctgggccggcaagtcatacgaccagcgtgccgcaatcttgcgcaggacggctgtggcagctgaacagcactttgaagagattgttaatctactcgtgaaagagagcggttctgttagggcgaaggctcagttcgaggtatcgctgtccatcaaatgtttgcaagagagctcggcgctgccggcgagttcatgtggggaggtcttaccgtcagcgcccggccaactgagtctcgccaggcggaggcctctcggcgtcgttggcgtgatctctcctttcaattttccgatgtacctggcgatgcgtgcggtcgccccggcgctcgcgctagggaacggtgttgtgttgaagcctgacccgcgaaccgctgtttgcggtggttacacgatcgccaggctgtttgaactcgcggaccttccttctggcctgttgcacgttctgccgggggatggcatggtcggtgccgcgctgatcgccgaccctgatatagcaatgattcagttcactggatctacacaagccggtcgaaaagtagcggagtcagcagggcggcatctgaagaaagtctcgctcgagttgggtggaaaaaattcgctgatcgtgctcgacgatgccgatatcgagaccgcagttgcaaatgccgcctggggatccttcttgcaccaaggacaaatatgcatggcgagcggccgcattcttgttcagcggaacatctatgatcgcttcgtcatcgaactcgccacgttagctagctcgctcaaagttggcaacccagcggattccgacgtcgcgcttggcccgttgatcaatgaagcacaattgaatcatgtggcgcatgtggttcgcacggcacgggaaaccggcgcaaaggttatggctggaggcaacgctgacggactcttctatcccgcaaccgttctagccgacgtgtcgccagccaatgatgcgttcaggagtgaaatattcggtcccgttgcagtgcttacgccgttcgacaccgacgatgaagcgattgcgctcgcaaacgataccgagtatgggctctctgccggagtcatcacgcgtgatgttggtagggcgttgcggatcggcgaccagctccggactggtttgttgcatatcaacgatcagaccgtcaatgatgacgtcataaatccattcggtggtatcggagcatcaggcaatggcacgagtatcggcggacctgccaattgggaggagtttacccagtggcaatgggtgactgtgaagggggaagctcccaagtatattttgtaga

SEQ ID NO: 199682 - DNA, 463 bp, Unknown
  Bacterial polypeptide expressing nucleotide sequence isolated from the Sargasso Sea
atgtttagacagatttgacaaactttgtaacgcttcgggtgcaacaaaaacttcagaactaagattatctatgcaaagaacgatgcaatcgaaatgtgcagtttttagaaccgaaaaaacactaaaagaaggaatggatcaaatcagaaaaccttttgaaggaatgtctgatatttcagtttcagacaagtctttattatttaatactgatcttgtcgaaactttagaatttgataatcttattagacaggcgatgacgacaatagactcagcttatcatagaaaagaaagtagaggagctcatgcaagagaagatttcaaaaccagagatgataagaaatatatgacacatactttagcctggcaaaaaggaaatgaagttaaagtagcttacagacctgttcacgcaaaaaccctaaccaatgatgttcaatattttccacctagggagagagtatattaa

SEQ ID NO: 199683 - DNA, 861 bp, Unknown
  Bacterial polypeptide expressing nucleotide sequence isolated from the Sargasso Sea
taaatgaagcgggttttccaccaggggtcataaatattgttacttcttctggccctgaagtcccagcagcgatggttgcatcaaaagatgtcaacatggtcagttttactggatcgacttccgttggtaagtcaatctacgaaagtggagcggcaactatgacacgcgttcttatggagttagggggtaagggtgcactaatcatgactgaggacgccagtgtagatgcggcaatgggagccatagcaagtgtttggggtttccatagtggtcagatttgcaccgcacccacacgagtcatttgccatcgcaatatttacgatcaaacagtagagactctcgaagctgtagcgggaatgctcaagatgggagaccctagagaacgcgatactttagtcggccctttgatttcggagcagcagagagacagtgttgaaaaatttatttcctctggcgttgactcgggcgccaaattagtttgtgggggtgaaagacctgatgaacaaggttattttgtagcacccacacttttggctgattgcacaactgacatgcacgtcgttcgtgaagaagcttttggaccagttgttgtggtgctgccacacgaaaatgatgaagaagcgattgaaatggctaatgactctgactacgggctatttagttacgtgtacgccggggacacagctagagcgcaccatatagctcaaagtttggaaagcggaaatgttgctcttaacagcatccaaccccacatggaagccccttttggaggatttaagatgtccggaataggtcgagatcgcggtacgtggggtttaaaggcctatagcgaacttcaagcgatttcttggttagcttaat

SEQ ID NO: 199684 - DNA, 1339 bp, Unknown
  Bacterial polypeptide expressing nucleotide sequence isolated from the Sargasso Sea
atggaaatagtacctctactgctattaattataatttgcactgctttactagtaggttttccagtagcgcttactttggcaggtgtatcaataatatttgcattgatttgcattcccttaggaatttttgatccgactatctttaaaagtattccaattagaatttttggaattatgaataatgtaactttgcttgcagttcctttatttatttttatgggaactattcttgaaaaatcaggtattgctgcaaagatgcttgaaaatatggcaaaggcttttaaaggactcaagggtgggttgtctatatctataattattgttggtgctttacttgcagcaagcacaggaattgtaggtgctactgtagtaaccatgggtctaatgtccctcccaattctaataaatcaaggatacgataaaagcttttctactgggttggttgcatcaaccgggactcttggacaaataatcccaccatctatagccttggtcttgcttggcgatgttatgtcaaatgcttatcaaagagcccaaaacgatatgggtatattttcccaaaagaccgtaactgttggagatttgtttataggtgctattgttcctggaattctaatttgtattgggtatcttatttatacactatataaaaatagcaataattcaaacataaaagatacttcaacagaattagctatagataaagttgaactatttaagactcttgcacttccaatagttttgatttttttagttctaggttcaatatttgctggtattgctacgcccactgaagcagctgccattggagcatttggcgctttattgattgcattaatcaatagaaaagttaatttaaatttcataaaagaaacttccgagaagactgctgttgtttcaacaatgattttcacaattcttattggtgcttcaattttttcattgatatttagaggagttggtggtgatgagctaattgatctaatttttaactctctgcctggagggtcattcactgctctaatatttgtcttagtaataatttttttgcttggttttattttagattttattgagatttgctatgttatcgttcctcttgttgcgccacctcttttgatgatgggatttgatcctgtatggcttgctattttatttgcaataaatttacaaacgtcatttttaactccgccttttggattctcacttttttatttgagaggagttgctgatgaaaacatacaaactaaagaaatttataaaggtgttgtgccttttatactaattcaaattattattctttttacagttatgttgtttccagttctaataatataag

SEQ ID NO: 199685 - DNA, 742 bp, Unknown
  Bacterial polypeptide expressing nucleotide sequence isolated from the Sargasso Sea
ttgatacaagataaggttgtagtaattactggcgcatctagtggaattggtcattcaactgccaaagcacttgcaaaaaaaggggcaaaaatagttgctggagcaagaagattagatagactagaatctttgaaaaaagaaatcacagatgacggtggagaaataactatttgtgaaacagacgtaaccaaaaaaacagattgtgataatttagttaaacaagcactagacaagtatggaactgtagatgttttggtaaataatgctggattaatgcctcttagttttgtaaaatcactaaaagttgatgagtgggacagaatgatagatgtaaacatcaaaggggtattgtactgcactgctgcagtcgtccctacaatgactgagaaaaaatcgggccatatcattaacatttcatctgttgcaggaagaatcgtctttccagctggaagtgtttattgtgcaacaaaacatgcagtaactgcattctcagaaggtttgagacaagaactttctgtaagaaaaaacatccgagttactagtatagaacctggtgttgtacagactgaattaacaaacacaattactgaagattctctacaaggattcattgaaaaaggtaaacaaatggaagcattacaagcagatgacatatcaaatgcaataatctttgcaattgatgcaccaaatcacatgaacgtaaatgaaattctaatcagaccaactacacaagatcactaat

SEQ ID NO: 199686 - DNA, 592 bp, Unknown
  Bacterial polypeptide expressing nucleotide sequence isolated from the Sargasso Sea
attcagaaaaatattgcagaggaatttattagtaaattggtagatcgagttaataaaattaaggttggcaatcctttagacccaaatactgaagttggtcctttaataagtgaaaatcacttagaaaaggttgtttcttattttgatgtagctaaaagagagggtgcagaaattgctgtcggaggaaaagcgcataagaaaccaggttggtttgtttcgccaaccttatttaaaaatgcaaagtctggaatgagaatttctcaagaagaaatttttggcccggttttaactgctattacctttgaagatgaagaagaagcattaaaaatatcaaatgatgtagaatacggtctgacaggttatatttggacaaataatgtaactagagcattaagattttcagatgagcttgcagctggtatgatttgggttaactctgagaatgttagacacctaccgacaccctttggtggaattaaatcaagtggaataggaagagatggtggtgattggtcatttgaattttatatggaacaaaaacatattggttttgcaactggaaaccatcaaatacctaaattaggtaaataaa

SEQ ID NO: 199687 - DNA, 769 bp, Unknown
  Bacterial polypeptide expressing nucleotide sequence isolated from the Sargasso Sea
aatgtttttaaaaaaatataacttaaaaaataaatacgcattagttactggagctggaaaagggattggaaaagcttgtgcaattgctcttgcagaatctggatgtaatttaattattattagtagaacaaaaaaagatttagattcagttgcaaaaattataaaaaaactcaaagtaaaatgtaaaacatacgcttgtgatataactaattataatcaaataaaatcaatagttaatcagcaacaaagaattgatattttggtaaataatgcaggaaacaacattcctgaacattttacaaaggttaaaactaaaaacatggaatatttggtgaagataaatactattgcagcttttaatgtagctcaattgtgtgcattaaaaatgataaaacttaaaaatagaaaaaaaattggtgcatcaattattaatatgtcttcacaaatgggtcatgtgggaggtccaataagaagtgtttacaatatgaataaatggggtttagaagggttaacaaaaggcatggctgtagatttagctaaatacaacataagagttaatacagttgctcctacttttgttgtaacaccaatgactaaaaaattcttaaaaaaccaaaaatttagaaaagaaactttgaataacattcccttaggaaggtttgcggaaatgtcagaaatagcatctacggttgtttttttagcatctgacgctgcttcaatgatacatggaacttctatattagtagacggcggatggactgcaaaataa

SEQ ID NO: 199688 - DNA, 457 bp, Unknown
  Bacterial polypeptide expressing nucleotide sequence isolated from the Sargasso Sea
gaggccgcggtcgaagcgttagcgccgcttgagagaggtgtcacggagaggaatccgttccagcttcaacttgaacttcagactatgatgcaggacaaggtcggtattgcacgcgaagataaggggctgacagatgctatcgggttgatccgggaaatctctagccagattgccgatgtaggagccgggggcaacaggtggtacaaccctggatggcacactgcgctcgacatgaagcatctactgactgtgtctgaggcgatagcactttcggctcgcgaacgaaaggagagtcggggggcgcattctcggctcgaccacccgaacaaggaggagggttggtctaccttcaaccatgtggttcgtaaggggccggatggggagatggtcatagagcgtcaagaaatccctccaatgcgtcaggaattgcaagacatcatcgaggaggaaggttgat

SEQ ID NO: 199689 - DNA, 760 bp, Unknown
  Bacterial polypeptide expressing nucleotide sequence isolated from the Sargasso Sea
aatgtatttaaaaaaaataaatttaaaaaataaatatgctttagtaactggtgctggaaaaggccttggaagagcttgctctattgcattagctgaagcaggtgcaacagtaataggtttaagtagaactcaatcggatcttgataaacttcaaaaagatataaaaaaagttaaaggaaaattaattaaaattaattgtgatgtaatgaattacagtgatttaaaatttaaaatagaaaaaataaagtttattgatgttttggttaataacgcaggaacaaatattcctgaaccctttgaaaaaatacaacaaaaaagtatgaactatattgtagatttaaatttgaaagctgcatttaatgttgctcaattagtagtaaaaaaaatgttaaaaaataaaaaaagaggtggatcaataattaatatgtcatctcaacttggacatgtgggtatgcctggtagaaacgtatataatatgaccaaatttggcattgaaggtttaaccaaaggaatgggtgtagagcttgcagcaagaaatataagagtaaactcagtagcgccaacttttgttgaaactccaatggtaaaaaagttttttaaaaataaaaaatttaaaaaacttgctataggaaacattcctatgggtaaagctgctaaagaaagtgacgtttcgactgcagtttgttttttggcatcagatgcagctgcaatgattactggaacatctattttaatagatggtggttggaccgctaaataa

SEQ ID NO: 199690 - DNA, 700 bp, Unknown
  Bacterial polypeptide expressing nucleotide sequence isolated from the Sargasso Sea
aggatacgaagttgcaatattaactgtggatgtcccagtactatccagacgaactagagatgataaaaatggtttctcctaccctttcaagattggtccaaaacaattttttgattttgcaactcatcctacttggtctttatcgactttgctaagcggcattcctaaaccaatgaactatgttacatctaaaagtggagatggtatttttaaaagaaaagaaagtagaggctctacagattgggatacacttaaaagagtaagagataaatggaagggtaaacttataattaaaggagtaatgtctcctgatgatgcaaaacaaataaaagaagctggtgcagatgcaattcaagtttcaaatcatggtggtagacaattagatagtgctacagcagctataaatatgcttccactaatcagaaaatcagtaggaaacgattttcctttaatttttgatagtggaataagaagtggaagtgatattgtaagagcacttgcatttggtgctgattatgcaatgattggtagacccgtgatgtatgcaatgggagctgatggaaaaaagggattaaggagaattgtggaaataatcaaagaagaagccagcacaacacttgggttagtaggattaaacgatattaatgatgtaacttctaatatagtaatagatagtactgtaaataaggtaaattactaa

SEQ ID NO: 199691 - DNA, 1126 bp, Unknown
  Bacterial polypeptide expressing nucleotide sequence isolated from the Sargasso Sea
agtgccagaggcaagtacaaaagatgtggatagagctgtaaaagctgcacaaaaagcatttgaaggtgaatggccaaaattacttccaagagatagagctaaatttttaagagcaattggggatcagttaagaaaaaatgctgagatgcttggtaaggttgaaaccatagatactggaaaactttttagagaaacgaaacaacaagcaaactatattgcagaatactatgattattatgcgggtttagctgataaagttgaaggcacagttcttccaatagacaaaccaaatgttcaagcaataacaacgagaatacctattggagttgttgctgcaatcattccatggaactctcaaatgttcttaacagcaactaaattagcccctgcccttgcaatgggaaatactgtggttataaaatcctcagagcttgcacctgctgttttgtttgaatttgcaaaacttattgagaaaactggcatacctaaaggagtggttaatgtcattacaggttttggcgatccttgtggtaaaactttaacaacacataatctagtagagaaaattgcatttactggaggaccagaaactgcaagacgtattattaaaaattcagcagaaaatctctctgaagtaagtttagagcttggtggaaaaagtccagtcgctgtatttgacgatgcggagcaagaaaatgcaattaatggaataactgctggaatttttggagcaagtggacaaagctgtattgcaggttcaaggctttacatacaaaaaggaatttataacgaatttttagataagctttctagtaaagcttccaaaataaaaataggagctccgatggatctagatacagagatgggtcctttaagtagttttaaacaattagagacaattgaaaaaaatataaaagatacaattgatcaaggtggaaaaattaagtgtggtggtaaaagagactccttttctaacaaaggatactacttcccaccaacaattatagaatgtgataatcacaatctgccaactgcagaaaatgagttatttggacctatattatcagtaatgaaatttgaaacagaggaggaagtaattaataaaatgaatgataataaatatgga

SEQ ID NO: 199692 - DNA, 1099 bp, Unknown
  Bacterial polypeptide expressing nucleotide sequence isolated from the Sargasso Sea
atgtcaccttcggctctgccgtcgtcgtcaccttcggatgcaccgtccgactccccatcgaacgcaccgtcaagtgctccgtcgcatatgccgccgatgtcaccttcggatctgccatcgtcgtccccttcggatgttccgtccgatgctccatcggcagctccctcgaatgcgccatctcatctaccatcaatgtcaccttcggctctgccgtcgtcgtccccttcggatgctccgtctgatgctccatcgaacgcaccgtcaagcgctccgtcgcatatgccgtcgatgtcaccttcggatctgccatcgtcgtccccttcggatgctccgtccgatgctccatcggcagctccctcgaatgcgccatctcatctaccatcaatgtcaccttcggctctgccgtcgtcgtcaccttcggatgcaccgtccgactccccatcgaacgcaccgtcaagtgctccgtcgcatatgccgccgatgtcaccttcggatctgccatcgtcgtccccttcggatgttccgtccgatgctccatcggcagctccctcgaatgcgccatctcatctaccatcaatgtcaccttcgcctctgccgtcgtcgtccccttcggatgctccgtctgatgctccatcgaacgcaccgtcaagcgctccgtcgcatatgccgtcgatgtcaccttcggatctgccatcgtcgtccccttcggatgctccgtccgatgctccatcggcagctccctcgaatgcgccatctcatctaccatcaatgtcaccttcggctctgccgtcgtcgtcaccctcggatgcaccgtccgacgccccatcgaacgcaccgtcaagcgctccgtcgcatatgccgtcgatgtcaccttcggatctgccatcgtcgtccccttcggatgcaccgtccgactccccatcaaatgctccgtccgcgaagccgtcaattgatggcgaaactgcaaacaacgccgggccccctggtaatcctgatttcactggaggcaacctttttggaaacaacgcccctggcggggcaagcgggggcacctttacctctaacggcggtagtgcaaatgacgtcagacgaagatgat

SEQ ID NO: 199693 - DNA, 450 bp, Unknown
  Bacterial polypeptide expressing nucleotide sequence isolated from the Sargasso Sea
gatgtcagtttaccaggaaatcgagcacgatgttctcgtcatcggcgcgggtggcgcagggttgcgagccgccgtcgaagctgcttcggctggtgtcaatgttggtcttgtctgcaagtctctgcttggaaaggcccacaccgttatggccgaaggagggatggcggcatcgttggccaacgttgacgagagagatggatggacgacgcactttgcggatacaatgagaggcggccagtacctcagcagttggcgcatggccgagttgcacgcgaaggagtcccccgagcgtgcccgagaactggagaagtggggtgccctttttgatcggacgcccgacggaaaaattctccagcgtaacttcggtggacataagtacccgaggctcgcacacgtgggtgatcggactggccttgagatgatccggacacttcaggatcacggttccat

SEQ ID NO: 199694 - DNA, 769 bp, Unknown
  Bacterial polypeptide expressing nucleotide sequence isolated from the Sargasso Sea
atgtatttacaaaaatttgaactcaaaaacaaaactgccttagtaacgggggcaggaaagggaattggaaaggcttcagctatagctcttgctgaagcaggagcagatttaattattgtaagtcgaacacttaacgatttaaataaggttaaaaaacaaatcaataagttaaaaagaaaatgtactgtcttcgaatgtgatgtttctaatgctgcagaagtaaagtcagtttttaaacaaataaactcacttgatattcttgtaaataatgccggaaccaatcgaccagaccattttactaaaattaaaaaagaagatatggattatgtagtcgatttaaacatcaaggctgcttttcatgtagctcaaatggctacaaaagtgatgttaaaatcaaaaaatagaaaagttaaaggtggatcaattatcaatatgtcatctcaattaggtaaagttggtgctcccattagaagcgtatataatatgactaaatttgggatcgaaggcttaacaagaggcatggcattagatctagccaagaataatatccgggtaaatactatttgtccaacatttgtagaaacgccattggtaaacaatttctttaaagataagaaatttaaaaaagctatgatggataatattcctcttggaagattagctacagatagtgatatcgctacagccgttgtttatttagcatcaaatgcttcttcaatgattacgggctcctcacttgttattgatgggggatggacagctaaataat

SEQ ID NO: 199695 - DNA, 1108 bp, Unknown
  Bacterial polypeptide expressing nucleotide sequence isolated from the Sargasso Sea
tatgaaaataaacaaacaagatggacctccagaagatcttctatactttgatgaagatttaaacctttctcaaaaacaagtcgaagatgttgttgaaatattcaaaactccgctaacaggatcatataattgggattattcaattgcagataacagaattaaaaaattatatgagcttggaaaggagctaaattggaatggttctattgatttaaattgggattatacccatcctgttgacgaaagaattgttcagccagacgaagagttgccccatgaaactctagaggcttataacaatttatccgatgaggagaaaatactttttgatcgtcatagtactgctgagcttatgagtcagtttttgcatggagaacaaggtgcccttttagttgcttctcaacttgcaagttgcgcaccaacttacaatgcaaaattatatgctgcatctcagacttttgatgaggcaaggcacgttgaagttttcaacagatatttgcaagaaaaaattggtattcattatcctatcaaccctaacttaaaacttttattagacaaaatattaactgatgaaagatgggaccttaaatttataggtatgcaaataattatcgaaggattagctctggcagcctttcaaatgctcaaatcaattacaaaagaccctcttctaaaacaattacttcattatgtggtacgagatgaagcaagacatgtaacttttggcattaattatcttgaagattacttaacaactttatctcctgaggagatcaatgaaagagctcaatttgcatatgaagcctgcgtgatttcaagagatagattaattaatacaaaagctgagcaaagatttttaaaaatgtctgaagaagaagctagagagttttcgctaaatactggaagttttgaattattcagaaacttcttattttcaagagttatgcctaacctaaaaagaataggcttgcttactgacgaggttagaccaaaatttgaagctcttggcttgcttgaatacgaacatgcaccagatgactttgaatgtgactgggctgagatgagaaagccacttgaaaaatttggtcaaataccaacatctttataa

SEQ ID NO: 199696 - DNA, 835 bp, Unknown
  Bacterial polypeptide expressing nucleotide sequence isolated from the Sargasso Sea
atggagaaagttgcagttgtaacagggagttctagtggaattggatttgaaacatctctagcattagcaagagaaggttatttcacatatgcaacaatgagagatgtaaaaaaagcagataaaatacagaaaattgcagatgaagaaagtctttcattaaaagtcatagaattagatgtggatgatgaagaatctgctgaaaatgcaataaatacaatgattcaagaaaaaggcagagttgacgtattagtaaacaatgctggatggggaatatggggaactggagaagatgtttcagtagaggaatttaaggagcaatttgaaacaaactttttttctgttgtaagaatgatacaaaaagttgcaccaacaatgagaaatcaaggttcaggaaatattgttaacataagttcagttgcaggaagaataggattaccagcatcaactgcatatgtcagttcaaaatttgcagtagagggtctttcagaatcacttagatacgaactgggacagtttggggtaaatgtaataattattgagcctggcgtaatcaaaacaaacttttttgattctatgaaaactgcaaaaaaggcagatgaaggcggagcatacagagacataacaatcaaagtgataacaggagtgaagatgatggcagaaatgggaacatcaccaaaagaagtagcacaagtaatcatcaaatcactaaaagaagaaaaaccattaccgcgatacattgttggaaatgacgctgctatgtttatggaatctaaaaagatgaaaacagatatcgaatttgagaattacatgaaaaaagagctttacagtgagtaat

SEQ ID NO: 199697 - DNA, 324 bp, Unknown
  Bacterial polypeptide expressing nucleotide sequence isolated from the Sargasso Sea
aaataagaaaaacatttgatggaatggactctttatcggttaaagataaatctttaatatttaatactgacctagtagaaactttagaatttgataatttgataagacaagctgttgtgacagttgactctgcctatagtagaaaagaaagtagaggagctcatgcaagagaagattatccaaaaagagatgatgagaagtttatgcaacatacattagcttggtgtgatggaaaaaaatcaaaaataagttatagagatgttcataagtctacgttaaccaatgaagtacagtattttccacctcaggagagagtatattaat

SEQ ID NO: 199698 - DNA, 1117 bp, Unknown
  Bacterial polypeptide expressing nucleotide sequence isolated from the Sargasso Sea
tgttggatctgaagttgacagttggtctataagacagccattaggtgtttgtgcaggaataactccatttaattttcctgctatggttcctatgtggatgtttcctatggcaattgcttgtggaaattcatttatacttaaaccttctgaaaaggatccatcatgttcatttaagttagctgaattgttatcagaagcaggattacctgatggggtgcttaatgttgtaaatggagataaagaggtcgttgattcgattttagaaaataaagatattcaagctgttagctttgtcggctcaacaccaatagctaaatatatttacgaaaatgcagctcgtaatgaaaaaagagtacaagcattgggaggagctaaaaatcactgtgtagtaatgccagattgtgacttagatcaagctgtaaatggtctaatgggagcagcttacggatctgcgggggaaagatgtatggcacagtctgttgcagtagctgttggagatattggtgatagattagtggataaactctcaaaaaaagttgaagttttaaaagttgggcctggtatggataaaaattcagaaatgggacctttgattacaaaagaacatttacaaaaagtaagagggtatgttgatattggagttaaagagggagcaaaacttgtagtggatggaagaaatttaaaacttcaaggctatgaaaatggtttttttataggtggctgcttatttgataatgtaaaaaaagatatgagaatttataaagaagaaattttcggacccgtgctatcagttgtaagggctaaagattttgaagaggcctcaaaactagtaaatgaccacgaatatggaaatggtgtgagtatttttacaagagatggcgatgctgctaggactttttcaagcaaaataaaagttgggatggtaggtgttaatattccaatacctgtgcctatggcattccatagctttggtggatggaaaaggtcactgtttggtgatcagcacatgcacggacctgagggtgttagattttatactaaacttaaaactataacttctaggtggccttctggaataagatcaaatcctgaatttgtaatgccaacaatgaaataa

SEQ ID NO: 199699 - DNA, 631 bp, Unknown
  Bacterial polypeptide expressing nucleotide sequence isolated from the Sargasso Sea
cgcggtggagcgattcggccgcatcgacgtgctggtcaacaatgccggattcggtttgctgggtgcgatcgaggagtcaagtgatgccgacgtgcgccgcatgtacgacaccaacgtattcggcctgctgaatatcacgcgcgccgttttgccggtgatgcgcgcgcagcgctcaggacacgtcgtcaacatgtcgtcgatcggcggctatcggtccgccgccgggttcggcgcgtattgttcgaccaagtttgccgtggaaggcttgaccgaggcgttgcacgccgaactgaggccgctcggcattcacgccacggtcgtggagcctggttatttccgtaccgacttcctcgacgcgtcatcgcttgtggtcgccgggaatgtcatcgccgactatgacgagacctcgggcaatgtccgccgtcgcgccgcgagcctgaaccacaaccagccaggcaacccggagaaactcgcggcggccatgatcgaactggtccatgcaccaaccccgccattgcggctgccgcttggcaccgacacgctgaaggccattgctgaaaagaatgcctacgtggcgcaggaaacggaaacgtgggcggcgttatcggcgtcgactgactttcctggctga

SEQ ID NO: 199700 - DNA, 2327 bp, Unknown
  Bacterial polypeptide expressing nucleotide sequence isolated from the Sargasso Sea
actgggaattgatatagttaaagcccagtttctcttagcagctggtgctaaaattggtgatgatatatgtggtgtaccacttcaagaaaatatacacatgaaaggtcacgccatccaatcacgagttacaacggaggatgcagccaatgattttgcaccagattatggaaaaattaatgtttatagatctgcgagtggtcttggaataaggctagatgctggaactgcatcaacaggtacaattatcacaccatattatgactctcttttggtgaaagttactgcaaaaggtcaaactcctattgaagctaagagaagaatgaacagagctttaagtgagtttcgagtcagaggtgtaaaaacaaacataccttttttattaaagttaattaatcacgaaggcttcgacatttttaaataccatacaaaatttatagatagtgaaaaaagtttatttcaattctctggtcgaaaagatagagcaactaagacattaaattttttggcagaagttattgtaaatggaaatccagaagttgctaacagaccacgattaagagagaccacaccggcaaaactctctgactacggaatttctagatcaaaaaaagcacaagagacagtaaataatacatataaacaaattttagatgctgaaggtccatctgctgttgctcatgctgtattaaaagaaaaacaattactaatcacagacactacttttagagacgcccatcagtctttgatagcaactcgaatgagaactcaagatatgttaggcataactgatttatacgaagaaagacttaagaatttattctcagtagaatgctggggtggggctacttttgatgttgcattaagattcttaaaagaggatccgtgggaacgtttagaaaaattacgtgaacaaatgccatccgcattactacaaatgttatttagagggtctaacgcacttgggtatacaaactatccagataatgttttaagaaggtttattcagctttctgctcagtcagggattgatgtttttagaatatttgatgcattaaactggatagaaaatatgagagtgtctattgatgaagttttaaaatctggaaaaatttgtgaagcttctatttgttattctggtgatctatcttcacctgcagaaaaaaaatatacacttgaatattatttaaaaatggcccaaaaacttgagaaaatgggagttcattttcttgctattaaagatatggcaggattatgtaagcctaaggctgcaaaaatcttatttaaagaattaaagaaaaacataaaaatcccaattcatttccatacacacgatacaagtggaaacggcgttgcgacgttgcttaatgcctctgatgctggagtggatatagttgatgtagcaattgactcttggtctggttttacctcacaacctagcttcggcgcagttcttgaatcacttgatggaaacaacagagacccaaaaatatcttctgctgttgttaggactgcagcaaattattgggaaggtgtaagaaagcaataccagcctttcgaaagtaaaactcgaactagtatgtctgaggtatatttacatcagatgccaggtgggcaatatacaaatttaagagagcaagcaagatcaatgggcatcactgatgagagatggccagaattagcatcaatgtatgcagaggttaataaaatatttggagatgttattaaggttacacctatatctaaagttgttggtgacatggcaatttacatgttggcaaataatattcaaattgaagatgtcttagaccccaaaaaagatgttggttttcctgcatcagtaattgagttttttagtggtcgattaggtcaaccatacaaagggtttccaaaagcactccaaaagaaaatcttaaaaggaaaaaaaccaattaattatagatttggttcaaaactcccttctttaaaaattaaaaacagaactaaagaattagagaaaaactacaatgagattatttctgagaaagatacaatttcacaaatattttttcctgaagtttttgatgagtatatgaaacataaaaagaaatttggcaacactagtgttatcccaacttcaaattacttttttggtatgaatacggatgaagaaatatatgtctctattgaacccggaaaaacattaatcattagatacttcactttaagtgaacccaacgaaaaaggttttagaacagtttattttgaattaaatggtcaagctagatcagttgacattaaagacaactccatagcagtagacgatttagctaaagaaattgcagacccaa

SEQ ID NO: 199701 - DNA, 1492 bp, Unknown
  Bacterial polypeptide expressing nucleotide sequence isolated from the Sargasso Sea
catggcatcaatcattcaccattggattaacggcgaacttcagccttcaagtgctgaacgatacggggatgtgtttaatcctgcaaccggccaagtcagtgcctctgtttcaatggggaattccgatgatctaaacaaagcagttgagtccgcctcagaagcatttaagagttggtcacaaacatccgtcacaaaacgagctcagatctttttcaaatacaaagagcttctggaaacaaacagagaagagttaatagagctcattacccaagagcacggtaaggtcgcctcggatgcagccggctctttgcaaagaggcatcgaagtggttgattttgtatgcggcattcctcatctccttaagggagaattcagtgagcaagttggaacgggaatcgattgctattctactcgacaaccgattggagtctgctccggtgtgacgccctttaattttcctgccatggttccaatgtggatgtttccaattgccattgcatgcggcaatacttttattttaaagccttcagaaaaagatccttcttgcgccatgaaacttgcagagcttttgcaggaggctggattgccaaaaggggttttgaacgtcgttaacggcgacaaggaagtcgtcgatgcaatattggatcacccttccatcaaaacattcagttttgttggatcaactcctgtcgctcagtacgttcatgaaaaagcttcagccaatggaaagagagtgcaggcattgggtggagcaaagaatcatgccattgtcctcgaggacgcatcccttgagcaaacaaccaatgcaatcattggtgctgcatatggctctgcaggtgagcgatgtatggccatttctgttgtggttgttgttgaaggagttgcagatgaattatgcaaacttctgtctgagaaagcctcagcactgaagattgggccagggaatgaagctgaaaatgaaatgggtccactgattaccaatgaccataaaaacaaagtcattgattacatccagcaaggcatagattcgggtgccaaaattttactcgatggacgcgagcacgaaatgacaaacaagcctggtttttttctaggcccgactctgttcgatggcgtcagtccagagatgagtatctacaaagaagaaatatttggcccagttttggttgtgctcagggtcaaagactttaatgctgccattcgattggcaaatgaacatcaatttggaaatggagtagctattttcaccaatcaaggctcgaaagccagagagtttgttcattcagttgaagtgggcatggtcggcatcaatgttgccatacctgtgccgctctctttttatacctttggcggttggaaagattctatctttggttcatccaatatctacggaatggatggcattaggttttttaccagaactaaaacagtcacagccagatgggtcgatgatgatgaaacaatcaatctctcgatgccaacggtcgaataa

SEQ ID NO: 199702 - DNA, 238 bp, Unknown
  Bacterial polypeptide expressing nucleotide sequence isolated from the Sargasso Sea
agaatttgataatttaattagacaagctatcacaacaatggactcagcatatcatagaaaagaaagcagaggagcgcatgcaagggaagattttcccaaaagaaatgatgaaaaatttatgcaacacactttatcttggtgtgatggtgtaaaaactaagatagattatagaccagttcataaatcaacattatcaactgatgtacaatattttccgccacaggaaaggatttattaa

SEQ ID NO: 199703 - DNA, 802 bp, Unknown
  Bacterial polypeptide expressing nucleotide sequence isolated from the Sargasso Sea
atgtatatcatactaggaactaaaaataataaaagaattcaagctcttgggggagcaaaaaatcatatggtaataatgccagatgcagatgttgataaaacaacagatgctataatcggttctgcatttggatcagctggtgaaagatgtatggctatatcagtggcggtatgtgttggaaaagagacaaataaaaatataaaaaaaacattattagaaaaaacatctaaattaaatgtaggaccatatactgatgaaaaaactgactttggaccattaagtagtgaggcccactacaaaaaagttttaggatatattgatagtggagaaaaagaaggagcaaaattactttcagatggaaggaattttaaaaaacaaggttatgaaaacggttattttgttgggccaactatttttgatgatgtaaaacctgatatgaaaatttataaagaagaaatatttggacctgtattaagtatgatgacaacagaaaaatatgaggatgctttaaaattagttaatgatcatgagctaggaaacggagcagcagttttcaccaaaagtggaaatatagccaagcattttactgaaaatgctaaaattggaatgataggcgttaatgttccaatacctgtgccagttgcttatcacagttttggtggttggaagagatctctatttggagatcattcaattcacggacctgatggagttaggttttatacaaaattgaaaaccgctacaattacttggaatgaagataattctggtccagaatttactatcccagttctatcttagt

SEQ ID NO: 199704 - DNA, 634 bp, Unknown
  Bacterial polypeptide expressing nucleotide sequence isolated from the Sargasso Sea
gattcaaaaaaattatctgaagaaattggtgaaggcgttgattatatcaaatgtgatgtaaggcttgaggatgatattatttctgtttcagaaaaagcttatgaaatgtgggatcaggttgatgtgttggttaacaatgctggatctgaactcaatcagtcctatgataagatgacggaggcagaatgggacaatgttcttaacacagatctaaaagggccttggttaatgtgtaagcacattgtaccaaagatggtagaggcaggatcaggaagtgttataaacatttcttctttaaatggtttagttggttttcctctttcaactgcttacggaagtgccaaaggcggattagtagtatttactcgcgatatggcgattgagttagcttcgactggtgttagaattaactgtgtttgtccgggtgttatccaaaccggtatgatggaaagatggacagatcttatgcctgataaagctgaggcacaggaaatgctgaggaacacaatgccgattggaagaatgggaactgcagaagaagtggcaggtgcaatcttcttttttgcttcagatgattccagtttatgccaaggatctgttttgagtgttgatggtggatttactgcacagtaag

SEQ ID NO: 199705 - DNA, 1483 bp, Unknown
  Bacterial polypeptide expressing nucleotide sequence isolated from the Sargasso Sea
aatgagtaagcttaaacaatataaaatgtacatagatggggaatgggtagactctgatactaagaaaacttttgaaactttaaatccagaaaataataaaccttgggcagtggttcctgaggcaagtgcaaatgatgttgatagagcagtgagagcagcacaaaaagcatttgaaggagaatggccaaagttgcttccaagagaaagaggtaaatatttaagagcaatagcagacaaacttagaaataacgctgagttacttggagaaattgaaacaattgatactggaaaattatttagagaaacaaaaaaacaagcaaactatattgcggaatattatgactattacgcaggaatggcagacaaagttgaaggaacagttttacctatagataaaccaaatattcaagcaataactactagagttcctataggtgttatagctgcgattattccttggaactcgcagatgttattaacagtaactaaacttgcacctgctctagcaatgggaaataccgttgttataaaatcatctgaactagcacctgctgtattatttgagtttgcaaaattagttgaagaaactggaataccaaagggtgttgtaaatattattactggttttggagatccgtgtggaaaagctttaacaacacataacctggttgaaaaaattgcttttacaggtggaccggaaacagctcgacaaataataagaaattctgctgaaaatttatctgaagtaagtttagaacttggaggaaaaagtccagtagctgtatttgatgatgctaatcaagaaaatgcaattaatggaattaccgcaggtatttttggagcaagtgggcaaagttgtatcgctggttcaagattatatttgcaaaaaggaatttatgatgaatttttagataagctagtaaagagagctgaaaaaattaaaataggagcaccaatggatccaaaaagtgaaatgggtccaataagtaattttaaacaactagaaataattgaaaagaatatcaaacttacagtagaacaaggaggaaaaattaaatgtggtggtaaaagacattctttttcaaatgaaggctattattttcctccaacaattattgagtgcgataatcataatttaccaacagcagaaaatgaattatttggtccaattttatctgttatgcaatttgaaaaagaagatgaggtaattaataaaatgaatgataatcaatatggtctttcctcgggggtttatactagtgattttgcaagaggtatgagggtttctaaatcaatcagagcaggaataacttttgtaaatacttatagattgatttctccatctgctccatttggaggtatgaaagatagtggatatggtaaagaagctggaatagagtctataaaagattacacaagagtaaaaacaacttggtattatacgtctgatgaaccgacgttagatcctttctcaatgagatag

SEQ ID NO: 199706 - DNA, 1234 bp, Unknown
  Bacterial polypeptide expressing nucleotide sequence isolated from the Sargasso Sea
aatgcgagacccacgctacgatattctatttgaaccagttaaaattggacctgttacagctcgaaatcgtttttatcaagttccccactgtaatggaatgggatatgttcgtccaaatagccttgccaaaatgagagaaataaaagcagaaggaggatggagtgttgtctgcactgaagaggtatggattcatcatagttctgaaatcgttcctcatgctgaaggcattttatgggacgacggagatatcccagccttaaccaaaatgacggaagcagttcataaacatggatcgcttgcaggaatagagctccagcatggaggatatagtagttcaaacaattacagcagaatacctccaattgctccaagctcaattgtttccagcacatacaatcctgtgcaggcaagagcaatggacaagagagatatcgccaattttagaaaatggcacaaaaaagcagcattgagatctaaacaagctggctttgacctaatatatgtctatgctgcacatagcggtacactcttgactaatttcctttcccgaatgattaataaacgtaccgacgaatatggaggcagcttggaaaaccgtgtccgcctctttcgcgagttaattgaagatacaaaagatgcggtgggtgatacttgtgctgtagcagttcgatttgcggtagaagaatttctaggaccaacgggaattacttcagagaatgaagggaaggagattgttgaaatgcttgctgaattacctgatctctgggatgtaaatattagtgattggaatatggattctgctccatcaagatttgaaagtgaaggttaccaagaatcatatatcagttttgtaaaatcactcactacaaaacctgtggttggagttggtcgtttcacttccccagacacaatggtctctcaaattaagcgcggagtgatggatatgattggtgccgcccggccctccattgcagatccattccttccaaaaaaaattgaagagggaagaataaatgaaatcagggaatgtatcggttgcaatatctgtgtgatgggtgatcagttttctgtcccaatccgttgtacacaaaatcctacaatgggcgaagaatggagacgtggttggcatccagaaaagattgaaccccgcaaaagcgacgatgggattcttgtagttggtgctggaccttcaggactagaatgctctcttgcccttggccaacggggataccga

SEQ ID NO: 199707 - DNA, 1447 bp, Unknown
  Bacterial polypeptide expressing nucleotide sequence isolated from the Sargasso Sea
atggctaacgtgacttatacggatacgcaactgctgatcgacggcgagtgggtcgacgccgcgagcggcaagacgatcgacgtcgtgaacccggcgaccggcaagccgatcggcagggtggcccatgcgggcatcgccgatctcgaccgtgcgctcgccgccgcgcaaagcggcttcgaggcatggcgcaaggtgcccgcgcacgagcgcgcggcgacgatgcgcaaggcggccgcgctggtgcgtgaacgcgccgacgcgatcgcgcagctgatgacgcaggagcagggcaagccgctcaccgaagcgcgcgtcgaagtgctgtcggcggcggacatcatcgaatggttcgcggacgaaggccgccgcgtgtacggccggatcgtgccgccgcgcaacctcggcgcacagcagacggtcgtgaaggagccggtcggcccggtcgccgcgttcacgccgtggaatttcccggtcaaccaggtcgtgcgcaagctgagcgccgcgctggcaaccggctgttcgttcctcgtgaaagcgccggaagaaacccccgcgtcgccggccgcgctgctgcgcgccttcgtcgacgcaggcgtgccggccggcgtgatcggcctcgtgtacggcgatccggccgaaatctcgtcgtacctgatcccgcacccggtgatccgcaaggtcacgttcacgggttcgacgccggtcggcaagcagctcgcctcgctggcgggcctgcacatgaagcgcgcgacgatggagctgggcgggcacgcaccggtgatcgtggccgaagacgccgacgttgcgctcgcggtgaaagcggccggcggcgcgaagttccgcaacgcggggcaggtctgcatctcgccgacgcgcttcctcgtgcacaacagcatccgcgacgaattcacgcgcgcgctggtcaagcatgccgaagggctgaaggtcggcaacggcctcgaggaaggcacgacgctcggcgcgctcgcgaacccgcgccggctgaccgcgatggcgtcggtcatcgacaacgcgcgcaaggtcggtgcgagcatcgaaaccggcggcgagcggatcggctcggaaggcaacttcttcgcgccgaccgtgatcgcgaacgtgccgctcgatgcggacgtgttcaacaacgagccgttcggcccggtcgcggcgattcgcggtttcgacaagctcgaagaggcgatcgcggaagcgaaccgtttgccgttcggtcttgccggctacgcgttcacgcgttcgttcgcgaacgtgcacctgctcacgcagcgcctcgaagtcgggatgctgtggatcaaccagccggcgacgccgtggccggaaatgccgttcggcggcgtgaaggactcgggctacggttcggaaggcggcccggaagcgctcgagccgtacctggtcacgaagtcggtgacggtgatggccgtctgac

SEQ ID NO: 199708 - DNA, 1912 bp, Unknown
  Bacterial polypeptide expressing nucleotide sequence isolated from the Sargasso Sea
atggaccgcgatagtcgttatgatattttatttgatactgttgatataggcccagtcaaatctaaaaatcgtttctatcaagttcctcattgcaacggtggtggttatagagatccatctgctgcagctgaaatgagaggaataaaaagccaaggtggatggggcgttatatttacagaacaatgtgaaatgcaccactcttcagaaattacaccttttattgaattacgattgtgggatgatgccgatattccgatgatcgcaaaaatggctgatagaatgaaggaatatggtgctctagccggcattcaactagcttattctgggatcaatggtcctaatttgtacacaaaggaagttcccttagctgtcaccggaatgcctattcgtactttcaccaatgatcctgtcagtgcaagatcacttgataaagaagatataaaaaatcttcgacgttggtttgttaatgcagctaagagatctaaaactgctggttttaatttgatttgtttgtatggtgctcatgggtttggaatctttcaacattttttatctacggcaactaaccagagaacagatgaatatggaggaagtttaaaaaacagggcaagatttgtaaaagaagtagttgaggaagttagaaatgaagttggcgataccatgggtatcactcttcgtttatcattagatgaaatgattggtgatcttggttttgctaattcagaagtaagagactttgttgaaatgcatcaggacttgcctgatctatgggacttagcgcacggtgcatgggaagattgttctggtccatcacgttttaaagaagaagcggcacaatttgaacttgtcacaggaatcagaaaacttacttccaaaccaatagttggtgttggtcgatttacaagccctgatgtaatggttaaacaaataaaatcaggcacacttgattttataggatgtgctagaccatctatagctgatccttttttaccaaaaaaaatagaagaaggacgtatacaagatattagagaatgtattgggtgtaatatttgtattaccggtgatatgacaatgtcaattagtaggtgtacccaaaaccctacctttatggaagaatggcgtaaaggatggcacccagaaattatagatcctaaaggtaagacatcaaaagttttggtgattggatctggacctgctggtttagaagcagccttagcatgttctaataggggttatgatgttactcttactgaggcttctaaaattttaggaggcagagttgcaaaagagagaaaattacccggactctctgcttggggaagggttgcagattatagacagtatcaattgtctcaaaaacctaacgtagaaacttacttagagtcatctttaaatgctgatcaggtgttagaatttggatttgaaaatgtttgtatagctacaggttcaacttggagagcagatggtgtctcacgacagcacgttgtgccaattgtaaatgataactcaataaacttatatacacccgatgatattatgaatgataaattaccaacaggcaaagttgttatttatgatgatgatcattattatatgggtggcgttattgcagagaaattaatagaaaaaggttgtgatgttactttattaacaccctgtgcttatgtttcagaatggtctattaatacgttggaacaagcagaaattcaaaaaagattaattgaaatgggagttgagattgaattgaatagaggtttagttgcaatttctaattcaaagttaatttccaactgtacatatacgcaaaatgaaaaagaaattgaaacagataatttagttatggttgcatcacgtaagcctcaagatcaattgtacaaagatcttcttttgaaaaaaacaatatggaatgatg

SEQ ID NO: 199709 - DNA, 1450 bp, Unknown
  Bacterial polypeptide expressing nucleotide sequence isolated from the Sargasso Sea
tgatggggaatgggtagactctgaaacaaaaaaaacttttgaaactttaaatccagaaaataataagccatgggctgtagtcccagaagcaagtgcaagtgatgttgatagagcagtaaaagcagcacaaaaagcatttgaaggagagtggccaaaattattgccaagagaaagaggaaaatatttaagagcaattggaaataaattaagagaaaatgctaaattgcttggtgaaattgaaacaatagatactggaaaactttttagagaaacaaataaacaagcaaactatattgcagaatattatgactattacgctggtttggctgacaaagttgaaggcacagttttaccaatagataaaccaaatattcaagctatgacaacaagaatacctattggtgttattgctgcaatagtaccttggaattcacaaatgtttttaacggctacaaagttagctcctgcattagctatgggaaacacagttgtaataaaatgttctgaattagcgccagctgttatgtttgaattcgcaaaattaatagaggaaactggtatacctaagggagtggtaaatgttattactggatttggagatccttgtggaaaagctctaacatctcataatttggtagagaaaattgcttttactggtggtccagagacagcaagacatattataaaaaattcatctgaaaatttatcagaagttagtttagaactaggaggaaaaagtccagtagctgtttttgatgatgcaaaccaagaaagtgcaataaatggaattactgcaggaatttttggtgcaactggtcaaagttgtattgcaggatctcgactttatatacagcaaggtatttataatgaatttttagataaactagttaagagagcagaaaaaataaaaattggagctccaatggatcctgaaactgaaatgggaccattaagtaattttaaacaattagaaataatagaaaaaaatattaaattaactgttgaacaaggtggtaaaattaaattcggtggtaaaagacaccctttctcaaatgagggttattattttcctcctacaataatagaatgtgataatcataatttacctgtagcagagaatgaactttttggtccagttctttcagtaatgaggtttgaaagtgaagaagaagtaattaaaaaaatgaatgataatcaatatggattatcttctggagtattttcctcagatttttcaagagcattaagagtttcaaatgctattagagctggaataacatttgttaatacctatagattaatttcaccttctgcaccttttggaggaataaaagatagtggatatggcaaggaagcaggaattgattctattaaagactatactagggttaagactacttggctcaatacttctgatgaaccaatgaaagatccttttacaattggctag

SEQ ID NO: 199710 - DNA, 1936 bp, Unknown
  Bacterial polypeptide expressing nucleotide sequence isolated from the Sargasso Sea
catggctgatcaaagagttattgtcattggaggaggacttgccggactggcggcaacgatgaagattgcagaactggggaccaaagtacttctgatctcgttccaaccagtaaaacgctcccattccgtctgtgcccagggtggaatcaatggtgcagtcaacatcaagggtgaaggcgattctccggaaattcacttttatgacacagtcaagggcggagatttcctagcgaaccagcctctttgcaaggacatgtgttatcacgcgccttttgtgatttaccttctggaccggttaggggttcccttcaacaggactccggaaggaaatctggattttcgacggtttggaggaaccctgcatcaccggactgcatttgccggggcaaccaccggacagcaattactctatgctcttgatgagcaggtaagacgttttgaaactcaggggctggtcgaaaaaatggaatggcacgagtacctgggagcagtgcttgattctgagggacgatgtgttggagcaaccatcaacaacttaagaaccggtgaaatccgggcagaacgcggggatgccgtcatcctggcaaccggaggtccgggactggtctacggaagaagtaccaattccatggtttgtacaggaacagcaacgacatcagcctaccttcagggagcaaaatacgggaatgcggaattcatccaaattcatccatcagcgattccgggaagagataagttaagactgatgagtgaatcagctcgtggagaaggtggtcgtgtctgggtcccgaaaaaccctggagacgagcgtaaaccccgggatgttccagaagacgaacgtttctacttccttgaagaaaagtatccacgttttggtaatcttgttccgcgtgatgtcggtgcccgtgagatttatgatatttgcatcaaccagaaactgggtgtgcatggtgaaatgaaggtctacctggacctgactcataaaagccgggaattcctcgatgaccgtcttggaggaattctagaaatttatgaaaaattcactggcgttgatccccgtgaggaacccatggaaatctttccagcggttcattattcgatgggtggaatctggaccgattacgaaagcactgatgacggattcatcaatcatcagtctccaagaaaccaaatgacgtccattccaggattatacgcagcaggagaagcggattatcagtatcatggtgcgaaccggcttggtgcaaattccctgttaagttgcatctacaccggattgatgatgggaccgggagtgaataactatttaaaaaatctcccggaagcagcatcccaattgccgtcatccgtctttgaaaatgacgaaaagcgctggaaggaaagattctctgatatttcaagcatgaaaggttctgaaaacccctatgcccttcatagtgaattggcagaagccatgatttccaacgtcttgattgtccgagagaacgataaactacaatccactttggacgtcattgaagacattgaatcacgttggaaggacattgaatgtgtcgacacccaggattggtccaatcctgttccaagttttgtcaaccagctttggaacatgatccagctttcaaaaatcatcaccatgggggcattgaagagagatgagttccgtgggtcccattacaagcctgaatttgatctgaatcagcccgatgattttgatcctgcggactacctggaatatgaggaacaaaaagccaatggaggagtccacaaggatcagtttgccccgagccatgtggactacatggaacgttttgaaaagaacaatgaagattggcttaaatcttcgattgcaacgtataataatggaaaacctgctgtcgatttcgaatcggtggatacgtcgttgatagcccctcgcccacgcaaatacgattga

SEQ ID NO: 199711 - DNA, 1472 bp, Unknown
  Bacterial polypeptide expressing nucleotide sequence isolated from the Sargasso Sea
tttgtttgaaatatgcacggtttctatagaagaaattaaaaaacaaaataagctatgcgaaggtgctatttgctacacaaatgatgttaccaaccctaatgaaaaaaaatataccttaaaatattatattaatttagttaaagaattagaaaatgctggcgtcaatataattgctataaaagatatggccggactctgcaagcctgaagctataaaagtattaattaaagaaattaaaaacaatactgacctaccaattcatttccatacccacgatacatcgggaacttctgcagctagtgtattggcatcaatcgatgctaaagtggatatagttgatttggctatggattctatgagtggaggaacctctcaaccagcgattgggtcaattatttcaatcattaaaaagaataacaaagattctttaattaaagaagaaaacacaagcaaagcctcactctattgggagcaggttcgtaaaaattaccactcttttgaaagtgattttaaaggtggaagctctgaggtttacatgcaccaaatgcctggaggccaatttactaatttaaagcagcaagcacattctttaggaataacaaatgataattggtggaaagttgctaacacatatgcagaagtaaataagatgtttggcgacattattaaggtcacgccttcttcaaaagttgttggagatatgacgctttatatggttgctaatgatttaaaagcagatgatgttttagatccaaataaagaaatttcatttccagactctgtcatagagttctttaagggggagcttggtacgcctcaagggggctttccaagaaaactgcaagaaaaagtattaggtgatttaaaacccataacaaaaagaccgggatccgtattgctctcggtagatattgaaaaagaaagaagaaatttggaaactaagtttaaagaaaaaattgataataaaaaattagcttcttatcttatgtatcctaaagtttttgaagattttatgactcatattcaaaaatatggagatgtttcaatattgcctacagaattatttttttatggacctcaagctgatgttgagtattctctaggaattgacaaagggaaaaatttaattgttcgatatttggcaaaaagtgaagcaaacagcaatgggattcgatcagttttttttgaaataaacggacaaccaagaacaattgaaataaaagataatcgtttatctaaaaaaatttcacaaaaattaaaggcctcagatcaaaatagcaaacacattggctctccactaccaggccagatatctaaaatttttgttaaagatggaaaaagaattattaaaggtgacaatcttcttgtaatagaagcaatgaaaatggaaactacaattactgcagaaaaaagcggattgataaaatctttatttgttgaagtaggtgaaaatgttgaaactaaggactgta

SEQ ID NO: 199712 - DNA, 1039 bp, Unknown
  Bacterial polypeptide expressing nucleotide sequence isolated from the Sargasso Sea
ctgggagattgtggcagcacgaagggcccggccacccagaacgaagtggccgacaaattgaccgccgacttcaatgaaaccagtgccagcgaggtgccgcaattcgcgttgctgctcggcgacgtggtctataacttcggcgaaggccagtactactacgatcagttttacgaaccgtatcgagactatccggcgccgatcctcgcctgcgccggcaaccacgacggcatggtgtcgcccgaggcgcacgccgccagtctcaccgcgtatttgcgaaatttttgcgcggagagcttcgccgtcacacccgaagccggcggcttgtcgcgcacggcgcaaatccagccgggcgtattcttcacgttcgaggcgccgttcctgcgcgtgctggtgatttacagcaacacgctcgaagatcccggcgtcattgcggacccgaggatcgggactacgcagctcgactttctcgacgccgcgctcaagcgcgtcaaggccgagaaattcagcggcgcactgctgatcgcgaatcatcatccgccgtatagcgcgggtggccacggatcgagcgtcgacatgctggcgcagatcgacaaaatctgcgaagccaacggcgtgcggccacatgcgtttctttccggtcacgcccacaattatcagcgctttacccgtacacgaaatgcggacggcacgcagattccctacctggtatgcggcaacggcggacacggtctgatcaagctcgccgcgcaaggggcgcccgccatccgcgcgccgcagatcatgcaggcggcgtcggccactacggaccaggtcgtgctggaaaactacgacgacaccaattacggttatctgcgcattgtcgtcaccgcagcgcagttgcggatcgagtatcactcggcgtccgacggtctcaacacgaaagcgccgaacgactacgtcacggtcgacctcgcctcgcgccaggtggcgcatttcgttgcgccggacatggggcacccgaaggcggcacgagccgtgcgtgctttggtgcggcgctagc

SEQ ID NO: 199713 - DNA, 655 bp, Unknown
  Bacterial polypeptide expressing nucleotide sequence isolated from the Sargasso Sea
gatgtatggcacaatcagttgcagtagcggtaggaggattggtgacaaacttgtggaaaaattatcaaaaaaagttgaggccttaaaggtcggtccgggtcttgataaaaattctgaaatgggacctttagttactaaagaacatttagaaaaagttagagggtacgttgatcttggagtaaaagagggagcaaagttagttgtggatggtcgagacattaaacttcaaggatatgagaatggtttcttcattggaggttgtttgttcgataatgtcaccaaaaatatgagaatttataatgaagaaattttcggtccagtgctttctgttgtaagagttaaagattttaatgacgcgattcaactgattaacgatcacgaattcggtaatggaacaagcgtttacactagagatggagatgtaggaagaacttttgcaaacaaaattaaagttgggatggtaggtataaatatacctattcctgtccccgttgcatttcatagtttcggaggatggaaaagatctttatttggagatttgcatatgcatggtcctgaaggtgtaaaattttatactaaactaaaaactatcacatcacgttggccatcaggaattggttcagaccctgagtttgtaatgccaacaatgaaataa

SEQ ID NO: 199714 - DNA, 1108 bp, Unknown
  Bacterial polypeptide expressing nucleotide sequence isolated from the Sargasso Sea
tatgaaaattcataagcaagatgggcccccagaggatctattatattttgatgaagatttaaatctttcacaaaaacaagttgaagatgttatagagatttttaacactccccttacaggagcttataactgggactacactgtatctgataatagaattaaaaagctttacgagcttggtaaagaattaaattggaatggatcaattgatctaaattgggaatatactcaccctgctgacgagaaaataatagagccagatgaggaattacctcatgaaatgttagatgcttatcaaagccttagtgatgaggaaaagatactttttgataggcacaatacggctgaacttatgagtcaatttcttcacggagaacaaggcgcccttttagttgcgtctcaacttgcaagttgtgcaccaacttacaatgcaaagctatatgctgcttcacaaacatttgatgaggctagacacgttgaggtatttaatagatatcttcaggataaagttggaatacattatccaattaacccatctttaaaattgttactggataaaattcttactgacgaaagatgggatcttaaatttattggtatgcagattattattgagggacttgcacttgcagcctttcaaatgctaaaggctattactaaggatcctttgttaaaacaacttcttcactatgttgttcgtgatgaagcaagacatgtaacctttggtattaattatttagaggactatctaaaaacactttcacccgaagaaattaatgaaagagctgaatttgcctatgaagcttgtgttatatctagagatagattgataaatacaaaggctgaacaaaggtttttaaaaatgagtgaagaggaagcaagagaattccaattaaatacaggtacatttgaaatgtttagaaacttcttatttacgagagttatgcctaatcttaaaagaattggtctattaactgatgaggttaggccaaaatttgaagctcttggtttgcttgaatatgaaaatgcaccagatgattttgaatgtgattgggctgagatgaagaaacctttagagaaatttggtcagataccaaccaatctataa

SEQ ID NO: 199715 - DNA, 1304 bp, Unknown
  Bacterial polypeptide expressing nucleotide sequence isolated from the Sargasso Sea
ttttatgctttcattacagataattatttttgttttattatctttttggattgtgaataattcttttttgatttcatttgaaataggagatcttgtttactctttatcatctgtaactattttaatctttttatttgtttttttattgataatttttattgtgcaaacaacatattttagaacaaaatttcagtttttaaaatttaagttaaaaaataatatcaacaaaaaagaaagaggttttaatgcttttgttaatagtatgatagcattagctaataaagactttaagacagcaattaaaaacagttatagtgttgataaatatttaggttctaaatcatctattaatttattacttcagtctgaaatttataaagtagaaaagaaaaataaaaatttaaatcttgtttatgaggagatgtgtaaaaatgaaaaaactcaaaacttaggatacagaggtttaatggaacaatatttacgatctgaggattatcaccacgcttttatatatggagaaaaattatttaacaacaatccttatattgaaaaaatatatgatactttagttagtattatttctaaaactaacaattggcagcaacttgtagttttaacagatactgcttatcaaaaaaaaataattaataaggaatttttctctctaaataaatcaatagcttattatgaaattgcaaaaattaaacaactaagtgaagaaaatgaagctataaaattgattgaaaagtcattggaattaagaaaaaattttcctccttatgttactttgtacattgatttattaattcaaaataaaaaatattcttttgcaaaaaaatttattaagaaagtttggtcttcagcgccttattcaaattataaagaatcaataagaagattatctttaaatctgaatatgacatataaagaattagttaaatttataactgattctaacccaaacaattatgaatcaaaaattttacttgctgaagcattgatagaagacaaagactggattgaagctaaaaatcaattgaaaaattatttggatcatcaacctaaaaaggaaatctgtcaattaatgtccaaaattgaagagggtgattctggagatcctcaaaaagttaatgcatggcttttaagaggaagaaatggagctttaagcaatttatggatatgtaaaattactaaaaatgctcagaaagattggagttctttatctaatagtggatactttaattcacttgaatggagacagccatctatgataaaccaaatagaactatcagataacaattaat

SEQ ID NO: 199716 - DNA, 729 bp, Unknown
  Bacterial polypeptide expressing nucleotide sequence isolated from the Sargasso Sea
tttgtttagggggggctaaaaaccatatgatcgtggtaccagatgcagatattgatagcgcggctaaaggactgctagctagttctatgggtagcgctggacaaagatgtatggctgcaagtgtagcagtaggtgttgcagatgttgaccctataattgatcaattaatcgaagaggctaaaaaatatgttctcggtgtggatatgggtacgataataagcagacatgcatttgatcgaatcaaaggttatatagataatgctgaaaatatgggagctaaggtattggttgacgggcgcaattctacgccacctgaaggctatgataatggatactggttaggtcctacaatattagatgacgtttctccagattggccttgtgctaaagaagagatctttggtccagtattatcgatcatacgtacagatacgatcgataaagcgatgaaaatagagaataataatatctatggtaatgcagcagcagtatttacgacttcaggagaggttgcgaaaaccatttctgaaacggcttcggctggaatggttggaattaatattggagttccagtacctagagaaccatatagctttggtggatggaatgagtcaaagtatggtcatggtgatattacaggtaagagtggagttgagttctggaccgatctgaaaaaggtaacggcacgttggccagagtctaatgaggcatggaagaaatacttctagt

SEQ ID NO: 199717 - DNA, 1129 bp, Unknown
  Bacterial polypeptide expressing nucleotide sequence isolated from the Sargasso Sea
gctggtatggcagacaaggtcgaaggtacagttctaccaatagataaaccaaatattcaagctataacttcaagaatacctattggtgttattgctgcgattgttccatggaattctcaaatgtttttaactgcaacaaaacttgcacctgctttagctatgggaaacacggtagttattaaatcttctgaacttgcaccagctgtaatgtttgaatttgcaaaattgatagaggaaacaggtattcctaaaggagtagtaaatgttatcacaggatttggagacccatgtggaaaagctttaactacacataatttagttgaaaaagttgcttttactggagggcccgaaactgcaagacatattattagaaattctgcagaaaatttatcagaagtaagcttagaacttggaggaaaaagtcctgttgcagtatttgatgatgctcatcaagaaaatgctattaatggaattaccgcaggaatatttggagctagcggacagagttgtattgcaggttcaaggctatatcttcaaaaaggaatttacgatgagttccttgataaactcacaaaaagagctgaaaaaataaaaattggtgctccaatggatccagacacagaaatgggacctttgagtaattataaacagttagaaattattgaaaaaaacataaaaaaaaccactgaacagggtggaaaaataaaatgtggtggtgaaaggcatccattttcaaatgagggatactactttcctcctacaataattgaatgtgataatcataatcttccaaccgcagaaaatgagctttttggaccagttttatcagttatgaaatttgatacagaaaaagaggtaatagagaaaatgaacgataatcagtacggattatcttctggagtttatactagtgacttttcgagaggtcttagagtttctaatgcaataagagcaggtataacgtttgtaaatacttatagattaatttctccttcagcaccttttggtggaattaaagatagtggatatggaaaggaagcgggaatggactcaattaaagattatactagagttaagacaacttggtattacacatctgatgaaccaactttagatcctttctctataa

SEQ ID NO: 199718 - DNA, 766 bp, Unknown
  Bacterial polypeptide expressing nucleotide sequence isolated from the Sargasso Sea
catggcaaaaaaaaatacacagccattagctgtaatcacaggaggcgcctcgggaattggcttaagtgcagttaagcgatttttagatgaaggctatgaagtgctgatactcgatgctaataaagatgctggagagcagtcagtaaatagccttaaatcagatacttgcaatgttaattttgcacattgtgatattactgaccatgctcaaatagatacggtttttgccgacttgcaggctaataatcgtccagcccatgtgctagtgaattgcgctggtattagcccggccttaaaccctttacatcaatattcagttgaagaatggcatagaaccatcaatattaatttacatggcactttttatgcctgtcgagaattcttaaaactggcaactgcgcaaaagatagatgcaggggcaattgtgaatgttgcctcgatcatgggagtaagagcgagtggagcccaagcaccctatgcagcatcgaagcatgcagtggtgggtttaaccaaatcaatcgctcaagattatgccaccatgaacatcagagccaatgccattggtccaggtgtcattgatacacccatgaataccgaattaatgaaagatgaaaacatcatgcaatacatgctgcaacgcattcccatgaatcgagttgcaacatcagacgaagtagccaacttaatttatttcttagcatcatccgaagcatcttatataactggatcctactaccctattgatggtgggtatcttgcaagctga

SEQ ID NO: 199719 - DNA, 631 bp, Unknown
  Bacterial polypeptide expressing nucleotide sequence isolated from the Sargasso Sea
taaaaataatgtttctcttaactctgttgaaggctttgtaaggcaaataatgggttggagagagtttattagaggtgtttatcaaaccagaagtcataaacaaattggttataacttctttaaaaatgatcgaaaattaaccaaagattggtacgagggtacaactggtatcaatccattagatgatgcgattaaacttactttagagcatggatatacccatcatataaatagactaatggttgtttccaatattatgaatctttcaggaatccatcctgatgaaatctacaaatggtttatggagatgtttgtagactcatctgaatgggttatggtaccaaatgtatatggaatgggaacctttgctgacggaggtgtattttcaacaaaaccatatatttgcggctcaagctatattatgaaaatgagcaactttaaaaaaggtccttggtgtgatattgttgatgggctttattggtcatttattaaaaataatttagattatcttaaaaccaatcctcgattagcagtaatgcctagagctcttgaaagattaaaagatgaaagaaaagagattatttttcaagcatcagaagatttcttaaaagaaaaaactacttcttattaa

SEQ ID NO: 199720 - DNA, 1474 bp, Unknown
  Bacterial polypeptide expressing nucleotide sequence isolated from the Sargasso Sea
gatggaggagaagggatgttgcgtgtttttacagtcgacgtacggcgacggcgaaccgacggatacgagctcggatttcgtgtattgggcgagagacacggccagcgatgggcgcatgccggatttgttggagcatctcacgtttagcgtgttcggtctcggtaatcgctgttatgagcagttcaacgcggcggcgaagatggttcacaaggcgttggtcgatttaggcgccacgccgctgctcaagctgcacttgggcgacgacgaccagtgtttggagcaagactttgaaaattggatcgaggcgttttggccggcgtttgaagccaagttcggattacactcggagggaggcgacgaggagttgcctcgctacgaaatcgtcgccatggacggcgtcgagggagagcgcgccgccgcgagtcaggcgtccaagtacgccaaggaacactcgggcggtcgcttcgcgccgactgcgacgaaaccattcttagcaccggtcaaggttgttcgagagcttttcagcacgggtgcggacagaaactgcgtgcacgtcgaattcgacatctctggttccgggattaagtacaagaccggagaccatttgggcgtcttcgcagagaacggcgccgacatcacccagcgagtggccaaggcgctcaagattgatgtgaaaaaggtgtttcgcctgtcgaagccaaacggggcgcccgcgtctctcggagaacctttcgagacacccatcacggctgcagacgcgatcgcaaaatacgccgacgtactgacgcccccgcgcaaacaagcgctcgccgcgctcgcgtcggtggcttcgggcaaggatgtggaaaagctcgcgttcttggcctcgccggcgggcaaagatgaattcgcaaagtatatcacgcaaccgcatagatcgctgttagaggtgatggaagatttccctagcgcagttccagatctcggtttgtttttcggcgccatcgctccgagactggcgcctagattttacagcatcagctcaagtcctgcggcggatgcgaacacggtcaccgccaccgtggctgtcgtcaaggagaaggtcgcgaccggacgagtgcacgaaggcgtcgcgagtacatttttacagcgcgcggcggaagggcagaagattccagtgtttgtcagaacgagcacattccgtctcccggagaatcctgaagcgcccgtcatcatgatcggcccgggcaccggtttcgcccctttccgaggatttttgcaggaacgaacggcacaaaaagcgtctggcgccacacttggacccgcgatgcttttcttcggttgtcgcaacgaatcgaaggattttatttacgaagacgagatgcgagccgcgttgcgcgagggcgtcatcaccagtctggacgtagcgtttagtagagatggaccaaagaaggtttacgtgcaagataaaatcatcgagaaggcgtctacggtc

SEQ ID NO: 199721 - DNA, 924 bp, Unknown
  Bacterial polypeptide expressing nucleotide sequence isolated from the Sargasso Sea
tgatattaaaaccatcagagatagcacctatttctggaatgttatttgccgaaatgatagatgaagcaggctttccatctggtgtatttaatttagttaatggagacggagcgggggtaggtacgcatatatctggtcatcccgatattgatatgatttcatttacgggatcaacaagagctggaaaattaatttctaaaaatgcagcagatacaattaaaagagtatgtttggagttaggaggtaaaggcggcaacattgtctttgctgattcttatcctaacgcggttagagatggaattaaaaatgtaatgagcaattctggacaatcatgtgatgcaccaacaagaatgcttgtagagaaaactatttatgaaagggcaattaaagaagcagcggacgaagcaaataaaattaaagtagacattgcatcaaaaaaaggagaccacatagggcctgtagtttcaaaagttcaatatgataaaattattaatttaatcaaaagtggtatcgatgaaggcgctacattagctgcaggaggtcctgaaattccaaataatttatataaaggttattttattaaaccaacgattttcaccaatgttactaataatatgcaaatagcaaaaaaagaaatttttggtccagttctttcaataatctcatttgaaacagaagaggaggcaattaatattactaatgatacagaatatgggctaggaaactatttacaaactgaagataaggaaaaagctaaaagagttgcaaaaaaattaagatcaggaattgtttatataaatggaaagtctgcagattctggaacaccttttggcggatatagacaatctggaaacgggcgcgaagggggcacctgggggctagaagaatatctagaggtaaagaatattactggttgggattaaa

SEQ ID NO: 199722 - DNA, 491 bp, Unknown
  Bacterial polypeptide expressing nucleotide sequence isolated from the Sargasso Sea
gaaaatttcaaattcagagacagacaaatgtttagacagatttgaaaagttaagaaatggaaatggaactaatagaactgccgatctaagattggccatgcaaagaactatgcagtcaaaatgcgcagtatttagaactgaaaaaactttaaaagaaggagtagaagaaataagaaaaccttatgaaggaatggattcaatatcagtaaaagataaatctttaatttttaatactgatttagttgaaactttagaatttgataacttgataagacaagcaatagttacactagactctgcgtatgaaagaaaagaaagtagaggagctcacgcaagagaagatcatcctaaaagagatgataataactttatgaaacatacattatcttggtgtaatggtagtaaaacaaaaatttcttatagagatgtacatagatcaacattaacaaatgatgtacaatactttccacctcaagaaagagtttattaat

SEQ ID NO: 199723 - DNA, 692 bp, Unknown
  Bacterial polypeptide expressing nucleotide sequence isolated from the Sargasso Sea
cctcctggtggaagacgacccggtgctcagccgcaccatggcccagggcctcgaaaacgcgggccaccgtgtcgagctggcccataccgtcgaagaagcccagcactggtgggccgtacaggctttcgacgccgtgctgctggacctgaacctgccccacgctgcccacgcacgcagcggcctgggcagcggcctgacggccctgcgcgctgcccgtgcgcgcggcgaccgcacccccgtgctggtgctcagtgcccgcgacagcaccgaggagcgcatcgccgggctggacgctggcgccgacgactacctgggcaaaccctacgagctcaaagaggtggaagcccgcctgcgcgccctgctgcggcgcgccagtggtaccgccgacatcgtcaccgtgggccaactggtgctggaccgccaggcgcgccgcgtcagcgtggccgggcagccgctggagctgcccgcgcgcgagtttgacctgctgtgggagttgatgaccccacccggccgtgtgctgagcaagggcgacctgtcctcgcgcctgtcggacggcggcgaagtggtgggcgaaaacgcgctggaggcctcgttctcgcgcctgcggcgcaagattgcaggcagcggtgcggccatccgcacgctgcgcggactgggctacgtgctagaggatgacgttggccagccctgaa

SEQ ID NO: 199724 - DNA, 1074 bp, Unknown
  Bacterial polypeptide expressing nucleotide sequence isolated from the Sargasso Sea
cagatttaaaaaatgccaatcttgctaatgcaaatttacgtggtgctgtgatacactatattgatttatctggaaaagatctaaatggaattaaactaattgattctaatcttttaaatgtaaactttacagatgcagatcttcgtaatgcagatcttcgtaatgcagatctcactaccgcagatcttactaatgcaaatctagagggggctttcctgcatggcgcaaaattaaattctttaaatctaaaaaataccaatcttgaatttgctgattttaatacaccattaggagaagttaatctctatcatgaatctatcgagtatgattttactctacatgatctaactggaataaatcttcatggtgtatatctggaaggtatagacctctctggaaaaaatctttctggtgctgatctttctggtgcgatgttaagaaatgcaaatctagaaaatagcatactacttggagcaaatctagaaaaagcagatctcacaaatagtaatttacaaaattccgaattaacaggcgcaagcctcagatatgcaacactagttaactccaatctacaaggaataaaatttgattatgcatattttaaaaatgcagatctttctttttcaaatctaaatgatactaatctccacaatgctgatttctggaaagtggatcttactaatgcaaatctagaaaattcggatttatctaaagcattccttcgtgattctatactgattaatgcaaatcttaaaaatacaaatcttcaacagtccgaattatcatatgctaatttatctaacgcaaacttgtcagaagctaatcttaaacaatctgatctgatatctgcaaatctctcaggtgctgatctttctggagctaatctattactttcatattctaaaaacgcaataatctctgatatcaaaacttctgcaactacaaaatcagatgcttgttttgataatgaactgtttgatagaatattgtgtaatgctttaagaaagttagaatctgatagtcctccattttatggagaatatagaaattatcatcgtgatgatcttttctaat

SEQ ID NO: 199725 - DNA, 1414 bp, Unknown
  Bacterial polypeptide expressing nucleotide sequence isolated from the Sargasso Sea
tgaagccaaaaaagcccctttcgacaacaaaaagcatataggtgaagtctcatatttgtctaaagataaattagaaaatattgagttagatgaatcttgggctgaactgagtcttgaagaaaggattaaagttctaaataaagttgcaataaacattcagaataatagagataagtttttttatcttttagctaatgaagctggcaaaactttgaaagattgtgatgctgaagttagagaatctatagattttattaactattattgccatcaagctgaagagttatttaccaaagaagaattagaaggtccgacaggagaaaaaaattatctagtgcatgcaccgaaaggaaaattcttatgtattagtccttggaactttccaatggctatttttgtaggtcaaatttctgcagctttagtaactggtaatagtgttattgcaaaaccagcagaagatacatcaataattgcatatgaaataattaaattatttcatgaagctggagttccaggatcagcattgcaactaataattggtggaagagaaataggcaatgaactaacaaaaaatgatcaactaaatggagttgctttcactggttcatcagaagctgcgaagaagattaatattaatctcgctaattcagatggcccaataaaaacattgattgctgaaacaggtggtcaaaatgtaatgtttgttgattcttcgtctttaaaagagcaagttattgatgatgtagttaggtcggcttttttaagtgctggacaaagatgtagtgcattgagagtaatgtatgtgcaagaagaaatagctgatgaatattgggattatctggatgaggctatgcaagaattagaattaggtgatcctaatgagccgacaacagatattggcccaataataaatcaaacttctttagataagctcaatgtgcatataaccaaacttaaaactgataaggaatttattgaatgtgataaagattgctcagaagatggttattttgttaagccaattgcttttaagattaataatatttctgaaattgatggagagaagttcggaccaatattgcacttcataagttataaaactgaagatttagataaaatactagaagaggttaatgcgactggttttggtttaactatgggtgtccattcaagaattactgagaaggcaaataaaatatttgaaaaagctaaaatcggcaatttttatctaaatagagatattgttggtgcagtagtaggagttcaaccttttggaggccaaggtctcagcggaactggtcctaaagctggtggaccaaattacttgaaaagttttgtaactgagaaaacgtttactgacaatgtaatggcaacaggtggtaatatagatttattgaataagaataatcaatga

SEQ ID NO: 199726 - DNA, 1489 bp, Unknown
  Bacterial polypeptide expressing nucleotide sequence isolated from the Sargasso Sea
ctgacaatgactcattatgtgaatggcgcgcacaccgcagccagtacaagaagccaagagattttcgaacccgcgacgggagaatgccgaggccaagtctccctcgcgagtcgcgacgaagtctctgccgccattgctatcgccaaatcagccttcgacacttggtcacaggtaacgcccctcaatcgtgctcgtgtgttatttaagtttaaggcgctagtcgagcaacatatggatgagctggcgcagctgattaccttagagcacggcaaagtgctcgatgatgcgcggggagaactcattcgtggtctcgaagtcgtcgaatttgcctgtggtatcccacacttgctcaaaggggaacatacccagcaggtcggcggtggcgtcgacgcttggtcggtcaatcaagctttaggtgttgtcgcaggcatagcgccctttaacttccccgtgatggttcccatgtggatgttcccaatcgcgattgcctgcggtaacacctttattatgaagccttcggagaaagacccaagcgcagtgatgcgtattgcggaattactcacgcaggctgggcttcccgcaggggtatttaacgtggtcaacggtgataaagaggccgtcgataccctgctcagccatgaagatattcaggccgtcagctttgttggctccaccccgattgcggaatacatttacagcaccgcatctaaacacggtaaacgggtgcaggccctcggcggcgcaaaaaaccatatgctactgatgccggatgcagatttagatcaagcggtaagtgcactcatgggcgccgcctatggcagcgcgggcgagcgttgcatggccatttcagtggtattggccgtaggggatgtgggcgacaagctagtcgataaattattaccgcaaattcaacagttaaaagtgggcaatggcctcactcctgagatggaaatgggaccgttgatctcccgccaacacctcgccaaagtcacagaatttgtcgacgccggcgttaaagaaggcgcgaccttagtggtggacggtcgccagttaaccgttgccgaccatcagcagggttacttcttaggggcctgtttattcgataacgtgacccccgagatgcgtatttaccgcgaagaaatcttcggcccagtgctgtcgattgtgcgggttaaggactatgccagcgcactggcgcttatcaaccaacatgaatttggcaatggcaccgccatctttacccaaagcggtgaggccgccagacatttttgccaccatgtgcaggtcggtatggtaggggttaacgtgcccatcccagtacctatggccttccactcctttggtggctggaaacgttcgctctttggaccgctacatatgcatggtcctgacggagtgcgtttttataccaaacgtaaagccatcacggcgcgctggcccgtaggcaaacagactcaagctgagtttgttatgcccaccatgaaataac

SEQ ID NO: 199727 - DNA, 1111 bp, Unknown
  Bacterial polypeptide expressing nucleotide sequence isolated from the Sargasso Sea
tctgaaaaaaaatggtaacgaatttgagagtaattctatttctttaggtaaatctcattggaacaataaccaggatttaaatggtgactatatatttaggttgatgtcgatgagtaagccgattacagctttggctgcaatgcaattagtagaaaaaggtaagttaaatttagactcacctgttgaagaggttcttccagagattaaagaaataccggtactaaacgctgatagtaaattggttaagcaatctaaatcaataacattacgtcatctaatgtcgcatacatcaggtttcgcttataattcactgatgatgattacttctaagaaaataaaagatttatcaatttctatgaaaatattattatttttaaaaggtataattacatacatttatcctttttcaaaaggaccaagactcttcgaagcaggaacagattttaaatatggaaccggtcttggttttgtaggcatgatgattgaaaaagttacgggtcagtctttagaagaatattgcaaagaaaatatttttaatccattggaaatgaaaaatactttttttaccattcctaaagaaaagagagataaaattgtacctttaggtattagacagggaaaaaaatctaaagtgataagaaaaatgcctttcaaaggccagccttatctaaggttttggagaaaatcttactatggaggaactgaaatatttagctcacctaatgactatgcaaattttgtcaaatgtctaatgaacaaaggcaatttcaacaataagcaaataatttctgagacaagcttcaatgaaatgataaaaccaggaaaatttgatcaaatgtttgagagagatgatagttataatttcataatgggtgaaaatggaagattaaaaaacaaaatgaatagatatggattgggctttacaatttcttttgatccaaatgactcaaggcctgtcggatctattgctcatggtggtgctgcatgcacattctttagttttaatttagaaaaacagaagggagccttgatcttttctaacttttatccctataatgacaaagaatggcatgaaatggttgttgcttttgaaaaagaaatttatgcataa

SEQ ID NO: 199728 - DNA, 1091 bp, Unknown
  Bacterial polypeptide expressing nucleotide sequence isolated from the Sargasso Sea
gctaattgagaaaaactctgatcaattaacaaaattaatcttttctgaacatggaaaagtttatgaggatgcaaaaggttctttaacaagaggacttgaagtagttgagtttgcatgcggaatccctcatttattaaaaggtgaattttctgaaaatgttggaacaaatgttgatagttggtccatgagacagccattgggtgtagttgcgggcataactccatttaattttcctgcaatggttccaatgtggatgttcccaatagcaattgcatgtggaaacacatttattttaaaaccatccgagaaggatccatcatgctcaattctgttggcacagttgctctcagaggctggactaccagaaggagtatttaatgtagtaaatggagacaaagaagctgtggacgcaatattagaaaactcagatataaaagcagtcagcttcgttggttcaacatcaattgccaaatatatttatgaaaactcagcaaaaaatgaaaaaagagttcaagcattaggtggagctaaaaatcatttagttgtaatgccagattgtgatttagatggagcagttaatgggttaatgggggcagcctatggctctgcgggagaaagatgcatggcccaatcagtagcagttgcagttggcgatattggtgatgagcttgtttcaagattgtcaaaaaaggctgatgcattaaaagtaggtccagggatggataaaacttctgaaatgggtcctttagtaaccaaagaacatcttgaaagagttaaggggtacgttgatttaggtgttgaagagggcgccaaattagtagttgatggaagagatcttaagcttcaaggttatgaaaatgggttttatattggcggatgtttatttgatcacgtgaataagaatatgagaatttacaaagaggaaatatttggtccagtattatcagttgtcagagttaaaacttttgaggaagctgcaatattaattaataatcatgagtatggaaatggagtaagcatttatactagagatggagatgctggcagaacatttgctagtaaaatacaagtaggaatggtcggtatcaatg

SEQ ID NO: 199729 - DNA, 1165 bp, Unknown
  Bacterial polypeptide expressing nucleotide sequence isolated from the Sargasso Sea
aatgagtgaaaatataattccaagtaataaaatatttagcattaaagaagctagagatttatcaaaaaaaagacttcctaaattggtcttcgattttatagatggagcatcaggagatgaaaagctttcggaaattaatagcacagcactcgatcaaataagattagaacctaaagttttaagaaatgtagaaaaaagaagtctaaaaaaaagttttttaaattatcaatttgataatccttttggatttgcaccaatgggtatgaccaatttatcatggccaggagctgacgcaatgctagctaaagagagtgctagaaataatatacctacatgcgtatcaatggcatcaacaacaactttagaagaaatgtatgagttatccgaaggacattcatggatgcaattatatatttttcaagatgaagattttgtaatggaactattagatagagctgagaagacaggttatgaagttgcaattttaacagttgatgttcccgtactatcaagaagaacaagagatgataagaatggtttttcttacccttttaaaataggaccaaaacaattttttgattttgctacacatccaacatggtctttatcaactttgttaaaaggaattccgaagccaatgaattatgtgacttcaaaaagtggagatggaattttcaaaagaaaagaaagtagaggaaccacagattttgatactttaaaaagagtaagagataaatggaagggcaaacttataattaaaggagtgatgtctccggatgatgcagttaaaattaaagatgctggtgctgatgcaatacaagtttcaaatcatggtggaagacaactagatagcgcaactgcagcaataaatattttacctttagtaagaaaagctttaggaaatgatttccctttaatttttgatagtggaataagaagtggaagcgacatagtacgagcacttgcttttggtgcagattatacaatgattggtagacctgtaatgtatgctatgggtgcagatggagcgaaaggattaagaagaattgttgaaattttaaaagaagaaacaagtactactcttggattagttggattaaatgatattaatgatgtttcttcagaaatagttgcagaaaaaattataggtaatacaaggtattaa

SEQ ID NO: 199730 - DNA, 930 bp, Unknown
  Bacterial polypeptide expressing nucleotide sequence isolated from the Sargasso Sea
tatggcgtcaaggcgacatcaatttattaagtaactacgaaaagaaatgtcatgcagcctattatgccgaagaacacggtccatcagcgtgtggtatggcattccgcgttaaagattcacagcacgcatataaagaagtgcttgcccgcggtgctcagcctatggatacccataccggtccaatggaactgaaactccctgctattaaaggtattggcggtgcgatgctttaccttatagaccgttatgaaggcgaaaataccatttacgacatcgacttcaattggattgaaggcgttgatcgccatcctgaaggatgtggcttccatacgctcgatcacctcacccataatgtgtaccgcggccgcatgaatttctgggcagggttctacgaaaagctattcaactttaaagaaattcgctatttcgatattaaaggtgaatacacgggtctattatcgaaagcaatgacggcgccagacggtaaaattcgcataccgctaaatgaagaggcggttggcggtggtggccaaattgaagagttcttaatgaagtacaatggtgaaggtattcagcatatcgctttcgcttgtgacgacctagtggcgtgtttagacaagcttaaagcgaaaggtatgaagtttatgacgcctccaccaaacacttactacgatatgcttgaagaacgtcttcctgggcacggcgaaaacgtagatgagctacaaaagcgcggtattctattggacggcacaacggaaaatggtgagcctcgcctactgcttcagatattttctgaaaccgttttcggcccagtgttctttgaatttatccaacgcaaacaagacgaaggtttcggcgagggtaacttcaaggcactatttgagtcgattgaacgcgatcaggtaaatcgcggcgtactaaacaagtaag

SEQ ID NO: 199731 - DNA, 754 bp, Unknown
  Bacterial polypeptide expressing nucleotide sequence isolated from the Sargasso Sea
ttgcggttaaaaggtaagaaatgcattgttactggaggatcaagtggtatcggtgaagcaactatcagaagatttatcagcgaaggggcagaagtcttaattgcagatattaatcttgaagattcaaaaaaattatcagaagaaattggcgaaggagtcgattatatcaaatgcgatgtaaggctcgaggatgatattatttctgtttcagaaaaagcttatggtatgtgggataaggttgatgtgttagttaacaatgctggatctgaactcaatcaatcctatgataagatgacagaagcagaatgggataatgttcttaacacagatctaaaaggcccttggttaatgtgtaagcacattgtaccaaagatggtagaggcaggatcaggaagtgttataaatatttcttctttaaatggtttagttggctttcctctttcaactgcttacggaagtgccaaaggcggattggtagtatttactcgcgacatggcgattgaattagcttctactggtgtgagaattaattgtgtttgtcctggtgttattcaaacaggtatgatggaaagatggacagatcttatgcctgataaagctgaggcacaggaaatgttaaggaacacaatgccgattggaagaatgggaacagcagaagaagtcgcaggtgcaatcttcttttttgcttcagatgattccagtttatgccagggatctattttgagtgttgatggtggatttactgctcagtaag

SEQ ID NO: 199732 - DNA, 637 bp, Unknown
  Bacterial polypeptide expressing nucleotide sequence isolated from the Sargasso Sea
agaaagtacagttaaaggcatttttgagcctaatgcaggtcaaatatgtgttgcaatgtctagagtcataattcatccaaaagtaaaagacgaatatatgactaaacttacagaaaagacgaaaaagttaaaaattggatcaggggataatgcagatactcaggtaacacctttaatatctcaagaccaactacaaagagtatcaaactatgtaaaatctggaatacaatcaggcgcttctttagcagttggtggagaaaaagctcatattggggagggaaattattatcaaccaactgtttttgataatgttaaaactgactcaacaattgctcaagaagaaatatttgggccagtaacatcggtttttaactttaatgatgaagaagaagcaattgatattattaattcaacaaaatacggactagcatctggtgttttcacagcagatgatcaaaaagcaaaatggacttcagatcgtattcaagctggtataatttggcaaaacgactggtttgttgatggtgtaaatttaccaggtggtggatataaaagatctggatacggcagagatggcggtgttgatggtgtatacagtcatggtcaaacaaaaagaattagcaaaagattagtataa

SEQ ID NO: 199733 - DNA, 730 bp, Unknown
  Bacterial polypeptide expressing nucleotide sequence isolated from the Sargasso Sea
catgaaaattacacaagtagaaaattgccctacaggacttcattatttcgataaagatgacctcgaaagtaagcttgaacctcaagatattgaggatatagttgagatatttcaaacacctctaactggaacatataattgggactatacagatgccgacaataggttaaagaagctttatgaattggggaaaaaactcaattggaatgcaacattagatctagattggactcaagagccctattcattaaaagattgggcaactaatccggaaatacaacagttatcgggtttcaaaccatatgatgatctctcagaagagaaaaaaatagagtgctcatggcatcttcttgctagcggattaagtcaaatagttcatggagaacaaggcgctctgctagtcgcttctcagttagtatcctgtgctcctacctacaacgctaaactttatgctgcttcacaaacttttgatgaagctaggcatgtagaagtctttaataagtatttgcaagaaaggataggatggaattatccagttatgcctggacttaaagctttacttgataaaatcctttctgatccaagatgggacttaaagtttattggaatgcaaataattatagaagggctggcacttgcagcttttgaaagacaaagagcagctgcaatggatcctctgttaaaagatatcttttatttagtcataagagatgaagcaaggcatgtaact

SEQ ID NO: 199734 - DNA, 769 bp, Unknown
  Bacterial polypeptide expressing nucleotide sequence isolated from the Sargasso Sea
aatgtatttacagcaaacacaagtaaaaaataaaacagctttagttacaggagctggcaagggtattggtaaagcttgtgctgtagctttagcggaggcaggagccaatcttattattcttagtaggactaaaagcgatttagataatgttgaaaaacaaataagaaaacttaagagaaaatgtaaatcgtatatatgtgatgtctcaaactatgaagatgtaaaaaacgtatttaataaagtttcttctttagatatattagtaaacaatgcaggtgctaatcgaccagatcattttactaaaattaaaaaagaagacatggattatgtagttgatttaaatatgaaagctgcttttcatgtagcacagatggctgcaaaagttatgctagagtcaaaaaatagaaaatcaaaaggtggttctattatcaatatgtcttctcaattagggaaagttggagcaccaaatagaagtatttataatatgacaaaatttggtcttgaaggtttaacaagagggatggcgttagatttggcaaaaaaaaatatacgagtaaatacagtctgccctacttttgttgaaacaccaatggtaaaaaaattttttgaagataaaaaatttaagaaaaaaatgatgaataatattcctttgggacgttttggtactgaaagtgatattgcaacggccgtagtatatttagcatcgaatgcctcctctatgattactggctcatccttagtgatagatggtggctggaccgcaaaataa

SEQ ID NO: 199735 - DNA, 973 bp, Unknown
  Bacterial polypeptide expressing nucleotide sequence isolated from the Sargasso Sea
gggtaatacagttgtaattaaatgttctgaattagcaccagcaactatgtttgagtttgcaaagttaattgaagaaactggaataccaaaaggtgttgtaaatgtagtttctggttttggagatccatgcggtaaagctttaactactcacaacctagttgagaaagtagcttttacaggaggtcctgaaaccgcaagacatataattagaaactctgcagaaaatttatccgaggtaagtttagagttaggtggaaaaagtcctgtagctgtttttgatgatgctaaacaagagaatgcaattaatggaataactgctggaatatttggagcaagtggtcaaagctgtatagcaggttcaaggttgtacttacaaaaaggaatttataatgaatttttagataaattagcatcaagagcggaaaaaattaaaataggtgctccaatggactctgatactgaaatgggtcccttgagtaactttaaacaattagaagtaatagaaaaaaatattaaattaactgttgaacaaggtggaaaaattaaatgtggtggtaaaagacatcatttttcaaatgaaggttattatttcccaccaacaattattgaatgtgaaaatcataatctgccagctgctgaaaatgaactttttggccctgtgttatcggtaatgaaatttgatactgaaaaagaggtaatagaattaatgaatgataatcaatatggtctttcttcaggtgtttatactagtgatctcgcaagaggaatgagggtatctaatgctatccgggcaggtataactttcgttaatacttatagattaatttctccttcagctccatttggaggtatcaaggatagtggatatggaaaagaggcaggaattgactctattaaagactatacaagagtaaaaacaacatggttctatacatctgacgaaccttctctagaccctttctcaatcagataa

SEQ ID NO: 199736 - DNA, 456 bp, Unknown
  Bacterial polypeptide expressing nucleotide sequence isolated from the Sargasso Sea
cccaatacgagaaagttcaaaggatgattcagattggtattgatgaaggagcaacattatctgccggtggcgttggtcttccagaaggttgtgagagtggttattacgtaaaaccaactatattttctgatgtaactaatgatatgactattgcaagagaggaaatttttggcccagttttatgtttaattaaatatgaaaccgaagaagaagccattaagatagcaaatgatactccttatggccttgccggatatatccaaggcgagcatgcacatgcagttgaagttgcctcaaaaataagagctgggcaaatcactatcaacaaaggagctagagttagatcagcaccatttggtggttatggttcctctggtaacggaagagagcatggcacacatggccttgaagaatgcttggagacgaaagctgtaattggagctttagtcgaataaa

SEQ ID NO: 199737 - DNA, 646 bp, Unknown
  Bacterial polypeptide expressing nucleotide sequence isolated from the Sargasso Sea
taaaaaagcaattccttttttgttgaaggctggtctgcagaatgcaggtcaaacatgttctgcatcttcaaggattttggttcaagaatcaatttactcaaaagtagagaatttattagttaaagagtatgaaaaattatcaattggacctgcaattcaagattatgatcttggtcctttgatctcaaaaaagcaggctgaaagagttaaaaaatatttaattttaggtgaagacctgaaacaattagttacattaagtcttgaaaataatgaatttgaaaaaggaaattttgtttccccatcactttttggcaatgttcaaccggaccatgttttagctcaagaagagatttttggtcctgtccaagttttaattccatttaaagatgaggaagaggctataagaattgcaaatggaacaaaatttggtctcgtggctggtatttggacaaaggatggttctcgtcaaatgcggatggcaaaacaattaaaagctggtcaagtttttgtaaataattatggtgcaggaggtggtgttgaattgccatttggtggagttggtcattccggttttgggagagagaaaggtttcgaggctttaaaaggtttttcaattatcaagacagttgcagtgaatcatgggtga

SEQ ID NO: 199738 - DNA, 1108 bp, Unknown
  Bacterial polypeptide expressing nucleotide sequence isolated from the Sargasso Sea
atgaaaattaaaaagcaagacggaccaccaaaggatttattatattttgatgacgaggtaaatttaacgccattacaagtagaagacgtagttgaaatatttaacactcctctaactggttcatataattgggactatacagtagctgataataggattaaaaagctatatgagcttggaaaagagttaaattggaatggatcaatagatcttaagtgggattatacccaccctgctgaccaaaaaattattgagcctgatgagcagcttccacacgaaactcttgaggcatatgaaaatcttactgaggaagaaaaaatcttattcgatcgtcactcaactgcagaattaatgagtcaatttttgcatggtgaacaaggggcgcttttagttgcttcacaattagcatcctgtgctcctacctataatgcaaaactatacgctgcatcacaaacatttgatgaagctaggcatgttgaagttttcaatagatatcttcaagaaaaaataggtattcattatccaataaaccctgctctaaaaactttactcgataaaattcttacagatgagcgctgggacttaaaatttattggtatgcaaataatcattgaaggcttagctctagctgccttccaaatgttaaaaactataactaaagatcctctattaaaacaattgctgcattatgtagttagagatgaagctagacatgttacttttggaattaattatcttgaggactatattaaaactctttctcaagaggaaattgaagacagagctgagtttgcatatgaggcttgtgttatttccagagagaggttaataaataccaaatcagaacaaagatttttagggatgtcccctgatgaagcaagagaatttcaattaaatactgcaacttttgatatgttcagaaatttcttattctcaagagtgatacctaatctctcaagaataggacttttaactgaaaaagttcgtccaaaatttgaagctcttgggctgcttgaatatgagcatgctcctgatgattttgaatgcgattggactgaactaaaaaaaccgctagaagcttttgataaaattcctgaagcaatctaac

SEQ ID NO: 199739 - DNA, 932 bp, Unknown
  Bacterial polypeptide expressing nucleotide sequence isolated from the Sargasso Sea
ttatccttttgggtttgccccaatgggtatgacaaatctttcatggccaggtgcagactctatgctggcaaaagagagtgcaagaaataatataccaacttgtgtatcgatggcttctacaacaaccttagaaaaaatgtatgagctttcagaaggtcattcatggcttcaactttatatttttcaggatgaagcttttgtcatggaattgctcgatagagcagaaaaaactggttatgaagttgctatacttactgttgatgtcccagttttatcaagaagaactagagatgataaaaatggattttcatatccatttaaaataggacctaaacaattttttgattttgcaactcatcctgtttggtcaatatctacattgcttaatggaataccaaagccaatgaattacgagacttcaaaaagtggaaaaggtatttttaaaagaaaagaaagtagaggaaaaacagattgggaaactctaaaaagagtaagaaataaatggaaaggtaaattaattgtaaaaggtgttatgtcatcagatgatgcagttaaaattaaagaaatgggagctgatgctatccaagtttcaaatcatggaggtagacaattagatagtgcctcagcagcaataaatattttaccttttattagggaagcagtagggaataattttccaattatatttgatagtggaataagaagtgggagcgatattgtaagatcattagctttaggagcagatttttcaatgattggaaggcctgtaatgtatgcaatgggagctgatggagctagcgggctaagaagaattgtagatataattaaagaagaaactagcacaacgctaggtttggttggattaaatgatattaatgaagtttcttctgatataattgaacagaaactatttatgaatacaacttactaat

SEQ ID NO: 199740 - DNA, 675 bp, Unknown
  Bacterial polypeptide expressing nucleotide sequence isolated from the Sargasso Sea
cactggcagaagctggtgcaactgttatagcattaagcagaacaccttctgatttaaacaaattagaaaaaaatattaaaaagattaaaggtaaagtaattaaagttccttgtgatgtaatgaattatgaagagctaaaaacaaaattagaaaaaataaaaattattgatgtcttggtaaacaatgcggggactaatatccctgagccttttgaaaaaattaaacaaacaagcatgaactatttggtagatttaaatctaaaagctgcatttaacgttgctcaattagttgtaaaaaaaatgcttaaaaataaaaaaagacctggctctattattaatatgtcttcccaattaggtcatgttggtatgagtgggagaaatgtttacaatatgactaaatttggaattgaaggattaacaaaaggtatgggtgtagagttagcaaaaagaaatataagagttaataccgttgctcccacatttgttgaaacaccaatggtcaaaaacttctttaaaaataaaaaatttaaaaaactagcccttggaaatattccaatgggaaaagcagctacggaaagtgatgtagcaacaacagtttgtttcttagcttcatctgcttcctcaatgataactggaacatcaattgtaatagatggtggatggacagctcagtaat

SEQ ID NO: 199741 - DNA, 562 bp, Unknown
  Bacterial polypeptide expressing nucleotide sequence isolated from the Sargasso Sea
gatgcccgggacttcacgaacttcatgaccgccgtcatcgaccagagggccttcgacaagatctccggctacgtcgagagggccaaggacgacgactcctgcgaggtggtcgtcggaggcggtcacgacgactccaccggctggttcatcgagccgacgataatagtcacgaccaacccggcctccgagacgatgtgcgaggagatcttcgggccggtcctgaccgtctacgtctacgatgacgacgacttcgagggggcactggagacgtgcgacaagggatccccttacgctctaaccggatccatcttcgccaacaacgaggaagacgtccagagggcgttcgaggcgctgcgcttcgcggccgggaacttctacatcaacgacaagccaaccggtgccgtggtggcccagcagccgttcggtggcgctagggcgagcggtaccaacgacaaggccggaggcccgctcaacctgctccggtggatcagcccgcgctccgtgaagcgcacgctggacatcccacaggactggggatacccgttcatgcagccagagtgag

SEQ ID NO: 199742 - DNA, 1846 bp, Unknown
  Bacterial polypeptide expressing nucleotide sequence isolated from the Sargasso Sea
ccatataccgcttcatcagcatatttattttccaacgacagcaaggattcattcggttgaagttttaaaaggaccttcagcggttccacttggtcctcaatcaattggaggcgcagttaacttaattagtacaccaattccggaagttaattcaggaaaatttattcaggaatttggtgataataatatgacaagaactcatgcatattatggggttaaccaaggaaattttggagctcttgtagaggtgcatgaacatgcaagtgatggctttgactctattgctaatgttggtggtgatactggttttgataaatcagacattatgataaaagctagatacagttcaggaaatcattccgtaacttttaaaagagtagacatagaagaaaactcagatcaatcatatgttggtctatctcaagcaagctttaatgctaacccaagattacgatatggtgctacagcctatgatgaaatgatgaatgatggagagcaaacatctattacttatgttggtgattttgataattttgatgttgtatttacttcatggcagaacgattattatagagactggtttaaagtgagtgatttcaataataaaaaagatcatggagaagatgacgacatcaatgaattaataagcaatgcaaacaatggcagctcgactgcacaagatatcctggatggtaagctgcctgttcaaatagaatacaaacacaataatagatactacaccaacgaaggttatcaattcaaagtttcaacagaagttggtatacatgcaattactttaggttacagagacatggaagattcagaaagtagggttcaggctcacgaatatgctgatcaagctgcagatggatctttatcagccttgtatggttatgttggccttagtggaagtaataacagactaagagaatcaagtgcaacttcatattatatagaagacactatggattttggaaagctcgctattacattaggttacagatctgaagattatgaacaacgtcatagaagatggtcagacaaagcaggaccaaatttaacagaagtaagaaccggacccgctgacgttagagatacaatggcctacaacgaccatactacatcaagtattgctgcaacatatgaccttagtgataccacaactttagtagctggctttcatgaaggaatgactcctatgtttggagctgatcctgaggaagcagacaatatggagcttggagttagatactctgaaggtacttcaaatatggaagtattttattttgctagtgattactcaagactagctgctgaatgtactttagttagtggtgcagcatgtgatgctgatgaatcagcaatctttagtggaggtgaagctgaagttactggtcttgaattaaatggttctgttgtattcaaaggtgacggagttagttatccagtatcaattagctggactaacacagatgcaactttcaaaaatagttcagacagtgactattttggaactgtcgcagctggtgatgatcttccttatatacctaataaacagagttcagtagttgctggttttattactgataacggattaagcggaagtgcaagatgggtgaatgtaggaagctcatgttcccttgcagcttgcggaccttacaataaaattgaatcacatagttatctagacttaagtttaagaaaagctattaatgattctatggatgtttatgtaattcttgagaacactacagatcaagcagatttgatctctagagcaccttcagaaggagctaggtcacaaaaacctagaacaatgaaattaggttttacatatagtttctaa

SEQ ID NO: 199743 - DNA, 1138 bp, Unknown
  Bacterial polypeptide expressing nucleotide sequence isolated from the Sargasso Sea
gatggaagagacaagtactttaaagaaaattgatgttgctattatcggagccggccccgctggtattggaataagtgctatgctcctcgaactcggaattaaaagccaagtcatactggaaagaaaaaaaatcggacaatcttttgatttatggcctaaggaaatgaaactcatcactccttcttttacaactaatttttatggtcatttagacctcaactcagtaatttcagctacttctcccgcgtacactcttagaaaagagcaccctagcggacaagaatatgctcaatacttaagggctgtatcagattattacaaattacccattattgaagatgcaaatgttgatggaataacacataccaaggattccttcaaggtaaaaattaatggaacagagcttattgagtctcgttttttaatttgggctgcaggtgaatttcaatatccaaatctaaacatttttaaagggtcagaattatgccttcataatagtcaagttagaagctgggagcacctagagggggatgaattttatattattggtggatttgaaagtgggatggatgctgcagtaaatctaagtaaattaggaaaaaaagttaatgttcttgatcgtgctgctccttgggaggagcatacaacagatcctagtataagcttgtcaccatacactgtagaaagattaagagagcaaataaatcatggtcgcattaaactaattgataatgcagatatccaacgtattacaaaaaaagaaaatcaatattcaatcaagattaaaggaaaatcaaaaccctatgttagtgaaacacagccaattttagctaccggttttaaaagtagcttaacaattgttgataagttttttgattgggagcctgaaaaatcttacgccctaattaacgatgaagatgaatcaacgaaaactccaggattgtttttagttggaccacaagttcgccatgaaaatctaattttctgttttatttataaataccgtcagcgctttggagtagtagctaattctattggaaataggctaggtttggatactgcagtacttgaacaatataggcatgaaggactttacctggatgatttaagctgctgtggagacgagtgcgaatgctaa

SEQ ID NO: 199744 - DNA, 410 bp, Unknown
  Bacterial polypeptide expressing nucleotide sequence isolated from the Sargasso Sea
acttcgtacttccatgcaacatataatgcagcaaaaatgcgcagtatttagaacacatgatctcatatcaaaaggtattgaagaatattcaaaagttgagagctcaatggatgacatagatattaaagacaaatcattaatctttaatacggacttggtcgaagctttagagttacacaatttaatggcgcaatcaaaagttactcttcattctgcgttaaatcgaactgaaagtagaggcgcacatgcaagagaagattataaagaaagagatgataataattggttagttcactctttagcctggttaaacgataagggagatgtgagtatgggttccagaggtgttcatatgaatactctaactaatcatgttcaaccaataccacctaaaagaagagtttactaat

SEQ ID NO: 199745 - DNA, 380 bp, Unknown
  Bacterial polypeptide expressing nucleotide sequence isolated from the Sargasso Sea
aaataaagatatgagaatttacaaagaagaaatattcggtccagtcttatcagttgttcgagtaaaaacttttgaagaagctgcaaaattaattaacgaccatgagtacggaaatggagttagtatttatacaagagacggtgatgcaggcagaacttttgcaagtaaaattcaagtaggtatggttggtattaatgtgccgatcccagttccaatggcatttcatagttttggtggttggaaaagatcattatttggagatagtggaatgcatggtatggaaggaataaaattttatactaaacttaaaacagtaacatccagatggccttcaggtgtccgatcaaatgcggaatttgttatgccaacaatgaaataaa

SEQ ID NO: 199746 - DNA, 253 bp, Unknown
  Bacterial polypeptide expressing nucleotide sequence isolated from the Sargasso Sea
ttttataccagcagagttgaagcaatagaacttcaaaatttatttgaagtagctgaatctacagcaatatctgcttttcaaagaacagaaagcaggggagcgcacgcaagagatgattttccagacagggatgacgaagagtggctatgccatagtttattcgatccagttactaaatcggtaaaaaagagagaggtcaacttcaatccctcaacaattgaagcgtttcctccaaaagtaaggtcatattaat

SEQ ID NO: 199747 - DNA, 1444 bp, Unknown
  Bacterial polypeptide expressing nucleotide sequence isolated from the Sargasso Sea
tatgaaattaaatattgatattaaagaattattaggtgctgtagatgttccggcacaatgggttggaattcgtgaagtatacgaagcacatacaccccgcatgatccgtgatggtgtacccgtagctaatgcaaggtcatctacccatggtattatggtggaagtattggtgaatggacaatttggttattatggtacaccagacatgaccaaagaaggtgtatcgcgtgctgcgaaaaaagcttaccagcaagcagagatcgcttctggtcatgcactccatcattttgatgagagcgcaagaccatcattccaaggagaatataggtcaccatatattaaaaatagagagtcattatccgcagggaatctcaatgaactccttttggatgcgtacaatagtctcaaggtctctgacaagatcgtaagtgcatcgtcgctatgtcaggtgatcgaaacgtcattcaaatttgcaagttccaatggaagtgatatcaaccaagagttcttaatgcttgaatttgatctcagtgctacagcagcagatggcacaaaccaacagactaggacctttggtggaatgagaggtacatgccgacaaatggggcttgaatactttgacaagtacgagatcatggcgaatgcaggccgtattggtgagcaggcactggaattgctagaagcagaagaatgcccaacgggtgagatggatattgtgatcgctcctgatcagatgatgttacagatacatgagagtataggccatgcgctagaggtggatcgcattctaggtgatgaaagaaattatgcagggtggagttttgtaaaactggaggattttggaacactgcaatatggctctaaactcatgaatatcacttttgatccgactcttgaatcagaatttgcatcctatgcatttgatgatggtggattgaaagccacaaaagaatatcttataaaagatggtctacttgtcagaggccttggaggcaaggaaagtcaaatacgttcgggtctggatggggttgctaattttcggtccagtggttggaatagggcacctattgatcgtatggcaaatatcaatctagagccaggtgatttaacgtttgatgaattgataggtcaggtagagaatggtgtttacatggaaagtaataagtcatggtccattgatgactacagaaataagtttcagtttggttgtgaatatggaaagcttattgagaatggtaaattaacgaagaccgtcaagaatccgaattatcgagcgatctcaactcctttttggaacagcctcaagggtgttggtaacgaggacacctttggtatatatggcacacctaattgtggtaaaggagagccaaaccaatccataagagtggggcatgcttctcctgcatgtctttttgagaatgtgcaagtctttggaggcgtctaa

SEQ ID NO: 199748 - DNA, 499 bp, Unknown
  Bacterial polypeptide expressing nucleotide sequence isolated from the Sargasso Sea
atgggagtaattgaaaagtttggtatccccaagcctatttctaaaatattgaattgggcaagagcatatgatatgtggtatttccaatttggtttagcatgctgtgccattgaagttatggcagcaagtggaccgagacacgattttatgagattaggtataattccacttcctgcatcgccaaggcaagctgacctgatggttgttgcaggtaccgtgaccgataaaatggccccggcagtcaaaagattatatgatcaaatgccagaaccgaagtatgtaatttcaatgggttcatgttcaaacagtgggggaccgtattgggattcttactctgttacaaaaggagtagatcaattaattccagttgacgtttatgttccgggatgtcctccaagaccggaagctttgcaagaaggaatagttttattacagaaaaaaataaaaggtgaagatatgaaagaaaagtggagagaaaaagacattgaaccagtctgat

SEQ ID NO: 199749 - DNA, 1165 bp, Unknown
  Bacterial polypeptide expressing nucleotide sequence isolated from the Sargasso Sea
aatgaatgatcttattagacctagcactaaaatccatacaatagatgatgcaataagattatctaaaaaaagattaccaaaattagtctttgattttattgatggagcatcaggagatgataaacttgctgaaattaatagtactgcattagatcaaattagacttgagcctaaggtttttagaaatgtcgagaatagaaaattaagtaaaaaaatatttgattttcgttttgattatccatttggatttgcaccaatgggaatgacaaatctttcatggcctgaagcagataaaatgatagcaaaagaaagtgcgtataataatattccaacatgtgtttcaatggcttctagtactacgcttgaagatatgtttactttttcagaaggtcattcgtggatgcaaatatatatttttcaaagtgaagaatttattatggaattattaaaaagagcagaaggcatagggtatgaggttttaattctcactgttgatgttcctattctttcaagaagagccagagatgatagaaatggctttggttatccatttaaaattggcccaaaacaatttttagattttgcactacatcctcaatggagcttaacaactttgtttaaaggtgctccacaaccaatgaattatgttacctccaaaagtggtgatcaagtttttagacgaaaagaaagtagaggggcaactgattggaatactctaaaaagggttcgagacgcttggaaaggaaaattaataatcaaaggagtaatgaattctgaagatgctttgaaaattaaagaggctggtgctgatgcaattcaagtatcaaatcatggtggaagacaattagatagtgctactgcttctattaatgctttaccattaatacgaaaagctttgggagacgattttccaatactttttgatagtggaattagaagtggtagtgatattttacgcgcgttagctctgggagctgactttgttatgtttggcagacctctaatgtatgccattggtgcggatggcgcaaaaggtcttagaagaatcattaaccttattaaagaagagttaagtacaaatcttggcttagtgggattaaccgatataaatgaagttgataaaaaaattatagcagagaaattttttaaggatataaagtattaa

SEQ ID NO: 199750 - DNA, 392 bp, Unknown
  Bacterial polypeptide expressing nucleotide sequence isolated from the Sargasso Sea
ttttgatcatgtgactactgatatgagaatttataaagaggaaatatttgggccagttttatctgttgttagggtaaaaacatttgaagaggctacaaaaatgattaatgagcacgaatacggaaatggagttagcatttatactagagatggagatgcaggtagaacattcgcaagtaaaattcaagttggaatggtagggataaatgttccaataccagttccaatggctttccatagttttggaggatggaaaaggtcattatttggagatagtggaacgcatggtatggaaggtgtaaaattttatactaaattaaaaactattacttctagatggccatcaggaattagatctaatcctgaatttatcatgccaacaatgaaataaa

SEQ ID NO: 199751 - DNA, 1029 bp, Unknown
  Bacterial polypeptide expressing nucleotide sequence isolated from the Sargasso Sea
acaccttttaattttcctgctatggtgccaatgtggatgtttccaatagcaatagcttgtggaaacacttttattcttaaaccatcagaaaaagacccttcttgtgcaataagattggcagaactacttactgaggctggtcttccagaaggagtatttaatgtaataaatggagataaagaagctgttgatgcaattttagaaaacaaagatatcaaagctgttagttttgtaggatctactcctattgcaaaatatatttatgaaaattcagctaaaaatgaaaaaagagttcaagctttgggtggagcaaaaaaccatttagttgttatgccagattgtgatttagatggtgcagtaaatggtttaatgggtgctgcttatggttcagctggagaaagatgtatggctcaatcagttgcggttgcggttggagacatcggtgatgaacttgtatcaagattatcaaaaaaagctgaagctttaaaagttggtcctggaatggataaagcatcagaaatgggacctttagttacaaaagaacatttagaaaaagttacaagctacgttgatttaggtgtcgaggaaggtgcaaagctagtggttgatggtagaggtttaaaactccaaggctatgaaaatggtttctatataggtggatgtttatttgatcatgtaaataaagatatgagaatttacaaagaggaaatattcggtccagtcttatcagttgttcgagtaaaaacttttgaagaagctgcaaaattaattaacgaccatgagtacggaaatggagttagtatttatacaagagacggtgatgcaggtagaacttttgcaagtaaaattcaagtaggtatggttggtattaacgtgccgatcccagttccaatggcatttcatagttttggtggttggaaaagatcattatttggagatagtggaatgcatggtatggaaggaataaaattttatactaaacttaaaacagtaacatccagatggccttcaggtgtccgatcaaatgcg

SEQ ID NO: 199752 - DNA, 955 bp, Unknown
  Bacterial polypeptide expressing nucleotide sequence isolated from the Sargasso Sea
agaattaagaagctttatgagcttggaaaagaattaaattggaatggctcgatcgatctaaattgggattacacccatcctgctgatgaaagacttgttgaagctgatgagcagcttccccatgaaactcttgaggcatatgaaaatttaagtgaagaagaaaaaattgaatttgatcgtcacgacacagctgaattattaagtcaatttctccatggtgagcaaggggctctgcttgttgcgtctcaactgacctcatgcgcccctacttacaatgctaaattatatgctgcatctcaaacgtttgatgaagctagacatgttgaagttttcaatagatatcttcaagaaaaaataggcatgcactaccctattaacaaaaatctaaagttgttgttggataaaattcttactgatgaaagatgggaccttaaattcattggtatgcaaattatcatagaaggtctagctcttgctgccttccagatgcttaaaggcctctcaaaagatccccttttaactcaactgcttcattatgtaattcgagacgaagcaagacatgttacttttggaattaattacttagaagacttcattaaaacccttactccagaagaaattgaagacagagcagaatttgcatacgaagcatgtgtcatttcaagagaaaggctcatcaacacaaaagcaatgcaaaaatacttaaaaatgtctgaagatgaagctagagaatttgccttatcaacttcagctaatacgactttcagaaatttcttgttctcaagaattatgcccaatctttcaagaataggcttgctaacagataatgttagaccaaaatttgaggcactgggattactagagtatgaaaatgctccagatgattttgaatgtgactgggatgagctcgaaaaacctttagaaaaatttggtgaaattcctcaagctatctaat

SEQ ID NO: 199753 - DNA, 1165 bp, Unknown
  Bacterial polypeptide expressing nucleotide sequence isolated from the Sargasso Sea
atgaatgatctcattaaagctagcactaaaatccatacaatagatgatgcaattaggttatctaaaaagagattaccaaaattagtctttgatttcattgatggagcatcaggagatgataaacttgctgaaattaatagtaaggcattagatcaaattagacttgaacctaaggttttcagaaatgtcgagaatagaaatttaagtaaaaaaatattcgattttcattttgattatccatttggatttgcaccaatgggaatgacaaatctttcatggcctgaagcagataaaatgatagcaaaagaaagtgcgtataataatattccaacatgtgtttcaatggcttctagtactacgcttgaagatatgtttactttttctgaaggtcattcatggatgcaaatatatatttttcaaagtgaagaatttattatggaattattaaaaagagcagaaagcattggatacaaggttttgatcctcactgttgatgttccaattctttcaagaagagctagagatgatagaaatggctttggttatccatttaaaattggcccaaaacaatttttagattttgcactacatcctcaatggagcttaacaactttgttcaaaggcgctccacaaccaatgaattatgtcacttctaaaagtggtgatcaaatttttagacgaaaagaaagtagaggatcaactgattggaatactctaaaaagagttcgagacgcttggaaagaaaaattaataatcaaaggagtaatgaattctgaagatgctttgaaaattaaagatgctggtgctgatgcaattcaagtatcaaatcatggtggaaggcaattagatagtgctactgcttctattaatgctttgccattaatacgtaaagctttgggagacgattttccaatactttttgatagtggcattagaagtggtagtgatattttacgtgcattagctctgggagctaactttgttatgtttggcagacctttaatgtatgctattggagcagatggtgcaagaggtcttagaagaatcattaacctaattaaagaagagttaagtacaaatcttggcttagtgggattaaccgatataaatgaagttgataaaaaaattatagcagagaaattttttaaggatataaagtattaag

SEQ ID NO: 199754 - DNA, 613 bp, Unknown
  Bacterial polypeptide expressing nucleotide sequence isolated from the Sargasso Sea
gccggaattaagtgaaatttatataaaaaaggttaaaaaaatcaaagttggagatgttgaagacttttcaaattttatgaatgctgttatagataaatctgcatttgattcaattacatcatatattgataaatcaagaaaagacgatggaaccaaaataattactggtggaaattatgatgattctgttggttattatattgagccaactacaattttagttaaggatccaaaatatacaacaatgtgtgaagaaattttcggacctgtattaacgatatatctttatgatccaaaagaatgggaacaagcgcttaatctagtagacaatacctcaccttacgctcttactggatgtgtatggggtacggatagtgaggctattaattttgctacagaaaaactcacacatgcagctggaaatttttatataaatgataaaccaacaggagcggtagtaggtcaacagccatttggcggtagtcgagcatctggcacaaacgataaagctggttctattttcaatttgattcgatgggtttcaatgagaactattaaagaaacatttgatcctccaaaagattttgaatacccattcatggataaagaataa

SEQ ID NO: 199755 - DNA, 766 bp, Unknown
  Bacterial polypeptide expressing nucleotide sequence isolated from the Sargasso Sea
aatggcatccggcaaaactctacttatcactggcgtcagcagcggtttcggccgtgcgcttgcagccgaggcgttggcggcgggacacaaagtcgtcggtacggtgagaagcgagcaggcaaagcatgattttgaggcactgtctgcgaacgcggcttttggacgtgtacttgacgtgaccgacttcgatgccgttggcggcatcgtggcggagatcgaggcgaccgtcggaccggttgacgttctggtcaacaacgccggctacggacacgaaggcatcatggaagaatcgcctttgtccgagatgcgcagacagttcgatgtgaatgtgttcggcgctgtcgccatgatgaaagccgtgctgccctttatgcgtgagcgcagacgtggccacattctgaatatcacgtcgatgggcggctatatcaccatgccgggcatcacgtactactgcggaagcaaattcgcgctggagggcatttccgaggcgcttggcaaggaggtcaagcctttcggcattgccgtcacagccgtcgcacccggctcgttccgcactgactgggcgggtcgctcgatgacgcgaacaccccgttcgattgcggattacgacgctatcttcgaccccattcgcacagcgcgtgaggagaagagcggcaagcaactgggcgatcctcaaaaggcggcacgcgcgatgctcgccgcaatcgccgcggattgcccacccacgcatcttttactcggtagcgatgcactcgggctcgtgaga

SEQ ID NO: 199756 - DNA, 745 bp, Unknown
  Bacterial polypeptide expressing nucleotide sequence isolated from the Sargasso Sea
caattcttgcatggtgagcaaggtgccctccttgttgcttctcaattagcaagttgtgcacctacctacaatgctaagctctatgcagcatcacaaacatttgatgaagcaagacatgttgaagttttcaatagatatcttcaagaaaagataggtattcactaccctattaatcctgcattaaagtcactgcttgataaaatccttacggatgaaagatgggaccttaaatttatagggatgcaaataattattgaaggtcttgctcttgcagctttctctatgctgaaatctacatcaaaagatcctcttttaaagcagctacttcactacgttattagagacgaagctaggcatgtaactttcggtattaattatttagaagattttattaaaaccttgagtccagaagaaataaatgaaagagccgagtttgcatatgaagcttgtgtgatttcaagagaaagacttatcaatacaaagtctcaacaacgctttttaaatatgacagaagaagaagctagagagttccaattaaatactggaagttttgaaatgttcagaaacttcctcttctcaagggttatacctaatctatcaagaattggtttgcttactgacgaagtgaggccaaaatttgaggctcttggcctattagagtatgaaaatgctccagatgattttgaatgtgattgggctgagctgaggaaaccacttgaagattttgaaaaaattccagtttaac

SEQ ID NO: 199757 - DNA, 694 bp, Unknown
  Bacterial polypeptide expressing nucleotide sequence isolated from the Sargasso Sea
aaagttttaattcttactgttgatgtacctattctttcaagaagagcaagagatgacagaaatggttttggctatccatttaaaataggtccaaaacaatttttagattttgcactacatcctcaatggagtttaatgactttattaaaaggagctccgcaaccaatgaattatgttacctctaaaagcggtgatcaagtttttagacgaaaagaaagtagaggatcaactgattggaatactctaaaaagaattcgaaatgcatggaaggggaaattaataattaaaggagtaatgaattctgaagatgccttaaaaattaaagagtctggcgctgatgcaattcaggtatctaatcatggaggaaggcaattagacagtgctactgcttctattaatgccttaccattaattagaaaagctttaggagatgattttccaatactttttgatagtggcattagaagtggtagtgatattttacgtgcattagctctaggagctgattttgttatgtttggcagacctttaatgtacgccattggtgcggatggtgctagaggtcttcgaagaattatcaacttaattaaagaggagttaagtacgaatcttggcttagtaggattaaccgatataaatgaagttgataaaaaaattatagcagagaaaatttttaaggatataaagtattaag

SEQ ID NO: 199758 - DNA, 1030 bp, Unknown
  Bacterial polypeptide expressing nucleotide sequence isolated from the Sargasso Sea
ttgacatttgatcttgatgtggaaaatgaattaaaccttactcctcagcaagtcgaagatgttgctgaaatatttaatactccactaaccggtgcttataactgggactacacggttgccgataatagaattaaaaaactttatgaattaggcaaagaattaaactggaacggctctatggatttaaactgggattacaatcatccagcagatgagagaatcatgcaggccgacgaagatctacctcatgagacacttcaagcatacgaaagtttaactgaaaaagaaaagattgagttcgatcgtcatgatgcagcagaacttctgagtcagtttcttcacggagaacaaggagcattgctagttgcatcgcaacttacagcatgtgcgcctacttataatgcaaaactatatgcagcctcgcaaacttttgacgaagctagacatgttgaagtttttaatcgttatcttcaagaaaaaattggtatgcattacccaattaataaaaatttaaagcttttgcttgacaaaatacttaccgatccaagatgggatcttaaatttattggaatgcaaattatcattgaaggtttagcactggctgctttccaaatgttaaaaagtttatcaaaggatccgctattaactcagcttcttcattacataattcgagacgaagctagacatgttacatttggtatcaattatttggaagatttcatcaaaacattgacgcctgaggaaattgaagaaagagcagaatttgcatacgaggcatgtgttatttctagagaaagactcattaatacaaaagccatgcagaaatatttaaaaatgtctgaggaggaagctagagaattcgcgttatcaacaactgctaatactgctttcacaaactttctgtttacaagaatcatgccaaatctctcaagaataggtctgcttacagataaagtgagaccgaaatttgaagcattaggtttgctcgagtacgaacatgctcctgatgactttgaatgtgatggaacga

SEQ ID NO: 199759 - DNA, 1966 bp, Unknown
  Bacterial polypeptide expressing nucleotide sequence isolated from the Sargasso Sea
aatgaagaagaagctttcaataacaagaagggatttcataaacggtgtcagctatggtttagccgcatcagttgcaccaattgattttctcaaagcaaagaatattgatccttttaagtatcctcctgctttaatgggaatcagaggcaatcaccctggctcttttgatcatgctcacaggcttgcattggctggcggaaattttcttgaagaggtcacagatcttggggaaagcaatgatttaattgttgtaggagggggcatatcgggtttgtcggcagcatatttttatcaagaacgcactgcttcaaatcaaaacatactcatactggataatcacgacgactttggcgggcatgcaaaacgcaacgaatttcaagtcgatggaagagaaatgttaacttatggtggcagccagtccatagagtcaccaagttattatgaagaggtatcaaagaaattaatggtggatctcggaattgattttcagaaattctatactgcctatgatttcgattactttaaaaatagaggactcacttcttcgttcttttttaataaagaaacctacggcgagaataaaatcgtccgtaatgttcccaactataggtatgacatcaatcataagaacaacacaaaaccagagaatataaaaaaagttgtgaaagagatgccgatctctgacaagtccaaggatgagttcgcaagactcttcttagacaagacagatttctttcccgagatggctctggaggaaaagttttatcatttagaaaatatgagttacgaagagtacctaagaaagtatcacaaagttggcgacgaagtggtgggcctttttcacaccatgttatggtcactttggggcgttggaacagaatctatccctgcttttggcgctttctctgacggtcttccaggattttcaggccttggcttcactgaggaggagggtacaacagaacctgaaaatgaaatgtatgatatttccacatacgatgaaaccattgaggggttcatgagcaagaacgaagtttctgatgagccctatatctttcatttccccgatgggaatgcaaccatcgcaagattgcttgttagaaaaatgatcccaaatgcaatatctggcagcaccatggaagacattgtgactgctaaggcagattactcgcaattagatttgcccgatcagaacacaagaattcgcctcgacagcacagtcatttcggccaagaatgtaaatgatggcgttgaggtgatttatgtcaatcaaggcaagttatataaagtttcaggcaagaaatgcattttggcttgttacaacggcatcattcctgagctttgccctgaattgcccaagaagcaaaaagaggctctaaaatacaatgttaaagttcctcttgtctggattcaggttgcaatgaaaaattggcacatgtttgcaaataaaggcatctccagagcaattagcccaaattcattcttcaataatatgtacattgattttcctgtgagcatcggcgactatcaataccctcagacttttgatgaacccgttgtttttttaatgaaccacgtcccaactcgaccctatgagggattaacgaatcgagagcaacacagaaagggccgctacgatattctgaaacttagctttcaggattatgaagacaagatcattgatcatttgagtgcaatgtttggcccggactttaaagaggaagatttggcaggaattacagttaaccgatgggcgcacggctactcatacgaatacaacagcttatttgataatgatttttttgacggaagaatgccagacagtatgaataacgagcaatatccccacgtcatgggaagaaaaccaattggaaatatctcaattgcaaactcagactccggcggctctgcttatgtcgatgctgccatagttcaagcagacagagccgtcaatgagttactctga

SEQ ID NO: 199760 - DNA, 767 bp, Unknown
  Bacterial polypeptide expressing nucleotide sequence isolated from the Sargasso Sea
tatgaaaaaataccagcactatataaacggtgaatggatcgatgcttcaagtaaagaccttattccagttattaatcctgcgaatgaagaggtcattggtgaaataacttctgcaaaagatcaagatattaatcaagctgtagagtctgccagaaaagcatacgagtctcggatacttgtggatatgaatccaatggaacgagcaaaacttatgcgacgcattgctgaagagcttcgcaaggtcagtaaagaaggcggggcattactttgtgctgaaaatgggaaactacttgccgcttctgaatatgaatttgttgatgcagcaaactactttgattactacagcggcttaacagataaaattgaaggtcaaactattcctgtaaacagtcaggttatggattatacagtttacgaaccttacggtgtgtcaggacatattgttccctggaactttcctattgcaatgatcgctcgttctttggcatgttcgtttgcagcaggaaattccacagtcataaaacctgccgaattaacacccttagcaaccacatcttattttgcccaagcaattcataatgctgaagttccaaaaggcctaataaacatagtaacgggttatggaagtgaggccggtgctgcgcttactgcccatccggacgttgcacaaataactttcactggatctgtaaaaactggaaaagcaattttacatgatgccgctgaaagagctgtacccgctgttgttgagttgggaggaaaatctg

SEQ ID NO: 199761 - DNA, 370 bp, Unknown
  Bacterial polypeptide expressing nucleotide sequence isolated from the Sargasso Sea
atgcaaatcgatttcactaacaaacgtattcttgtgactggcggtacacgaggaatcggtcgcgcgatcgtggaggcttttcttgaagctggggcgcgagtcgccgttaatggtagtacggatgaaactaccgatagggcgatttctgacctcaaggccggaggcctggctgtggctgcgcctgggtcagtgggcttagtttcgtcttgtgagtcaatagtcgctgcggcggtcgacagtcttggtggtcttgatgttttggttaacaacgcaggtgtaggcggaggaggtccggtcgaggagaccaaagaggaggtgtttgaccaagtcatggatatcaatttgaagggtatcttttttatgaccaaat

SEQ ID NO: 199762 - DNA, 897 bp, Unknown
  Bacterial polypeptide expressing nucleotide sequence isolated from the Sargasso Sea
ctatttcagcaatgttgtttgctgaaatgatagatgaagcaggtttccctgctggagtatttaatttagtcaatggtgatggcgcaggggttggaacacaaatatctagccatcctgatattgatatggtttcatttaccggttctacacgtgcaggaaaacttattactaaaaatgctgcagatacaattaaaagagtctgtttagaattaggtggcaaaggtggaaatatagtttttgcggattcatatccaaacgcagtaagagatggaattaagaatgtaatgagcaactctggacaatcatgtgatgcaccaacgagaatgcttgtggaaaaaactatttatgaaagagcgattaaagaagcgactgatgaaacaaataaaatcaaagtagatattgcatcaaaaaaaggagatcatataggacctgtagtttcaaaagttcaatacgataaaataattaatttaattaatagtggaattgatgaaggagcaacattagcagctgggggtccagaccttcctaatggattaagcaaagggtattttattaaaccaactatatttacaaacgttacaaatgatatgaagatagcaaaaaaagaaatttttggaccagttctttctataataccatttgaaacggaagaagaagcaatcaaaattaccaatgatactgaatacggtcttggaaactacttacaaactgaagacaaagaaaaagctaaaagagttgcaaaaaaattaagatcaggaattgtttatataaatggaaacgctgctgaatcagggacgccttttggaggttacaggcaatctggaaatggaagagaaggtggagtttggggtcttgaagaatatttagaagtaaaaacagtaactggatggaaatagc

SEQ ID NO: 199763 - DNA, 298 bp, Unknown
  Bacterial polypeptide expressing nucleotide sequence isolated from the Sargasso Sea
agaggaaatatttggtccggttttgtctattataccttttgaaaatgaagaggaagcaattaaaataacaaatgatactgaatatggacttggaaattatctacaaacagaagataaagaaaaagctaaaagagtatcaaaaaagttaagatcaggaattgtttatgtaaatcataaacctgcagactcggggacaccttttgggggatataggcagtctggaaatggacgtgagggtggtacatggggccttcatgaatatttagaagtaaaaacaatcaccgagtggaaaaattga

SEQ ID NO: 199764 - DNA, 838 bp, Unknown
  Bacterial polypeptide expressing nucleotide sequence isolated from the Sargasso Sea
ttgccaacggaaatcgagcaagccggacaagatgctcaagagcctgaacagggcgaaacctctgaagcagtagaaactccagaaaccgaggagaaagccgcagaagagtcatccggggaagagacacccgaaaaactagcagaagaaaagcagaaaaagcgtaactctgttcaggaaagaatctcacaactggcacgacaaaaaaatgatgcgaacactcgtgtacaagaactagaacagcaagttgcttacttacaggctcagagtcagcctcaagctcaggatgcgccacaagcctatccaagacttgaagactacgactacgacgaagcaagacatcaacaagcagttctacagtacacctcaagcttaaatgctcagaacgtccagcaggtcatgcagcaacaacagcaagcccagattgctcaattacaagctcagaaggcacaaattgcgtctcaagagtttgttgagaaaagcaatgcctttgccttagattacaaagattttcaggcaactgttactaatcctaatttccatcagtcggatcaagtagcaaggacaattgttgaattgccgaatggccctgatgttgcttactaccttggcaagaacttaaagattgccaacgctctgaacaataaaagcgaaagggacgctagagatgatttaattagaatctcaacagcgttacaagtgaactctcggaaacgtcgtgctaacactactaacgctcctacgcccggaaagacggtgacacctaaaggaaaagtctctaaggacttggacaagatgtctcccgaagaatatcgaaaggcaaggggctatataaaatagg

SEQ ID NO: 199765 - DNA, 760 bp, Unknown
  Bacterial polypeptide expressing nucleotide sequence isolated from the Sargasso Sea
atgtatttacaaaaaattaatttaaaaaataaatatgctcttgttacaggagcaggtaaaggattaggtagagcttgtgcaatagcattagctgaagctggagcaacagtaattgctctaagtcgaacatcatcagatttagataaattagaaaaagaaataaaaaaaataaaaggtaaaattattaaaattcactgtgatgtgatgaattatgatgacttaaaaaaaaaaatagaaaaaataaaaatcatagacgtactggttaataatgctggaaccaatattcctgaaccatttgaaaaaataaaacaaagaagtatgaactatttggtagatttaaatcttaaagctgcatttaacgttgctcaatttgtagtaaaaaaaatgcttaaaaacaagaaaaggcctggatcaataatcaatatatcatctcaattaggtcatgttggtatgagtggtcggaatgtttataatatgacaaaatttggtatcgaaggattgactaaaggaatgggtgtagaattagcaaagaaaaatattagagtaaatacagttgcaccaacatttgtggcaacgccaatggtaaaaaacttttttaaaaataagaaattcaagaaattagctttaggaaatattccaatgtcaaaactagcgtctgaaagtgatgtagcaacatcagtttgtttcttagcatcttcagcttcgtcaatgattacgggtacatcaataataatagatggtggatggactgctcaataat

SEQ ID NO: 199766 - DNA, 1090 bp, Unknown
  Bacterial polypeptide expressing nucleotide sequence isolated from the Sargasso Sea
ctgccaaaaggttttaaagaagaacacctagaagacgtagttgagatatttaatacacccctcgtaggacactacaactgggattatactgatgctgatacgaggataaaaaaactttatgagctaggcaaagaacttaactggaatggttctattgatctagattggtcaaatagtcttaaaaaaggtgaaccacctataaaagctgaattaattgcaagaatggaaggaccccttgctgcactgcctgaagaagaacgactggagtatatgagacatgaccaagcttggactttgagtcaatttttacatggagagcaaggggcaatgcttgtcgcttctcagttagtttcatgcgctcctacttaccaagctaagctttatgccgcttctcagacctttgatgaagcaagacatgttgaagtctttgcaagatatataaaagaaattcatggtatagaatatccgattaacaaaagtctaaaggctttaatagataaaatcctatcggatgaaagatgggatttgaaattcattggaatgcagataataattgaaggacttgctttggctgcctttcaaactactaaagagacatctaactgtccccttttaagacaattagttcactacgtaattagagatgaagcgagacacgtaacatttggagtgaattatctgcaagaatttcttgagactcttacagaggaagaagtagaagatagagcaatgtttgcttacgaggcttgtgtcgtcatgagggcaaggataataaacacagagctgcctgctagatggttcggaatgagtgaagaagaaattcttgaaatggtagtcaatgacgatacacaagatatgttcaataatatgctttttagcagagttatgcctaatttaaagaaaataggacttttaactgataaagtaatgcctctttatgaagacctaaatttaacttcttatatagaatctgaaagtgattttgaaatagactgggctgagttaaacaaacctcttgagtcttctaaagagatagataagcagtctgaaaaagagttagcagcacatactgctcaaggcttattctgat

SEQ ID NO: 199767 - DNA, 751 bp, Unknown
  Bacterial polypeptide expressing nucleotide sequence isolated from the Sargasso Sea
atgaaaaccgtactgatcaccggctgctcttccggatttggcctcgagaccgcccgcttcttcctcgctcgcgactggcaggttgtggccacgatgcgcacgccgcgcaccgatctgctgccaagctccgagcgcctgcgcgtgctggcgctcgacgtcacgaatccgcaaagcattcgcgcggccgtcgaggccgcgggctccatcgacgtcctcgtcaacaacgcgggcttcggtgcggcggccccggccgaactggtcccgctcgcgacggtgcgcgaactcttcgagaccaataccttcggcacgatcgccgtgacgcaagccgtcttgccgcagttccggcagcgcaaggccggcgtcatcgtcaacgtaacgtcgagtgtgacgctcaaggcgctgccgctgctcgccgcgtaccgcgcgagcaaggtggccgtgaacgcgttcatcgaatcgatggcgctggaactcgcgccgttcggcgtacggacgcacctggtgctgccgggccgcgcgcccgacacccgttttggcgaaaacgcgcgcgcccatatccacggcttcgatcacgaagcgtatgccggccttgcccaggacgttgttgcgaggatgggcgatacctctgctccgatcacgcatgcacaggacgtcgccgaagccgtgtggcgcgcggcgaccgacccgtcgtcgccgctgcgcattcccgccggtgccgacgccgaggcatgggcagccgaggttcgctgac

SEQ ID NO: 199768 - DNA, 394 bp, Unknown
  Bacterial polypeptide expressing nucleotide sequence isolated from the Sargasso Sea
atgtttctaaaaaaattcgaagtaaaagataagactgcgcttgttacaggtgcaggtaaagggattggtaaagcatctgcaatcgcactggcagaagctggagcaaatttaataattataagtagaacagaaaaagatcttatagctgttaaaaaccaaattaaaaaaattaaaagaaaatgcaactactttgtttgtgatgtaacaaatttaaaagaaataaaaaaaatattttctaaaattccaaaattagacatattagtaaataacgctggaacaaataggccagaatattttactaaaattaaaagaaaagatatgagtgaagtggttgatcttaatattaaagcatcatttgatattgctcaattagcaacaaaaattatgctaaaat

SEQ ID NO: 199769 - DNA, 238 bp, Unknown
  Bacterial polypeptide expressing nucleotide sequence isolated from the Sargasso Sea
agaatttgataatctaattagacaagctatgacaactatggactcagcatatcatagaaaagagagcagaggtgctcatgccagagaagatttctcaaaaagagacgacaaaaaatttatgaaacacactttagcatggcaggatggtaaagaggtaaaagtcaagtacagagatgtacatgcaaaaacactgacaaacgatgttcaatacttccctccaaaagagagagtatactaa

SEQ ID NO: 199770 - DNA, 352 bp, Unknown
  Bacterial polypeptide expressing nucleotide sequence isolated from the Sargasso Sea
atgcaaaaaatatttagatctgaagaaactctgagcaagcaaactgaaattcttgaaaacttaagagagcgatatgaaaatgtaacaatatttgataaaggaaaagtatttaacacagaattaatggaagcaatagaattagactaccttcttgatatgtctgaatcaacagtagcaagtgctctagcaagaaaagaatctagaggtgctcattcacgacaagacttcccagatagagatgatggtaattttatgaaacattcatttgcatttaaaaatggtaactctgcaaatttaagatataaagatgtagaattaggaaaatacgaacctatggaaagaaaatattaat

SEQ ID NO: 199771 - DNA, 448 bp, Unknown
  Bacterial polypeptide expressing nucleotide sequence isolated from the Sargasso Sea
aatgcaaagagtttcaaattatgtaaattcaggtattcaatcaggcgctactttagctcttggtggtaaagaagatgagaacaaagaaggaaatttctatcaaccaactatttttgataacgtatcaacaagggcaactattgcccaagaggaaatatttggtccagttacttcagtttttgattttgaaactgaagatgaagcgattgaaataataaattctactagttacggtttagcctcaggtgtttttacatctgatgatgaaaaagctaaatggacagcagagagaatacaggcagggataatttggcataatgattggtttgtagatggaacaaatttgccaggaggaggttataaaaaatctggatacggaagagatggtggagttgatggaatatatagtcatggtcaaacaaaaagagttagtaaaagattgtattaa

SEQ ID NO: 199772 - DNA, 1165 bp, Unknown
  Bacterial polypeptide expressing nucleotide sequence isolated from the Sargasso Sea
aatgagtcacaacattcaaccgagtacaaaaattcatacaataaatgatgcaattaggttatcaaaaaaacgattaccaaaactcatctttgatttcatagatggagcttctggtgacgataagcttgctgaaattaatagttttgctttagatcaaattagactcgaacctaaagtttttagaaatgttgaaaaaagaattctaagtaaaaaattttttgatttcgattttgattatccatttggttttgctccaatgggaatgacaaatttatcatggcctgaagctgataaaatgatagcaatagaaagttcctacaacaatataccaacatgtgtttctatggcatctagtacaaccctagaagatatgttcaatttttcagatggtcattcatggatgcaaatttatatttttcaaagtgaagaatttattatggaattgttaaatagagctcaaaatattggatataaagttcttatattaacagtagacgttccaattctctcacgaagagcaagagatgatagaaatggttttggttatccatttaaaattggaccaaaacagtttttagattttgcactacatccacaatggagtttaacaacacttttgaaaggttcaccaagaccaatgaattatgtaacttctaaaacaggagatcaaatttttagaagaaaagaaagcagaggtgcaactgattgggatactttaaaaagaattagagatgcatggaaagataaattaataattaaaggagtaatgaattttgaagatgcaaaaaaaattaaagagtctggagcagatgcaatacaagtttctaatcatggaggtagacaattagatagtgcaacagctgcaattaatgcattacccgtaattagaaaaacagttggtaaggattttccattaatatttgatagtggaattagaagtggaagcgatatattgagagctttagcttttggggctgactttgtaatgttaggtagaccacttatgtacgctgtaggagcagatggcgctaaaggacttagaagaataataaatttaattaaagaagagttaagcactaaccttggattagttggtttaaataatattaatgaagttgatgaaaaaataatagcagagaagtatttaaaggatataaagtattaa

SEQ ID NO: 199773 - DNA, 556 bp, Unknown
  Bacterial polypeptide expressing nucleotide sequence isolated from the Sargasso Sea
tagttgtttttggtcgagcggctgcaaacgagctgcagaacttattaaacctggcatgccgcatgaagaaatttcaaagtctgaaacagataaatgtcttgatcgatttgataaattaagaaacggtaatggagatcataatactgcagatctaagaatagctatgcaaaaaactatgcagtcaaaatgtgcggtttttagaacagaaaaaactttaaaagaaggagttcaagaaataagaaaaccttttgacggaatggatgcaatttcagtaaaagataaatcattgatatttaacacagatttagttgaaactttagaatttgataatttaattagacaagcaatcacgaccatggactccgcctatcataggaaagagagcagaggagctcatgctagagaagatttcccaaaaagagatgataagaactttatgcaacacactctgtcttggtgtgatggaaaagagacaaagattgattatagaccggttcataaatctacattgacaaatgaggttcaatattttccaccacaagaaagagtgtattaa

SEQ ID NO: 199774 - DNA, 1078 bp, Unknown
  Bacterial polypeptide expressing nucleotide sequence isolated from the Sargasso Sea
tttgggagttgcagctggtataaccccatttaattttccagcgatggtaccgatgtggatgtttccattagctatagcatgtggtaatagttttattttaaaaccatcagaaaaagatccctcatgtccgatgaaattggcagaactgcttcacgaagctggtcttcctgagggagtatttaatgttgtaaacggtgataaagaagttgttgacgcgatattaacaaatcgaaatattaaagctgtaagttttgttggatcaactcctattgctaagtacatttatgaaaatgcagctaaaaatgaaaaaagagtccaagcattaggtggagcaaaaaatcatttagttgtaatgccagattgtgatttagatggtgccgtaaatggtttaatgggtgctgcatatggttcagctggagaaagatgtatggcgcagtcagtagcagtagcggtcggcgatgtaggtgatgagttagtctcaagactatcaaaaaaagctgaagcattaaaaattggaccgggtatggataaatcatctgagatgggccctttagtaaccaaagaacatttggaaaaagtaaaaggctatgtagatctaggagttaaagaaggagcaaaacttgtacttgatggaagaaatttgaaattgcagggctatgaaaatggtttttatattggtggatgtctttttgatcatgtgactactaacatgagaatttacaaagaggaaatatttggaccagttttatctgtcgttagagtaaaaacatttgaagaggctacaaaaatgattaatgagcacgaatacggaaatggagttagcatttatactagagatggagatgcagggagaacattcgcaagcaaaattcaagttggaatggtaggaataaatgttccaataccagttccaatggcttttcatagtttcggaggatggaaaaggtctttatttggagatagtggaacacatggtatggaaggagtaaaattttatactaaattaaaaacaattacctctagatggccatcaggaattagatctaatcctgagtttatcatgccaacaatgaaataa

SEQ ID NO: 199775 - DNA, 652 bp, Unknown
  Bacterial polypeptide expressing nucleotide sequence isolated from the Sargasso Sea
atgggctcaatcagttgtagttgcagttgggaatattgcagatttacttgtaaaaaaactagcaaaaaaagttgaaattttaaaaattggacccgggttagataagaaatctgaaatgggccctctaattacaaaagagcatttacaaaaagttaaaaattatgttgatataggcgttaaagaaggagccaaattaattgtcgacggaagaaaattgaatttacaaggttttgataaaggattttttatgggcggttgtttatttgatcatgttgaaaaaagtatgaaaatttacaaagaggaaatattcggtcctgtattatctgtagttagagtaaaaaattttgatgaggctcttaaattagttaatgatcatgagttcggaaacggtgtaagcatttttactagagacggagatactggcaggacattttcaaataaagtaaaaattggtatggtaggtataaatataccaataccggtgccagttgcttttcatagttttggaggatggaaaagatcattatttggagatcagtacatgcatgggccagaaggtgtaagattttatacaaaacttaaaacaattacctcaaaatggccttcagggttgagatctgatccagaatttacaatgccaacaatgaaataa

SEQ ID NO: 199776 - DNA, 766 bp, Unknown
  Bacterial polypeptide expressing nucleotide sequence isolated from the Sargasso Sea
atgctgaagaagagaattattcctatccaattgctaattaataataggctcgttaaaacaattgagtttggaaaatatagagatgttggtaatccagtttcaagctcaaagatttataatgatagcgatgctgatgaattaattttcctcaatattaatagggaggaaagatctattgaaccacttttaacattgataaaaaaggtttcggaggtttgctttatgccattatccctcggaggaggagttaagagtattgacgatgcatcaaagcttatccaaaatggagccgacaagatagtgttgaattcagtaatttatgatgatttggacctaatagagaaaattgcttataagttcggaaatcaagcagttgtagcttctatagacgtaagaatgaatgactcaagaaataaatatgatctatattctaattgcggaagaaatatcgagtcagtagatttaattgatcacttaaagttaatagaaaatcaaggcgcaggagaaatattaattacctcaattgatcaagatggaatgatgaagggttatgataaaaatctaattaaaattgccgttgaaaatacagctattcctataattggcgcaggcggagctggtacttttgatcacttgaaggacgtctttcttcaaaccgatgtgagtgctcttgcatgtggaagtctctttaattttggagataacaatccaataagagcaaaggcttttctaaccaattactcaatcccattcaaagtaatttagc

SEQ ID NO: 199777 - DNA, 1339 bp, Unknown
  Bacterial polypeptide expressing nucleotide sequence isolated from the Sargasso Sea
gccctggctgactgggcgcagactccgccgctggtgcgagcccgggtgctgtttcgcttcaaggagttgatggagcagcacagggacgatctggcgcggctgatcagtcgcgagcacggcaaggtgttctccgacgcccagggcgagctgacccgtggcctcgaggtggtggagtttgcctgcggcattccccacctgctcaagggggagcactccctcaacgtggggcgcggggtcgacagccactccatgatgcagccggtgggggtctgcgccggcatcaccccgttcaacttcccggccatggtgccgctgtggatgttcccggtggccatcgcctgcggcaacaccttcattctcaagccctccgagaaggatccctccctctccctgcgcatggccgagctgctcaaacaggcgggcctgccggacggagtgctgaacgtggtcaacggtgacaaggaggtggtggacgtgctgctgaccgacccgcgggtcggtgccgtgtcgttcgtcggctccactcccatcgcccagtacatctatgccaccgcctcggcccacggtaagcgggtgcaggcgctgggcggcgccaagaaccacatgctggtgatgccggatgcggatctcgagctggcggtctccgccctgatgggggcggcctacggtgcggccggcgagcgctgcatggccatttcggtggccgtggtggtgggggatgagacggccgatgcgctggtggccaggctgtcgccgctggtggcggcgctgcgggtgggcccggggctgggccagagcccggagaacgagatggggccgctcatcagccgcgagcacctggccaaggtgcgcggctatgtggatcagggggtggccgagggggccgagctggtggtggacggccggggcctgagccacggcgagggttacttcatcggcggcagcctgttcgaccgggtcggccccgagatgcgcatctaccgggaggagatcttcggcccggtgctggccatcgtgcgggcgccggactacgagacggcgctcaggctcgtcaacgaacacgagtacggcaacggcaccgccattttcacctgtgacggcgacaccgcgcgggacttcaccgcccgcgtgcaggtcggtatggtaggggtgaacgttcccattccggtgcccatggcgtttcacagctttggtggctggaagcggtccatcttcgggccgctcaacatgcacgggccggatggggtgcgcttctatacccggatgaagacggtgactgcccgctggccccagagcctgcgggcgggcgcggagttctccatgccgaccatgaagtaat

SEQ ID NO: 199778 - DNA, 977 bp, Unknown
  Bacterial polypeptide expressing nucleotide sequence isolated from the Sargasso Sea
tgagaaaagatctcttaagaaaaaagtattaggttatgaatttgattttccatttggttttgctccaatgggaatgactaatttatcatggcctggagcagactctatgttagcggctgaaagtgcgaggaataatatacctacttgtgtttctatggcttctactacaactttagaaaaaatgtatgaactttcaaaaggtcactcctggatgcagctatatatatttcaggatgaaaattttgttatggaacttttagatagagctaagaatactggatacgaagtagcaatattaactgtagatgttccagtactatcaagacgaactagagatgataaaaatggtttctcctatccttttaaaataggtccgaaacaattttttgattttgcaactcaccctatctggtctctttctactttactcagtggtattcctaaaccaatgaattatgtaacatctaaaagtggtgatggaatatttaaaagaaaagaaagtagaggttctacagattgggatactttaaagagagtgagagataaatggaaaggtaaattgataattaagggagtaatgtctcctgatgatgcaaaacaaataaaagaagcgggggctgatgcaattcaagtttcaaatcatggtggtagacaattagatagtgctacggctgcaataaatatgcttccactaataagaaaatcagttggaagtgactttcctttaatctttgatagtggaataagaagtggcagtgatatagtgagagcgcttgcatttggtgccgattatgcaatgattggtagacccgtaatgtatgcaatgggagctgatggaagaaaaggattaaggagaattgtggaaataattaaagaagaagctagcactacactcgggttagtaggattaaatgatattaatgatgttacttctaatatagtaatagatagtactataaataaggtaaattactaaa

SEQ ID NO: 199779 - DNA, 1357 bp, Unknown
  Bacterial polypeptide expressing nucleotide sequence isolated from the Sargasso Sea
ccctgccaccggcaaggccatcggcaaggtggcccacgccggcatcgccgatctcgaccgggcgctggccgccgcgcaacgcggcttcgaagcctggcgcaagatcccggccaacgaacgcgccactaccatgcgcaaagcggctgcgctggtgcgcgaacgcgcttccgacatcgcccgtctgatgacccaggaacagggcaagccgttcgccgaggctcgcatcgaagtgctgtccgccgcggacatcatcgaatggttcgccgacgaaggccgccgcgtctacggccgggtcgtgccctcgcgcaatctggcagtgcagcagaccgtgctcaaggagccgatcggtccggtagccgcgttcacgccgtggaatttcccggtcaatcaggtcgtgcgcaagctgagcgcggcgctcgcgtgcggctgctcgttcctcgtcaaggcgccggaagaaaccccggcgtcgccggcggcgctactgcaggcgttcgttgaagccggcgtgccggccggcacggtcggcctcgtgttcggcgatccggccgagatttccagctacctgattccgcacccggtgatccgcaaggtcacgttcacgggttcgaccccggtcggcaagcaactggccgcattggcgggcgctcacatgaagcgcgcgacgatggaactgggcggtcacgcgcccgtcatcgtggccgaagatgccgacgtagcgttggccgtcagggccgcagggggtgcgaagttccgcaacgccggccaggtctgcatttcgccgacccgctttctggtgcacaacagcatccgcgaagaattcgccgcggcgctcgtcaaacacgctgaaagcctcaagcttggcgacggtctggccgaaggcacgaccctcgggccgctcgccaatgcgcgccgtctcaccgccatgagcaaggtgctcgacgacgcgcgcaagaccggcgccaaggtcgagacgggcggcgaacgcgtcggctcggagggcaacttcttcgcgccgacggtgctgaccaacgtatcgctcgaatcggacgtgttcaacaacgagccgtttggcccaatcgccgcgatccgcggtttcgacacactcgaagaagcgattgccgagtcgaatcgcctgccgtacggcctggccggctatgcgttcacgaagtcgttcagcaacgtgcacctgctgtcgcaacggatggaagtcggcatgttgtggatcaaccagcctgctacgccctggccggaaatgccgtttggcggcgtgaaggattcgggctacggtcggaagggcggtccggaagcgatggaaggctatctcgtcaccaagtccgtttcggtgacggcggcttaa

SEQ ID NO: 199780 - DNA, 1018 bp, Unknown
  Bacterial polypeptide expressing nucleotide sequence isolated from the Sargasso Sea
attgagccttaacccagatcaggttgaggatatagctgagatctttaaaactccattaacaggaacttataactgggactatacaattcaagataacaggattgctaaattatatgagcttggaaaaaaattgaattggaatacatctatagatatagattgggataggcctctagtagtttctgatgaaattcctcctatgttctgggatgagtatcccccatacaaaggactagatgaagagggaaaaagagaatttttaagacataggggtgcaagtcaatttagccagttcttacacggagagcaaggtgcattattagtagcttcacagcttgtgtcgtgcgcacctacttatcaagcaaaactttacgctgcctctcaagcatttgatgaagctagacatgttgaagctttcagcagatacattcaagaaagatctaagctcatgtatccagtaggttctggtctaaagagcttactggataaaatattaactgatgagagatgggaccttaaattaattggtatgcagataattattgaaggtctagctttagctgcatttaatacagccaaagctgtaactccagacccagtactaagagatctgttgcactttataattagagacgaagcaagacatgtgacttttggagtcaattatttagaagagtttatagagaatctttccgatgaagagagagaagatagagctatgtttgcttatgaagcatgcgttattagcaaagagagactttttcctacagatgtctttagaagatttggttgggatgaggatgaagcccgagagttttctaataatgctggttttgctctagaatttcaaagacttctctttgccagagtcatgccgaatttgtccagaataggattattaacggataaagtaagaccattatatgatcagcttggagttctagaatttgaatctcattccaatgatggagatatttcctgggctgaattagaaaaacctctcgatttatcggcttag

SEQ ID NO: 199781 - DNA, 1069 bp, Unknown
  Bacterial polypeptide expressing nucleotide sequence isolated from the Sargasso Sea
atgaaatccatttttgactcgatcactttaggtaaaaacaccctacaaaactcacttgttatggcgccaatgacccgttcaagggccaatcgggatggtactcccggtgcattagcagccgactattacagtcaacgcgcaagtctgggcttaattgtcaccgaaggtatccaaccatcagacgacgggcaaggctatatctttacgccagggatttacacccaagcccatatcgacggctggaagccggtcacacaagcggtgcatgcaaaaggcggacgaatttttttccagctgatgcatgctggccgcatgtctcatccagacaatacaccgcatcaccgggctggtttggccccttcagccatagctccaggtacgcaaatgtttaccttgaaaggcatgctggacattcctgtgcccgaggccatgactcaggtgcaaattaagcaagccattgcagaattcaaacatgccgcccgcagtgccattgcagcgggcgccgatggagtcgaaattcacggtgcgaacgcttacctcatccaacagttttttgccccaagcgcaaatatccgtacggatgaatatggtggttctatcgaaaacagagcccgctttgctatcgaaattgctaaagctgtcgccgaagaaatcggtgcagaaagaaccgcgatccgcttgtcgccgggcacaaaattatggggcattgatgaaggcgctgagggaccagccttataccgctatttggttgcagagttgaacaagctgcaattggtctatttgcacgtgatgcatcaaggtgatgacgagcttctgcgcgatatccgagatggctgggatggcattttgatcgtcaacaaaccaggtcgtgcccgcgaaaacatcggtgacgatattcgcagtggattagctgatttagaggcttatggtcagatggtgctggctaatcctgattttgtcgaacgtttgaaaaaggatattccgtttaatacagcggatcgcaatactttctttggtggcgcagcgcaaggttataccgattatccgctggccaacgttgcaggctgaa

SEQ ID NO: 199782 - DNA, 1288 bp, Unknown
  Bacterial polypeptide expressing nucleotide sequence isolated from the Sargasso Sea
tattttcaaactatctatccctattttttttgctaatcttgctattcctcttgttgctattgttgatacaggattaatgggtaatcttgaaaatgttagttatttggctgctaccagtattgcctcaagtgtattctctatgattttctggagttttggttttttacgcatgggaactgttggcatggtagcgcaagcacatggatcaaaacaatataacgaaattgttaatttagttttaagaaatattgtttttgttattgtaatctctttgctattgattttccttcaaacctatatttttaaacttactttattaatttttgatttatcaactgatacaaaaaaatcttttaaagagtattttgatatacgtatttattcttccttcggtgaacttactatatttgtaattacaggtttatttattggtctacaaaaaacaaaaacctctagtattgttgttggttttttttcttttaccaatattcttttcagtctaatttttgtagtttattttaatttaaatgttcaaggagttgcgcttggcaccttaggatcttcaactcttacatctgtaatttttcttttttttactttctttgaatttaaaaaaattacaaatttagattttagttataaaaaaatttttgattttaataaaataaagaatatatttaatactaatttaaatatttttattagatcaatacttcttacgttttcttttttattttttacctatcttggcaactctataagtgaagatgttgtagccgccaatactatattaatcaatctcatcatgctttcagcttttattcttgatgcttatgcattttcaacagaaggactgataggttattcaatcggatctaaaaataaaaaattattaaaagaaattattaaaaactcttttattctgagtagctctacaggactaataatttcatttggatattttttaggcaaaaatcattttatagaaataatgactgacttagagagcatcaagatcatttgcttatcgtattcagcatggattgtaataatcccttttatctcttctttttgttatcaatttgatggcatttttgttggggcatctaaaacaaaagaacttcgaaatgctatggtcatctctgtcagcatttatttattaactgctttttttctggttaatttttttggcaatttaggtttatggatatcattaagtattttctttattttaagagggttaactttatttttatatcttggaagaatttacaaaagatttaaataa

SEQ ID NO: 199783 - DNA, 729 bp, Unknown
  Bacterial polypeptide expressing nucleotide sequence isolated from the Sargasso Sea
tatgaaaagagatagtcgttatgatgttttatttgaaccaacagaaattggccctgtaaaagcaaaaaatcgtttttatcaagtacctcattgtaatggaggtggatatagagatccttcagcagctgctgaaatgagaggcattaagagtgaaggtggatggggcgttatatttacagagcaatgtgaaatgcatcatacatccgaaattactccatttatagaacttcggttatgggatgatgaagatattccaatgattagtaaaatggctgatcgtatgaaagaacatggcgctttagcaggaattcaattagcttacagcggcattaatggaccaaatctctatacaaaagaagttcctctagctgttacaggaatgcctataagaacatttactaatgatccagtccaagcaagatctcttgataaagaagacataaaaaatttaaggcactggtttgttaatgcagctaaacgatctagaactgcaggatttaatttaatttgtttgtatggtgcccatggttttggaatttttcagcattttttatcaaccgctactaatcatagaacagatgagtatggaggtagtttagaaaatcgtgcacgatttgtaagggaagtagttgaagatgttcgtaatgcagttggtgatacaatgggtattacattacgtttatctttagatgaaatgataggagatcttggttttgcaaattctgaagt

SEQ ID NO: 199784 - DNA, 903 bp, Unknown
  Bacterial polypeptide expressing nucleotide sequence isolated from the Sargasso Sea
tatgatctttgaaaattacaaacttaaaaatattactctgagaaatagaattgtaatggcgcctatgaccagaaatcagtcgcctggagggattcccacgcaggaggtgatttcatattattcaaggagagcaaaagcagaagttgggttgattattacagagggaattgaagtaagtcataaggcttcaagtgcatatccaaatgttcctagattggatagcaatgaggctaaagaagcttggaaaaaggtcgtagcgggaattaaaaataataacggggcagttattgcacaactatggcattgtggaggttttagaaagctaggcatgcaaccaaatcctgaagtacctggtcatacagcctctggacttgtaaaacctggtaaaaaagtagcccatgagatgactttaaatgatataaaggaaacaattgatgcttatgcatcagatgcaaagatatgtgaagagattggatttgatggagttgagatacatggagctcatggttacttaatagataattttttttggagcggtacaaatattcgtgaagatgaatatggaggctcaatagaaaatcgctcacaatttgtttcagatattattaaatctgttagagagaatgtcagtgaaaattttattgttggcttaagattttctcaatggaagcagcatgactttgaagctaaactcgcatctaatcctgaagaacttaaaacgattcttacttcacctgtagaatctggtttagattatttacattcaagcatgagaaggttctgggaaagcgaatttgaaggctcaaaggaaaacctagcatattggactaagaaaataacaaagatcccaacgattggtgttggcagcgtgggactggattcagattttattgacatgactgc

SEQ ID NO: 199785 - DNA, 558 bp, Unknown
  Bacterial polypeptide expressing nucleotide sequence isolated from the Sargasso Sea
ctttgcttgatttagtcgtttttggaagagctacaggcaagcacatacaaagtgaactcaagtctggcggtggagtagactctgctacaaaagatgatattgaaaattcacttcaaagacttaacaagctaaatgagtctagagaaggttttgatcctgctgatgttaaaaaagaacttcaggagtgcatgcagaactattttggggtttttagacgtggtgaattcatgaagaagggcttagatcaattaaacgaattaaagcataaggtacaaaatcttcatcttaaggataaaagcgatgcttttaatacaagcagagttgaggcaatagagcttcaaaatctttttgaagtcgcagaatctacagccatatcagcatatcaaagaacagaaagtagaggggctcatgcaagagatgattatccagatagagatgataaaaattggttatgccataccatatatgatccaatttcaaaatctgtaagcaaaagagaggttaattttaatccctcaaaggttgatgcatttccgcctaaggttaggtcatattaat

SEQ ID NO: 199786 - DNA, 604 bp, Unknown
  Bacterial polypeptide expressing nucleotide sequence isolated from the Sargasso Sea
gttggtgcaatgaggagtggtgctcaaatcgtaagctatgaactatctgttgggctatcactgtttacaattgtaattctaactggcagtcttcagttctcagatatcatctcaagtcaggcagatggatggtggatatggaaaggtcatatacctgctataatatcttttatcgtatttatgattgctgctactgctgaaaccaatagggggccttttgaccttgcagaagcagaatctgagcttacagcaggctttcatacagaatactcaggtatcaaattctcattcttctttttggcagagtttgcaaacatgttcatactttccgctattgcagctacagtattctttggtggatggatgcctcttcattttggtagctttgaagcttttaatcagataatggactatataccaccaatagtatggttcttaatgaaaacaggttttgtcgtatttttaatgatgtggttcaggtggacctttccaagactaaggattgatcaactgctaacacttgaatggaaatacttattacctattaacctgataaatatattgttcatggcatttattgccttaatgggatggcacttataaa

SEQ ID NO: 199787 - DNA, 898 bp, Unknown
  Bacterial polypeptide expressing nucleotide sequence isolated from the Sargasso Sea
aatttatcatggcctggagcagactctatgttagcagcagaaagtgcgagaaataatattcctacgtgtgtttctatggcatctacaactactttagaaaaaatgtatgaactttcagaaggtcattcttggatgcagctatatatatttcaagatgaaaattttgttatggaacttttagatagagctaaaaatacaggatatgaagttgcaatattaactgtagatgtaccagtactatctagacgaactagagatgataaaaatggtttctcctacccttttaagattggtccaaaacaattttttgattttgcaactcatcctatttggtctatttctactttactaagtggtatacctaaaccaatgaattatgtaacatctaaaagtggagacggtatatttaaaagaaaagaaagcagaggctcaacagattgggatacacttaaaagagttagagataaatggaaaggtaaacttattattaaaggagtgatgtctccagatgatgcaaatcaaataaaagaagcaggagcagatgcaattcaagtttcaaatcatggaggcagacaattagatagcgctacagcagcaataaatatgcttccattgatcagaaaatcagtaggaaatgattttcctttaatttttgatagtggaataagaagtggaagtgatatcgtgagagctcttgcatttggcgcagattatgcaatgattggaaggcccgtaatgtatgcaatgggtgctgatggaagaaaaggattaaggagaattgtggaaataatcaaagaagaagccagcacgacactcgggttagtgggattaaacgatattaatgatgtaacttctaatatagtaatagatagtactgtaaataaggtaaattactaaa

SEQ ID NO: 199788 - DNA, 1051 bp, Unknown
  Bacterial polypeptide expressing nucleotide sequence isolated from the Sargasso Sea
aatgcctgaactaaaaaaatataaaatgtttattaatggggagtgggttgactctgaaggtaaaaaaacatttgaaactttaaatcctgaaaataataaaccgtgggctgtggttcctgaagcaagtgctaaagatgttgataaagcagttaaatctgctcaaaaagcttttgaaggagaatggtctaaaatattgcctagagaaagagcaaaatatttaagagctatcggtagcaaacttagagagaatgctgagctattaggcaaagttgaaacagttgatacaggtaaactttatagagaaacttataaacaagctcattatattgctgagtactatgactactacgcaggacttgcagataaaattgaaggtacagttcttccaatcgataaaccaaatattcaagctattacaaccagaattccaattggagtaattgctgcaatcgttccatggaattcacaaatgtttttgactgcaactaaacttgctccggctcttgcaatgggaaatactattgtaattaaagcatccgaacttgcgccagcaacgatgtttgagtttgcaaaattaattgaagaaactggaattcctaaaggagtagtaaatgttattacaggctttggcgacccgtgtggtaaagccttaacaactcacaatttagttgaaaaagttgcattcacaggcggtcctgaaacagcaaaacatataataagaaattctgcagaaaatttatcagaggtaagtttagaactaggtggaaagagtcccgttgcagtattcaacgatgcacatcaggaaaatgcagtaaatggaattacagctggaatttttggtgcatctggacaaagttgtattgctggttcaagattatatttacaaaaagaaatttataatgaatttttagataaacttacagctagagcagaaaaaataaaaataggagcaccaatggatccagaaactgagatgggaccattaagtaatttcaagcaattagaagttatagaaaaaaatataaaattaactgttgagcaaggtggaaaa

SEQ ID NO: 199789 - DNA, 496 bp, Unknown
  Bacterial polypeptide expressing nucleotide sequence isolated from the Sargasso Sea
aaacaaggtcaatcaaaatgaattggataaaatcattgataagtttgattccattcgattttcaaaaggatcacttccaacagcagagattagagccgaaatgcaaagcattatgcaaaagcatgcatctgtatttagaacggaagaattaatgaaagagggcgtggaaaaactttcctcatgcatagattcgttcaaagatgtatctgttagtgatcggggtttagtttggaataccgatttgattgaaacccttgaactggaaaatctactaggccaagggatcattacgattcaaagtggtcaggttagaaaagaaagtcgaggcgcgcacgcaagggatgactatccagatcgagacgatgagaactggctaattcatagtttgggttggatggatgcaaataataatgtgactattggatcttcgcctgtccatttagatactcaaacagatgaggtagaatcaatacctcttaaggcaagagtttactag

SEQ ID NO: 199790 - DNA, 631 bp, Unknown
  Bacterial polypeptide expressing nucleotide sequence isolated from the Sargasso Sea
ggagtctcatcatgcttcttaaatacaggacaatcgtgtaatgcacctacaagaatgcttgtctcatcgaagaactatgataaagcagtagaagttgcagctaatactgcaaatgctatgaaggtagggaatccttttgatgctgatacaaaaatgggaccaatttctaataagaatcaatatgaaaaagttcaaagaatgatacaaattggtattgatgaaggggcgacactatcagctggtggcgttggtcttccagatggctgtgaaagtggctattacgttaaaccaactatattttctgatgtaactaatgatatgactattgctagagaagaaatttttggccccgttttatgtttaattaaatatgaaacagaacaggaagctatagagatagcaaatgacacgccttacggtcttgctggatatgtccaaggtgagcaagcgcatgcagttgaagttgcttcaaaaataagagctggtcaagtcactatcaataaaggagctagagtcagatcagcaccctttggtggttatggttcttctggtaatggaagagaacatggcacacatggccttgaagaatgtttagagactaaggctgtaattggtgctttagtcgaataaa

SEQ ID NO: 199791 - DNA, 865 bp, Unknown
  Bacterial polypeptide expressing nucleotide sequence isolated from the Sargasso Sea
aatgttccaaaacttaaataaccaacaaaaaggctctcttttagcatttgtgggtgtaatgtttatcactccggattcattattaattagattatctaacatagaaacttggggaatgctattttatagaggcgctataccttttgtgtttgttttgacaggattgatatttttttataaaaaaaatttttttaaagcgcttttgagtataggctacccaggaatattctacgttataagtttttctgcttgcaatattacctttattatctcaatacaaaatactaacgttgctaacactttggttatgattgctttggctcctatgctttcggcaattttaggagcaatatttttaagagaagttcctgacaaaaaaacactggcagctatcgtaattactttcaccgcttgtgtgtatatctttcatgactcattaaaattgggtaatatttatggtgacttgtttggattaattacagcctttggactagcttgtaacgcaacattagcaagatatgctaaaaatagagatttagtaccctctgcggtaattggtaaattatgcgtggctgtatttgcttttttctttgttgaaaattttgaattattagaaagagatttattttatgttcccttaatgtgcataatgtgtgtggctataccttttgttttagtaactattgcaccaagatttataactggagccgaagtaaaccttttctttttattagaaactatacttggaccaatttgggtatggctagttattaaagagcagcctagtctggaaactattttaggtggatccataatcattttaacaatcgcaattcactctttcttagccttaaaaaaaacataa

SEQ ID NO: 199792 - DNA, 522 bp, Unknown
  Bacterial polypeptide expressing nucleotide sequence isolated from the Sargasso Sea
atcaatcagcttttgattccattaaaaactacattgattatgcgaagaagtcttcatcggctgaggtgatcactggaggaaattatgacgatgctgatggatacttcattgagccaacaactattgttacatccgatccaaatttcaaaactatgtgtgaagaaatatttggtccagttttaacaatatacatctatgaaccaaatgaatggtctaaagtgttgaagcttattgactcaacctcagagtatgcgcttaccggatgtgtcatatcagaagatagatctgcaataattgaagctaaagatgcactcaaccactcagcgggtaatttctatattaatgataagcccaccggggcagttgttggtcagcagccctttggtggtagtcgtgcctcgggtacaaatgataaggcagggtcaatgttcaatttaattcgctgggtttcaatgcgaacaattaaagagtcctctaattcccccactgattatcgatacccttttatggatgaatcgtaaa

SEQ ID NO: 199793 - DNA, 1087 bp, Unknown
  Bacterial polypeptide expressing nucleotide sequence isolated from the Sargasso Sea
acagttcttccaatcgataaaccaaatattcaagctattacaactagaattccaattggagtaattgctgctatcgttccatggaattcacaaatgtttttaacagcaacaaaacttgctccagctcttgcaatgggaaatactgttgtaattaaagcatcagagcttgcgccagcaacaatgtttgagttcgcaaaattaattgaacaaacaggaattccgaaaggagtagtaaatgtaattacaggctttggcgatccatgtggtaaagctttaacaactcacaatttagttgaaaaggttgcattcacaggcggtcctgaaacagcaagacatataataagaaattcagcagaaaatttatctgaggttagtttagaactaggtggaaaaagtcccgttgcagtatttaacgatgcacatcaagaaaatgcagttaatggaattaccgcaggaatttttggtgcatctggacaaagttgtattgctggttcaaggttgtatttacaaaaagaaatttataatgaatttttagataagcttgcagctagggcagaaaatataaaaataggagcgccgatggatccaaatacagaaatgggaccattaagtaattttaaacaattagaagtcatagaaagaaatataaaattaactgttgaacaaggtggtaaaataaaatgtggtggaaaaagacattctttttctaatgaaggatattattttcctccaacaattatcgaatgtgataatcataatttaccagttgcagaaaatgagttatttggtcccgttttatcagtaatgaaatttgaaaacgaaaaagaagtaattgaaaaaatgaatgataatcaatttggattatcctctggagtatatactagtgatctggctagaggattaagagtttcaaatgcagttagagcaggaattacatttgtaaatacatacagattaatttcaccatctgctccgtttggtggaattaaagatagcggatatggcaaagaagcaggcatagaatcaattaaagactacacaagggttaaaacaatttggtactatacatctgacgaaccaacacttg

SEQ ID NO: 199794 - DNA, 1288 bp, Unknown
  Bacterial polypeptide expressing nucleotide sequence isolated from the Sargasso Sea
ggcaggatatcccgtagctttaactttaggcggtatatcaattttgtttgcatttatttgcattccttttgggatatttgatccaaccatttttaaaagcataccgattagaattttcggaattatgaataatgtgaccttgcttgcagttccgttatttatttttatgggaactattcttgaaaaatcaggcattgctgcaagtatgttgaaaaatatggcattagcttttagaagtgttaagggcggtctgtctatttcaattattgtagttggcgccttgcttgctgcaagtacaggtattgttggagcgacagttgtgactatgggattaatgtctctccctattcttattaatcaaggatacgataaaagcttctcttcgggattggttgcatctactggaacgcttggacaaattatcccaccttcgattgcattagttttgcttggagatgttatgtccaatgcttatcaaagagcccagaatgatatggggattttttcacaacaaacggttactgttggtgatttatttgttggagcgatagtacctggtatattaatttgccttggttatctaatttatactatttatataaaccaaaaaaatccaagcattaccgatcacgctgaaaattcaaatattaatatattagatttatttaaaactttagcacttccgttcttattgatttttttagtgttaggctcaatctttgctggaatagcaacgcctaccgaagcagcagcaattggagcatttggcgcattaattattgcattactgaatggaaaaatgagttttgcatttatcaaagagtcttctgagaagacagcaatagtatcaacaatgatatttacaattcttattggtgcctcaatcttttcattaatctttaggggagttggaggagatgaattgataaaccttattttcggctctattcctggtggttcatatacagctctgatttttgtactagtggttatatttttgttaggttttatcctcgactttatcgaaatatgttatgtgattgttccattagtggctccaccgcttttgatgatgggatttgatccggtatggttggcaattttatttgcaattaatctacagacttcttttttaacacctccttttggattttctttattttatttaaggggcgttgctgaccaaagcattcaaacagctgaaatatatagaggggttattccttttattttaattcaattattcgtgctaataatggtaatgctttttcctatttttattttataa

SEQ ID NO: 199795 - DNA, 409 bp, Unknown
  Bacterial polypeptide expressing nucleotide sequence isolated from the Sargasso Sea
ttataaagaggggtattggcttggtgctactatactggataatgttgatccagaatggcccagtgcgaaagaagaaatctttgggccggtactatcaatcatacgtgcagatacaattgaagatgcgatgaagattgaaaatgataacccgtatggaaatgctgcggccgtttttaccacatcgggtcagatcgcaaaagtagtttcagaaaaggcctctgccggtatgattggggtaaatattggtgtgcccgttccaagagacccatatagctttgggggatggaatgaatctaaatatggtcacggggatattacagggaagagcggtgtgggattctggaccaacctaaaaaaagtcacagctcgttggcctgagtctgatgaagcttggaaaaaatatttctaa

SEQ ID NO: 199796 - DNA, 829 bp, Unknown
  Bacterial polypeptide expressing nucleotide sequence isolated from the Sargasso Sea
actcttagaggcttataacaatttatccgatgaggagaaaatactatttgatcgtcatagtactgctgagcttatgagtcagtttttgcatggagaacaaggtgcccttctagttgcttctcaacttgcaagttgcgcaccaacttacaatgctaaattatatgctgcatctcagacttttgatgaggcaagacacgttgaagttttcaacagatatttgcaagaaaaaattggtattcattatcctatcaaccctaacttaaaacttttattagacaaaatattaactgatgaaagatgggacctaaaatttataggtatgcaaataattatcgaaggattagctctggcagcctttcaaatgctcaaatcaattacaaaagaccctcttctaaaacaattacttcattatgtggttcgagatgaggcaagacatgtaacttttggtattaattatcttgaagattacttaacaactttatcacctgaagaaattaatgaaagagctcagttcgcgtatgaagcctgtgtgatttcaagagataggttaattaatacaaaagctgagcaaagatttttaaaaatgtctgaagaagaagctagagagttttcgctaaatactggaagttttgaattattcagaaacttcttattttcaagagttatgcctaacctaaaaagaataggcttacttactgacgaggttagaccaaaatttgaagctcttggcttgcttgaatacgaacatgcgccagacgactttgaatgtgactgggctgagatgagaaagccacttgaaaaatttggtcaaataccaacatctttataa

SEQ ID NO: 199797 - DNA, 769 bp, Unknown
  Bacterial polypeptide expressing nucleotide sequence isolated from the Sargasso Sea
atgtatttacagcaaacacaagtaaaaaataaaacagctttagttacaggagctggtaagggcattggcaaagcttgtgcattagctttagctgaggcaggcgctaaccttataatacttagtagaacaaaaagtgatttagataaggttgaaaaacaaatattaaaactaaagagaaaatgtaaatcgtatatatgtgatgtttcaaactatgatgatttaaaaagtgtattcaataaaatttcttcattggatatattggtaaataatgcaggaacaaatagacctgatcattttaccaaaattacaaaagaagacatggattatgtagtgaatttaaatatgaaagctgcttttcatgtagcgcaaatggcagcaaaggtaatgttaaggtcaaaaaacagaaaaattaaaggtggttctattattaatatgtcttctcaattaggaaaagtaggtgccccaaatagaagtatatataatatgacaaaatttggtattgagggactaacaaaaggtatggcattagatcttgcgaagaataacattcgtgtaaattctatttgtccaacttttgtagagacacctttggttaaaaattttttcaaagataaaaaatttaaaaaagcgatgatagataatattcctcttggaagacttgcaacagatagtgatattgcaacagctgtagtttatttagcttccaatgcatcttcaatgataacaggatcttctcttgtgattgatggagggtggactgctaaataat

SEQ ID NO: 199798 - DNA, 1396 bp, Unknown
  Bacterial polypeptide expressing nucleotide sequence isolated from the Sargasso Sea
aatgactgatttaaaaaagtataaaatgtatattaatggtgagtgggttgactctgaaagtaaaaaaacatttgaaactctaaatccagaacataatgagccatgggcagttgttccagaagcaagcgctaaagatgttgataatgcagttaaagctgctcaaaaagcattcgagggtgaatggccaaagctacttcctagagaaagagcaaaatatttaagagctattggaaatcaattgagagagaatgcagaaatgctaggagaaatagaaacaattgatactggaaaactttacagagaaacaaaaaagcaagcagtttatatagcagaatattacgactattatgccggcttggcagataaagttgaaggtacggttttgccaatagataaaccaaatgttcaagcaataacaacaagaatacctataggagttatagctgcaattattccttggaattcacaaatgtttttaactgcaactaaagtagcaccagcacttgcaatgggtaacacagttgtaattaaatcctctgaacttgcccctgctgttttgtttgaatttgcaaagttaattgaaaaaactggtatccctaaaggcgtagtaaatgtcattactggatttggagatccttgtggtaaaagtttaactaagcacaatctagttgaaaaagttgcatttactggaggtcctgaaacagcgagacatataattagaaactctgctgaaaatttatctgaagtaagtttggaattaggtggaaaaagcccagttgcagtatttgatgatgcagaacaagaaaatgcaataaatggaattactgcaggtatattcggtgcaagtggtcaaagttgtatagcaggatcaagactttatttacaaaaagggatttacgatgaatttttagataaactttcaaaacgtgcatcacaaatcaaaattggagcaccaatggatccagaaacagagatggggcctttaagtaattttaaacaattagaggtaatagaaaaaaatattaaagatacaattgatcaaggtggaaaaattaagtgtggaggtgaaagacactccttttcaaataaaggatattactttcctccaacaattatagaatgtgataatcacaatctgccagtagcagaaaatgagttatttggacctgtgttatcagtaatgaaatttgatacagaagaggaagtaatttcaaaaatgaacgataatcaatatggattatcctctggggtttatacaagtaatttatctagaggcatgagagtttcaaaagcaattagggcaggaataacctttgtaaatacttatagattaatttctccttcagctccatttggaggtatcaaggatagtgggtatggcaaagaagcaggaatt

SEQ ID NO: 199799 - DNA, 1300 bp, Unknown
  Bacterial polypeptide expressing nucleotide sequence isolated from the Sargasso Sea
catgagtttgtggggaccggcgatgttcttttccgtcctggcgatgattttcaccggttatccggtggcgttcgcgttgggtgggacggcactgatcttcgcgctgataggatctgccgctggagtttttgacattccgctgctcttcgcgctaccagagcgcaccttcggcacgatgtcaaacttcacacttctggcagtgccgtttttcatctttatggggacggtgctcgagaagtcaaagcttgctgagcagctccttgagactattgggctcctgttcggacggtttaggggcggactagcggttggtgtggtcttcgtgggagcactgctcgctgctgcaacgggtgtggttggagcgagcgtcactgcaatggggcttatttcactgccggtcatgcttcggaacggctacaaggacgagatcagtctcggagtcattgcggctgccggcacgctcgggcagatcattcctccctctatcgtcctgattgtcctaggtgaccagatgggagtcccggttgggtctctttttagggcagcattgctacctggactggctctaactggtgcgtatgcattgtacatagcgcttgtagcatttgctaagccggatgtggcaccagcacttcccgaggatatacgaatcgctggcgctgagctgttgaaacgggttgtcctttcgctagtacctccgttggctctgattgtcgttgtgctcggcagcatttttgctggcgtcgccacgcctacggaggcaggagcacttggatcagttggcgcgatcttgcttgcgatgatgaatcgatctctctcgtttgacgccctgaacagggcaatggaggagaccagccgtttaaccatcatggtagttttcctcctgatcggttctacagcgtttgccctagtctttcggggcttcgacggggatatctggatcgagacgatgctaactgggatccccggtggagcgctcggcttccttctggttgtcaatgtcgtcgtctttattctcggattctttatcgactttttcgagattgcgttcatcatcgttccgctgatcgtgccggcagcagagattctcggcgtggacctgacatggctgggcattgtgctagcggtaaacctgcagacctcgttcctgacacctccgttcggcttcagtctcttctatctcaggggtgtgactccctccaagattccgacgacgtcgatatatcgcggtgtgatcccgtttatcgtgattcagctcgtggtactcgcggcgattacttggatggctgtgcccaagtaa

SEQ ID NO: 199800 - DNA, 925 bp, Unknown
  Bacterial polypeptide expressing nucleotide sequence isolated from the Sargasso Sea
aatgatactcaaaccatctgaaatagctcctatttcggcaatgttgtttgctgagatgattgatgaggcaggttttccagaaggagtatttaatttaataaatggtaatggagaaggagttggtactgatatatctagccatgaatatatagatatgatttcttttacaggatctacaagagctggaaaactaatttctagaaatgcatcaaatacaattaaaagagtttgtttagaattaggaggaaaaggtggaaatatagtttttgcggattcttactctaatgcagttcgtgatggtataaaaaatgtaatgagtaattctggacaatcatgtgatgcaccaactaggatgcttgttgaaaaatctatttatgaaagagcagttaaagaagctgtagatgaagcaaataaaattaaagtcgatttggcttcaaaaaaaggtgatcatattggtccagtagtttctaaaatccaatatgataaaattagaaacataattcaaagtggagtcgatgaaggagcaactttagctgcagggggacctgaattaccagataatctaaatgaaggttattttataaaaccaactatttttacagatgtaacaaatgatatggctatagctaaaaaagaaatttttggcccagttttatctattattccatttgaaaccgaagaagaggcaataaatattacaaatgatactgaatacggcctgggtaattatttacaaactgatgataagcaaaaagcacaaagagttgcaaaaaatttaagatcaggttgtgtttatataaatggtaatggagctgattctggcacaccttttggaggttatagacaatcaggaaatggtagagaaggtggaaattggggtttagaagaatatttagaagttaaaacaataacaggatggaactaa

SEQ ID NO: 199801 - DNA, 436 bp, Unknown
  Bacterial polypeptide expressing nucleotide sequence isolated from the Sargasso Sea
atgtatcttcaaaaaataaatctaaaaaacaaatacgctttagttactggtgcaggaaaaggacttggaagagcgtgttcaattgcattagctgaggcaggtgcaacggttatagctttaagtagaactccttcagatttaaataaattagaaaaggatattaaaaaagttaagggtaaaattattaaagtttcgtgcgatgtaatgtactatgaagatttaaaacaaaaattagataaaattaaaattattgatgtgttagtgaataatgcaggaactaacataccagaaccctttgaaaaaataaaacaacaaaatatgaattacctcgtagatttaaatcttaaagcagcatttaacgtagctcaacttgtagtagaaaagatgcttaaaaataataaaagacctggttcaattataaatatgtcatcacagc

SEQ ID NO: 199802 - DNA, 1408 bp, Unknown
  Bacterial polypeptide expressing nucleotide sequence isolated from the Sargasso Sea
atgtcgaaacatccacttcaatatcttgaattaccccgcaaggatcctgaaaaggatatacctgaggttcgtataaagcactatgatgaaatttatgcgtcctatgatggagcagaagccgcatctcaagctggaagatgtatttcttgtggtattccttactgtgaatggaaatgccctgttcataattacatcccaaactggcttgaactgatagaggaggggaaactatttgaagctgctgaattatctcatcagacgaattcgctccccgagatatgtggaagagtttgccctcaagatagattatgtgaggatgcatgcacacttaataatggagttggagctgtcagtattggcaatattgaaaaatatataacagacgaagccattaagcagggttggcgtcctaatatggaccatgtaaaagacacaggcaaaaaagtagcaatcattggggctggcccagctggattatcagctgcagatgtcctagcgagggccggtataagacccgttgtttttgatgcttatccggaaataggcggtttgttaacatttggaatacctccttttaagttaaacaaagatgttgtcaaaacacgaagacatctacttgaaggaatgggagtcgaatttgtactgagcacttatgttggaaaagacaggagtttttcatcaatttatgatgagtatgatgcggttttcattggaacaggaacctataaggagataagtggaggattcaaaggagaaaacctgaaaggagtttataaagctctgccttatttaataggtaatgtaaatgaagagttaggcatttctgacagtgaaaatccatatgttgatttgaaaaaaaagaatgtggttgttcttggtggaggcgatacaggtatggactgcaacagaacggcaataagacaaggagcctcaaaagtgagttgtgtatacagaagaaatgaagagaacatgcctggatcgcgacgtgaggtttccaatagtaaagaagaaggggtcagcttcttattcaacaagcagccacttgaaatcattggaacagattgtgtgacaggagttaagcttgcttctactgagctaggaccacctgatgaaagtggaagacgtgcacctaaaataattcagggctcagaagaaataattgaagcaaatgctgtcattgttgcatttggttatttgccagatgctccggattgggtctctaaaaatgctattaaaataaatgactatggatgtatagatgtcgcatctgaagaaaacctgccatttcaaacaaccaatacgaaggtgtttgctggaggggatattgttcgaggctcagatctggttgtgactgctgtttttgagggaagagaagccgcaaaaagcataatcagttttttgaagtaaa

SEQ ID NO: 199803 - DNA, 1074 bp, Unknown
  Bacterial polypeptide expressing nucleotide sequence isolated from the Sargasso Sea
acattgatgtaacaaaagataataattttaaaaattttattagaagaaaaccattaggtgttgtgtttgtaattgcaccatggaattatccttacctaacagcagttaattcaattatacctgcaatggcggcaggaaatacagttgttttaaaacattctgcgcaaacaccattatgtgctgagcagctttataagtcagcacaaaaaactttaccaaaagatgtttttaattatttacatttaaatcatcaagatgggctgagagttgtgtcagatgctagaataaattttgtttcatttactggctcagttaaagctggatatgaagttcaaaaagcaactcatactaagtttattgatatggctttagagcttggtggtaaagatcctgcatatgctagatacgattgtgacttagaaaaaacagtagaaaatttagttgatggttctttttttaattcaggtcaatcttgttgtggaattgaaagaatttatgtagatgaaaaaatttacgataaatttttagaatcttttatttctctaacctgcaattataaatttggtaaccccctaaaaaaagaaacaaacttaggtcccgtagtaaaattatctgcagctgaatttattattaatcagataaattctgcaatagataagggcgcaaaaaaaatgattgatgaaaataaatttaattatcctaaagagcataaaaattatctaatccctcaagttttaacaaatgtaaatcacgagatgagctttatgatggaagaaacttttggtccttgtgttggaattatgaaagttaaagatgaaaatgaagcaataaatttaatgaatgatagtccatatggtttaactgcatcaatttggactaaagatattgaaatagctgaaaaagttggaaataaagttcaaactggaacattctttatgaatagatgtgattatttagatccagctttatcatggacaggtgttaaagaaactggaaaaggttgttcattgtctgaggttgcttatgaaaaactaactgctcctaaaagttttcatttaagaaaagagcaataga

SEQ ID NO: 199804 - DNA, 736 bp, Unknown
  Bacterial polypeptide expressing nucleotide sequence isolated from the Sargasso Sea
atgaacaaacgggtgctgatcaccggcggcggcagaggcattggcgccgccaccgcccgccatctggcggggcagggctatcatctgtgcctcaactatcgccatgacaagggcagtgccgaggcgctggtggccgagatcctggcccaccatccggtccgctgcatcgcggtgcaggccgatgtcggggtggaggccgaggtggtgcgtctgtttgaggagatggacgcgcggctcggccccgtcacccatctggtcaacaacgccggcaggttgcaaccgcagatgcgggtgctggagatgagcgccgagcgcatcaaccagaccctgaccaccaatgtcaccagctgctttctctgctgccgcgaggcggtgcgccggatgacggcggggggcgccatcgtcaatgtctcctcggccgccgcccggttgggctcggcgggggagtacgtggactatgccgccgccaagggtgctgtcgacgtgctgaccaaggggttgtcgctggaggtggcggcccaggggatccgggtcaacggggtgcgtccgggtttcatctacaccgacatgcacgccgacggcggcgagcccggtcgggtcgaccgggtgaaggggcagatcccgctgcaacggggtggtcagccggccgaggtggccgccgccatcgcctggctgctgtctgacgaggcttcctacgttaccggcaccttcatcgacgtggccggtgggcgctgac

SEQ ID NO: 199805 - DNA, 1483 bp, Unknown
  Bacterial polypeptide expressing nucleotide sequence isolated from the Sargasso Sea
atgacccaaattaaaaattataaaatgtatgtagatggtaaatggattgaatcatcatctggtaaaaaaattgaaactttaaatccagaaaacaataaggtctgggctacggtgcctgaagctaatgaaaaagatgtagatttagcagttaatgcggcacaaaaagcttttgaaaactcttggtctaaaatgcatccaagagatcgagcaaaatatttaagagaacttgctaatcagctaagacaaaatgcagaacatcttggaaaaattgaaacaattgatactgggaaattatttagagaaacaaaaacacaagctaattatattgcagaatactatgattactttgcaggtcttgcagataaagttgagggtacagttgttccaattgataaagataatatgcaagtggttacaacaagaattccaattggagttgttgctgcaatcattccttggaactctcaaatgttactaaccgctgtaaaacttgccccagctttagcaatgggaaatacagttgttattaaagcttcagaactcgccccagtaactttattagagtttgcaaaacttgtagaaaattctggaataccaaaaggtgttgtaaatgtaattacaggattgggtgaaccatgtggaaaatctctaactactcataatttagtagaaagaattgcttttactggaggtcccgatacagcaaaacacattataaaaaattctgcagaaaacttatcacaagttagtttggaattaggtggtaaaagccctgtagtagtttttaaagacgccgatcaagaaaatgcattaaacggaataacagctggaatttttggagcaagtggtcaaagttgtattgctggttcaagattatatcttcaaaaagatatttatgatgacttcttaaataaattaataaaaaaagctgaaaaaataaaacttggtagtcctatggataaagatgctcaaatgggtccactaaatagttttaaacagctagaaataattgaaaaaaatattaaagcaacaattgatcaaggtggaaaattgagatgtgggggcaaaagatcaaaaatatctaatgaaggatattattttccaccaacaatcatcgaatgtcaaaatcataatttacctactgcagaaaatgaactttttggaccagttctatcagttatgaaatttaatactgaagaagaagctattaataaaatgaatgataataaatatggtttatcttctggagtttatacgatgaattttgcaagagcgatgagagtttcaaaatcagttagagctggcatagtatttgtaaacacttatagactaatttctccaatggctccttttggaggtattaaggatagtggttatggtaaagaagcaggtatagaatctattaaagaatacaccagaatcaaaacaacttggtataattcatcagaaaaaccaatgtctgacccgttcacaatggggtaat

SEQ ID NO: 199806 - DNA, 598 bp, Unknown
  Bacterial polypeptide expressing nucleotide sequence isolated from the Sargasso Sea
atcttgtagttcgacttcgagagtattggttcacagagatctccatcgtgaagtcctaaaagaaatgaaaagattggcagaaaatctgccggttggcctgccttggttggaaaaaaacgaattgggccctattgtttctgaaattcaatacaagaaaattttaaattatatttcatctgcaaaaaatgaaggtgcagatttaattaccggaggagaaatccctaaagaggaggaattacaagatggcttttttattcaacccactatttttgacagagtcacaatggacatgaagatagggaaggaggaaatttttgggcctgtcatgtcagtcattgagtgggatgattatgaatctatgatttctttggctaatggaattgaatacggattaactgcgatgattgtgactgataacttaaaattagctatggagactgccgaaagggtggaagcgggttatgtttggattaattcaacagggagatatttgggtgcgccttatgggggttggaaacaaagtggatttggtcaagaagaatgctttgatgaattattaagttacactcaaattaaaaatgtgaatatgcgctggtga

SEQ ID NO: 199807 - DNA, 858 bp, Unknown
  Bacterial polypeptide expressing nucleotide sequence isolated from the Sargasso Sea
ttcatttagatgaaccaccaccaatattttgggacgattatgagccttatattaagatgtcagacaatgaaaagttgagatttttaaggcatagacaggcatggagcatgagccagttcctgcatggcgagcagggagctttgctagtagcatcccagctaactagttgtgcaccaacttataatgcaaagctttatgcagcttcacaaacttttgatgaagctagacatgtggaaagctttaatagatatgttcaatcgagaatggagctcatgtatccaataggtaacgctcttaaatcaattttagataaaatccttacagatccaagatgggatcttaagttcattgggatgcagttaattattgaaggactggcactagcagctttcagaacttcaagggacttaacaccagatcctgtcttaaaagatatgcttgatttaataatccgagatgaagcaaggcatgttacttttggcattaattatttagaagagtttgtaacaactttatccgaaaaagagattgaggaaagagctcagtttgcctacgaggcatgctacttaagtaaagaaagacttgtttccatagaagtctatgaacactttggttggaacgttgaagatgcaagacaatttcagctaagttccgaaataatgcaaacattccaaaaacttctttttcaaagagttatgccaaatctgaagagaattggactactaactgattcaatcagaccaaaattcgagaaacttggtattcttgagtacgaagacgatgcaagtgatgctgacatcgactgggctgatctatcaagaccattattcaaagaaactgcagagttagctccataaa

SEQ ID NO: 199808 - DNA, 1027 bp, Unknown
  Bacterial polypeptide expressing nucleotide sequence isolated from the Sargasso Sea
tatgtcagcgaatgatgttaccgatgttgttgaaatttttaatacgcctttaacgggatcatataattgggactatacaattcaagataatagaataaaaaagctttacgagttagggaaagagcttaactggaattctaatatggatattaactgggatagacctgtggttcatttagatgaaccaccaccaatcttttgggatgattatgagccttatataaaaatgtcagacaaagaaaaattgagatttcttagacatagacaggcatggagcatgagtcagttcctgcatggtgagcaaggagctttacttgtggcatcccagctaactagctgtgcaccaacttataatgcaaagctttatgcagcttcacaaacttttgatgaagctagacatgtggaaagctttaatagatatgttcaatcgagaatggagctcatgtatccaattggcaatgctcttaaatcaattttagataagatccttacagatccaagatgggatcttaagttcattgggatgcaattaattattgaaggactggcactagcagcttttagaacctcaagggacttaacaccagatcctgttttaaaagatatgcttgatttaataatccgagatgaagcaagacatgttacttttggcattaattatttagaagagtttgtaacaactttatccgaaaaagagattgaagaaagagctcagtttgcctatgaggcatgctacttaagtaaagaaagacttgtttccatagaagtctatgaacactttggttggaacgttgaagatgcaagacaatttcagctaagttctgaaataatgcaaacattccaaaaacttctgtttcaaagggttatgccaaatcttaagagaattggactactaactgattcaattagaccaaaattcgagaaacttggtattcttgagtatgaagatgatgcaagtgatgctgacattgattgggctgatctatcaagaccattattcaaagaaactgcagagttagcaccataa

SEQ ID NO: 199809 - DNA, 407 bp, Unknown
  Bacterial polypeptide expressing nucleotide sequence isolated from the Sargasso Sea
attgcgaacatcaatgcaaaaaacaatgcaatcaaaatgtgcagtttttagaactgaaaaaactctaaaagagggagttgaagaaataagaaatacttttaaaggaatagattctatatcagtaaaagataaatctttaattttcaatactgacttagttgaaacgttagaatttgataatttaattagacaagcaataacaactatggatgctgcttataatagaaaagaaagcagaggtgctcatgcaagagaagattttccaaatagagatgacaaaaaatatatgcaacatactttaacatggcttaatggtttaaatactaaaattgattatagaccagtccatacatcaacattaacaaatgaagttcaatattttccacctcaagaaagagtttattaat

SEQ ID NO: 199810 - DNA, 1069 bp, Unknown
  Bacterial polypeptide expressing nucleotide sequence isolated from the Sargasso Sea
atgattaaagttggcattgttggtacaggtggaatagctgaatggcatgcaagtgcttttaaagataataaaagttcagatgttgttgcagcatgtgatgtaaataatgatagattaaatgagttttgtgataaatttaatattgataatagatataatagtgtcgatgaacttttagaaaaatcagatgtagatgcaatttcaaacacaacacctgatgcttttcataaagaaatatcaattaaagcaatagaaaaaaataaacatattttttgtgagaaaccgctagctgaaaattttgctgatgctcaattaatgtgtgatgcacttaaaggtaaaaaccttattaacatggttaattttagttatcgtaattcatctgggtatcaagaactttgtaagatggttaaagaaggtaaaattggtaatattatgcatatggatgcaaattacaatcaatcttggctaacatcaaactactggggcaattggaaagaacaagataaatggctttggagattatcgacaaatcatggcagcaaaggtacactaggtgatattggtgttcatatatttgattttgcttctcggccgattggaaagatcaaaagactgaattcttttataaaaacttttcattctaagggagaaaaaattaaagattatatcttagatgcaaatgatactttcttatctatggtagaatttgataatggtgcaatcggtactatcaatgcaactagatttgcaactggttattcaaatagattagaactaagaatatttggagataaaggtgctgttaaaattgaatttgatgatcctattaatgaaggtaataagtttatgtttactaatgatactgaacgagaattttcaagtaaagaagataaattagaatggaaggaaattaaatgccctccttcgcctactaattttgaaagatttattgagtctattgaaagcaatacaaatcatgagcctgattttaaaagaggagctgaaatacagcaaatcctagataaatgttacgaaagtagtgattcaggaaagtggttaaacatttaag

SEQ ID NO: 199811 - DNA, 1141 bp, Unknown
  Bacterial polypeptide expressing nucleotide sequence isolated from the Sargasso Sea
aatgaaaataaaagttgttgataatccccctgtagatcctagagagtttgatttacccgagagctttgatgaaggcaatatcgaagatgtagtagagatttttaacacaccactagtcggtcactataattgggactatacagatgccgattcaaggataaagaaaatctatgaattaggtaaaaaacttaattggaatggctccatagatttagattggtccaaagccataaagaaaggtgaggcaccagttaaggcggagcttattgcaagaatggaagggcccttagctgctttgcccgaagaagaacgcattgaatacatgtggcatgatacagcatggagtcttagtcagttccttcatggagaacaaggtgccctgctagtcgcttcacaactagtttcctgtgcacccacatatcaagcaaagctatatgctgcctctcaaacttttgatgaagcaagacatgtagaggtctttgcaagatatttaagagaagtttcaggagtggaatatcccataaacaaaaacctaaaatcactgcttgataaaattttgtctgaccccagatgggacctgaaatttataggcatgcagataattattgaaggccttgctcttgcagcttttcaaacaaccaaagagacttcaaattgtgctctactgagacaactagtgcattacgtaatcagagatgaagcaagacatgtgacttttggtgttaattacttagaagagtttctagaaacacttacggaagaagaagttgaagacagagctatgtttgcctatgaagcgtgtgtggttatgagaaatagaatcatcaatactgaattgccttctcgatggttcaatattagcgaagaagaaatacttgaaatggtagtgaacaacgaaactcaagatatgttcacaaatatgctgttcagcagagtgatgcctaatcttaaaagaattggcctgcttacagataaggttcttccattgtatgagaagcttaaccttacatcttatatggatgcagaagatgaatttgagatagattgggctgaactcaacaagccattagaatcttcagaggagattgataaacaatccgagaaagaattagcagcgcataccgcgcaaggtctattttag

SEQ ID NO: 199812 - DNA, 1483 bp, Unknown
  Bacterial polypeptide expressing nucleotide sequence isolated from the Sargasso Sea
aatgcctgaattgaaaaaatacaaaatgtttataggaggagaatgggttgactccgacactaaaaaaacttttgaaactttaaatccagaggataataaaccatgggctattgttcctgaggcaagtgcttctgatgtagataaagcagttcaagcagctcaaaaagcctttgaaggagattggcctaaaatattaccgcgtgaaagagcaaagtttctgagagctattggaaataagcttagagataacgcagaattacttggaaaaattgaaactatagatactggaaaactttatagagaaacaaataaacaggcaaattatattgctgagtattacgattattatgctggtatggcagacaaggtcgaaggtacagttctaccaatagataaaccaaatatccaagctataacttcaagaatacctattggtgttattgctgcgattgttccatggaattctcaaatgtttttaacagcaacaaaacttgcacctgctttagcaatgggaaatactgtggttattaaatcctctgaacttgcaccagcagtaatgtttgaatttgcaaaattgatagaggaaactggtattcctaaaggagtagtaaatgttattacaggttttggagatccatgtggaaaagctttaactacacataatttagttgaaaaagtagcttttactggagggcccgaaactgccagacatattattagaaattctgcagaaaatttatcagaagtaagcttagaacttggaggaaaaagtcctgttgcagtgtttgatgatgctcatcaagaaaatgctgttaatggaattactgcaggaatatttggagctagcggacagagttgtattgcaggttcaaggctatatcttcaaaaaggaatttacgatgagttccttgataagctcacaaaaagagctgaaaaaataaaaattggtgctcccatggatccagacacagaaatgggacctttgagtaattataaacagttagaaattattgaaaaaaacataaaaaaaaccactgaacaggggggaaaaataaaatgtggtggtgaaaggcatccattttcaaatgagggatactactttcctcccacaataattgaatgtgataatcacaatcttccaaccgcagaaaatgagctttttggaccagttttatcagttatgaaatttgatacagaaaatgaggtaatagagaaaatgaacgataatcaatatggattatcttctggagtttatactagtgacttctctagaggtctaagagtttctaatgcaattagagcaggtataacgtttgtaaatacttatcgattgatttctccttcagcaccttttggtggaattaaagatagtggatatggaaaggaagcgggaatggactcaataaaggattatactagagttaagacaacttggtattacacatctgatgaaccaactttagatcctttctctataagataa

SEQ ID NO: 199813 - DNA, 619 bp, Unknown
  Bacterial polypeptide expressing nucleotide sequence isolated from the Sargasso Sea
ttctaaaataataaaaaaacttaaagttaagtgcaaatcatatgtttgtgacataactaactatcaagaaataaaagaaattattgataaacaaagtaaaattgatgttttagtaaataacgctggaactaatattcctgaactttttacaaaagcaaaaagagaaaatatggaacatatggtaaaaataaataacatagcagcttttaatttggctcaactttgtgcaaataaaatgattaaagcaagaaatagaaaaaaaattggaggatcaatcgtaaatatgtcttctcaaatggggcatgtcagcggtcctaaaagaacagtttatagtatgaataaatttggaattgaaggtttaacaaaaggaatggctttagaacttgcaaaatttaatataagagtaaattcaatagctcctacttttgttgtgactccaatgacaagcaagtttttaaaggacaaaaaatttaaaaaagatatgttaaacagtattcctttaggaagatttgcagaaatgtcagagatttcgtctgctgttgtttttttagcatcagatgctgcttctatgattactggaacttcattacttgtcgatggcggatggactgcaagataa

SEQ ID NO: 199814 - DNA, 1130 bp, Unknown
  Bacterial polypeptide expressing nucleotide sequence isolated from the Sargasso Sea
aatgtctgaattaaaacaatataaaatgtttattgatggagaatgggtagactcagagagtaaaaaaacatttaaatctttaaaccctgaaaataatgaaccttgggtagaggtgccacaggctagtgaaaaagatattgatattgctgttaatgcagcacaaaaagcttttgatggatcgtggcctaatttatttccaagagaaagagcaaaatatttaaaagcaattgctaatgaattaagagagaatgcggagttgcttggaaagatagaaacaattgatacaggaaaactatttaaagaaacaaaaactcaagcaaattatatagctgaatattatgattactatgctggacttgcagataaagttgaaggtacagttttgccaattgataaagctaacatgcaagtaattacaactagagttccaattggagttgtagcagcaattattccttggaattcacagatgttgctaacagctgtaaagttagctcctgcgcttgcaatgggtaataccgttgttattaaatcttctgaattggctccagcaacattatttgagtttggaaaattaattgaaaaaactggaatacccaaaggagtggtaaatatagtttcaggttttggtgaaccttgtggtagagcattaacttcacataaattagtagaaagagttgcctttactggtggaccagaaactgccagacatataattagaaattcagccgacaatttatctcaagtaagtcttgagttaggaggcaagagccctgttgctgtttttgaagatgctgaccaagaaaatgcattaaatggaattaccgcaggtatttttggggcaagtggacagagctgcatagctggatcaagactttatatacaaaatagtatttatgataattttttagaaaaaattgtaagtagagcaaataaaattaagttagggcctcctatggatactaaaactcaaatgggtcctttaaatagtctcaagcaattagaaataattgaaaaaaatattaaacttactttagaacaaggaggaaaactaaggtgtggaggaaaaagacacacattttcaaataaaggatattatttccctcctacaataattgaatgtgacaatc

SEQ ID NO: 199815 - DNA, 1303 bp, Unknown
  Bacterial polypeptide expressing nucleotide sequence isolated from the Sargasso Sea
atgagtaaacttaaacaatataaaatgtttattaatggtgaatgggttgactctgaaagtaaaagaacatttgaaactctaaatccagaacataatgagccatgggcagttgttccagaagcaagtgctaaagatgttgataatgcagttaaagctgctcaaaaagcatttgagggagaatggccaaagctacttcctagagaaagagctaaatacttaagagctattggagatcaattgagagagaatgcagaaatgctaggagaaatagaaacaattgatactggaaaactctacagagaaacaaaaaagcaagcagtttatatagcagaatattacgactattatgctggtttggcagataaagttgaaggaacagttttgccaatagataaaccaaatgttcaagcaataacaactagaatacctataggtgttatagctgcaataattccttggaattcacaaatgtttttaactgctactaaagtagcgccagcacttgcaatgggtaatacagttgtaattaaatcttcagaacttgcccctgctgttttgtttgaatttgcaaaattaattgaaaaaactggtatccctaaaggcgtagtaaatgtaattacaggatttggagatccatgcggtaaaagtttaactactcacaatttagttgaaaaagttgcatttactggaggtcctgaaacagcgagacatataattagaaactctgcagaaaatttatctgaggtaagtttagaattaggcggaaaaagtccagttgcagtatttgatgatgcagaacaagaaaatgcaataaatggaattacagcaggtatattcggtgcaagtggacaaagttgtatagcaggatcaagactttatttgcaaaaaggaatttacgatgaatttttagataagctttcaaatcgtgcatcaaaaataaaaattggagcaccaatggatccagaaacagagatgggtcctttaagtaattttaaacagttagaagtaatagaaaaaaatattaaagatacaattgatcaaggtggaaaaattaagtgtggaggtgaaagacattctttttcaaataaaggatattactttcctcctacaattatagaatgtgataatcacaatcttccggtagcagaaaacgagttatttggacctgtattatcagtaatgaaatttgatacagaagatgacgtaatttcaaaaatgaatgataatcaatatgggttatcttctggtgtttatactagtaatctatccagagggatgcgagtctcaaaagcaattagggcag

SEQ ID NO: 199816 - DNA, 916 bp, Unknown
  Bacterial polypeptide expressing nucleotide sequence isolated from the Sargasso Sea
tttatcatcaggatttcttctatttggtatttcaatgatttattacgatactgggtcttttaatatgcaaaacctatataatttcactgctataagcgaaataggattatcattagttcttatttctctattttttaaagtttcagctgctccatttcatatttggacacctgatgtttacgaaggatctccaactatatctacactcttttttgcaactttacctaaatttgcatcgttaatatttttattcagggtttatcaagaacttaacatttctgatatcaaatctcttaattacatttttcaaatggtatgtgctatttctttattagtaggagtatatggagccattacacaaaaagttataaaaagacttctagccttcagctctatcaaccacattggttttatgcttctcggaataatgagttatcaatttatgtctgagggtacattatttttttacttgattatttatcttattactacttttggtatttttgctgttttactgaacttgagaactgtagatggggaatttacaaaaatatcccaactcaaaggtttaagatttacctcaaattcaaaatccataagcatgttggtgtttttcttttctctcgcaggaataccaccttttgcagggttcttcgcaaagttcttcattctttcagcttctataaacgatggatttattttattatcaattattgctgttttaagttcagtaattgccgcattctattacttaacaattattaagaatatgtttttcaataaatcagaaatagagttactagatgataataacaaaacaggcaaagttatatttatatcatctggaataattattactttatttttcatatatccagaccctttaattaatttagtagataatcttttcaaataa

SEQ ID NO: 199817 - DNA, 508 bp, Unknown
  Bacterial polypeptide expressing nucleotide sequence isolated from the Sargasso Sea
aaagttggtgctggtgacgaagatggaacgcaagtaacacctcttatttcaactgatcaaatgcaaagagtttcgaattatgtaaaatcaggaatacaatctggtgccaccctaacattagggggagataaagctgatagagatgatggtaatttttatcaaccaacaatttttgacaatgttaaagttgaagcaacaattgcacaggaggaaatctttggtccagttacatctatttttaattttgaagatgaagaagaagctataaatattgcaaattctacaaaatatggattagcctctggtgtgtttactgctgatgatcaaaaagcaaaatggacagcagataggattcaggcaggaataatttggcaaaatgattggtttgtagatggtaccaatcttccaggtggtggatataaaagatcaggttatgggagagacggtggtgttgatggtatttacagtcacggacaaactaaaagaataagtaaaagattgtactagt

SEQ ID NO: 199818 - DNA, 1117 bp, Unknown
  Bacterial polypeptide expressing nucleotide sequence isolated from the Sargasso Sea
gttgctgctgaccgaagagattctcaccgaaccgctgcgttacgagaattttgttttgcatcttccacaaggaccgggtctgggcatcacgctcgactgggacaagatcgaccgcttacggcgcgatacgcgcaagggcgcaagcatcaccatgaactgacggttcattcgctaaccgccaagaacatcaaacgaaggagataccccatgaacaagcaagccatcgacgcgctgctgcaaaaaatcaacgacagcgccatcaatgaaggcaatccgcgcacgaagcagatcgtcaaccgcatcgtcagggatctgttctatacgatcgaagacctcgacgtgcagccggacgagttctggaccgcgctgaattatctcggcgacgcgggcaggagcggcgagctcggtctgttggccgccggtctcggcttcgagcattttctcgatctgcgcatggacgaagccgaagcgaaggccggcgtcgaaggcggcacgccgcgcaccatcgaaggaccgttgtatgtggcgggcgcgccggtttccgacggccacgcgcgactcgatgacggcaccgatccgggtcagacgctggtgatgcgcggccgcgtgttcggcgaagacggcaagccgctggcgaatgcgctggttgaggtgtggcacgcgaatcacctcggcaactactcgtacttcgacaagtcgcagccggctttcaatctgcgccgctcgattcgcaccgatgccgaaggcaagtacagcttccgcagcgtggtgccggtcggttactcggtgccgccgcaagggcagacgcagttgctgctcgatcagttgggccgccatgggcatcgtccggcgcatattcacttcttcgtttcggcgccgggtttccgcaagctgaccacccagatcaacatcgacggcgatccgtatctgtgggacgactttgcgtttgccacgcgcgacgggctcgtgcccgccgtcaggcaggccgagggggcggaaggcaaaccgtacggcgtggacggtcagttcgcgttgatcgatttcgacttcacgctgttcaaggaacgcgacaatctgccgggcgccgaagtggagcgcgtgcgcgccgaagcctgag

SEQ ID NO: 199819 - DNA, 663 bp, Unknown
  Bacterial polypeptide expressing nucleotide sequence isolated from the Sargasso Sea
tactatccaggagaactagagatgataaaaatggtttctcctaccctttcaagattggtccaaaacaattttttgattttgcaattcatccaacttggtctatttcgactttgctgagtggtattcctaaaccaatgaactatgttacatctaaaagtggagatggtatttttaaaagaaaagaaagtagaggtactacagattgggatacacttaaaagagtaagagataaatggaagggtaaacttataattaaaggagtaatgtctcctgatgatgcaaaacaaataaaagaagctggtgcagatgcaattcaagtttcaaatcatggcggcagacaattagatagtgctacggcagcaataaatatgcttccactaatcagaaaatcagtaggaaacgatttccctttaatctttgatagcggaataagaagtggaagtgatatcgtgagagcgcttgcatttggtgcggattatgcaatgattggtagaccagtaatgtatgcaatgggtgctgatggaagaaaaggattaaggagaattgtggaaataataaaagaagaagccagcacgacactggggttagtaggattaaatgatattaatgatgtaacttctaatatagtaatagatagtgctgtaaataaggtaaattactaaa

SEQ ID NO: 199820 - DNA, 1378 bp, Unknown
  Bacterial polypeptide expressing nucleotide sequence isolated from the Sargasso Sea
atgtttgagactattactccaatagacaactccgtcttagttaaaagagaatatgcaacagaagaagatattgaaaaaagtctcagtaattcctattctgtaagagagcattggaaaaatatatctctagaagaaagaaaaaagtcagttttaaattttgtagaaatatttttaaaaaataaggatgtttctagtaatttatgtaagcaaataggcagacctatagcacagtgcccaggagagatgcgaggttttgaagaaagagctcgttatatgattgaaaatgctgatagagcactatcaagagttgtttcaattaaaaatgatgaatttgataattatataaaaaaagaaccactagggactatatttgtaattgcaccatggaattaccctttcaacacttctgttaattcaattgtaccaagtttacttgcaggtaatgcagttatattaaaacattcttctcaaactccactctgtgctgaagaattatatgaggcagctaaacaatcttcattacctaaaaatatttttcagtatttacatttagatcatgatcaaacatcaagaataatttcagattcaagaattaatcatgttttatttacaggttctgtaagtggaggaaaacaaataaaaaaatctataggcaccagatttattggagctggtttagagttaggtggaaaagatcctgcttatgttagagctgattgtgacttagatcatgctgttgaaaatttagttgatggatcatacttcaattctggtcaatcttgttgtggcattgaaagaatttatgttgataaaaaaatatacaatacatttgtagaaaaatttaaagatgtaactgagaaatatgttttaggaaatccactagagatggagacaaatttaggtccagtagtgaagcaatctgctgcaaattatattagatctgaagttaacaacgcaattagtcaaggtggaaagaatattatagataacaaaaaatttaatttagatgatggtaataattgttatgtaagcccaagtgcactcatcaatgtcgatcattcgatgaaatatatgatggaagaaatatttggtccttcagttggaataatgaaagtagaaaatgaaaatgaagctttatctctaatgaatcatagttcttatgggttaacagcaagtatttggacaaatgataagtcttttgcagaaaattttggaaaaaatgttgagacaggaactttttttatgaatagatgtgattacttagatcccggcttagcatggaccggtgtaaaagatactggaattggcgttactttatctgttctaggatttgatcatttaacaagagcaaaaagctatcatataagaaatatttaag

SEQ ID NO: 199821 - DNA, 495 bp, Unknown
  Bacterial polypeptide expressing nucleotide sequence isolated from the Sargasso Sea
aaggtgttgagttaaaagatgcttccaatgatgacattgataaagcactagaaagattaaataaactgaatgcttctacagaaggagatcaagtagctgttcttaaagaaaaaatgcaacaaaatatgcaaaataattttggtgtgtttagaaggggtgatttgatggagaaaggcattgatgaattagccaagactcgagaagaggttgattcaatcttcttaaaagataaatcagcaacttttaacacagcaagaatcgaagctttagaaatgcaaaatttatttgaagttgctgaggcaacggccatcacagctaacgcaaggaaagagagtagaggggcgcacgcaagagatgatttcactgagcgtgatgacgagaactggttaaagcattcaatctactatgcagataccaaggaagtaagcaaaagagatgtgaattacagacctaaaacagtccaagcctttcaacctatggtgaggagttattaat

SEQ ID NO: 199822 - DNA, 400 bp, Unknown
  Bacterial polypeptide expressing nucleotide sequence isolated from the Sargasso Sea
aatgtatcttcaaaaaataaatcttaaaaacaaatatgccttagtcacaggtgcaggtaaaggattgggtagagcatgttctattgcattagctgaggcaggtgcatcggttatagctttaagcagaacaccttcggatcttaataaattagaaaaggatatcaaaaaagttaaaggtaaaattattaaggtttcatgcgatgtaatgaactatgaagatttaaaacaacaattagataaaattaaaattattgatgtgttagtaaataatgctggaactaacattccagaaccctttgaaaaaattaaacaaaaaagcatgaactatctagtagatttaaatctaaaggcagcatttaatgtggcacaacttgttgtgaaaaaaatgcttaaaaaataa

SEQ ID NO: 199823 - DNA, 1024 bp, Unknown
  Bacterial polypeptide expressing nucleotide sequence isolated from the Sargasso Sea
tatgtctcctttaactggaagctacaattgggattacatagttgtagaagacagaatcaaaaagctttacgaattagggaaagagctgaactggaatgtttcgtctgatctagattggtcacaaaattatccaaaggacgagttgatgataaattatgagctatttcagactcctgagagtgtccttagaggttacgacgatctatcagatgaaaaaaaggttgagatggatagacatagagtatcttggaatattagtcagtttctgcatggtgaacagggagcattattagtagcatcgcaactcgtttcatgtgcgcctacttttaatgcaaaaatgtatgccgcttcacaaacttttgatgaagctagacatgttgaaggctttaacaggtatcttaaagagaaaattgggtttcaatatcctgcaacaaatggacttaagtcattaatggacaaaatactcactgatgaaagatgggatcttaaatttattggtatgcaaataattattgaggggctagctcttgctgcttttaataatatgaaatttatattgaatgatggattactaaaacaacttttacattatgttattagagatgaggctagacatgtaacttttggtgtgaactatctagaagattacttaaaaacattatcgaaaagtgagattgatgatagggctgaatttgcgtttgaagcctgcgtggtaatgagaaatagactcatctccggggatgttatagcaagatttcttgattacacgccagaagaagcgcaagcagctgcagagaatacagaacaaggacaaaattttagaactcttttatttactaaaatcattcctaatctaaaaagaattggtctattaaatgacaaggtaatgcctaagtacgaaaaacttggggtattaagttatgcggaattagaagataattttgatattgattgggcagacatgtcaaaaccttatgagactcaagaagaaattgaaagattcattaacgccggtcaccattaa

SEQ ID NO: 199824 - DNA, 627 bp, Unknown
  Bacterial polypeptide expressing nucleotide sequence isolated from the Sargasso Sea
gatgcttcagcctttaaatgctggccgccttaaattaaagaatcgggtggtttttcccgctcaccaaacgttgctatcagaagatggtgtcgtaggtccaagaatgcgggcttattacgctgaacgggcaaaaggtggcgtggcagccgttgtcgttgaaggcggagcggttcatgacacgacggtgaagtttccaaactatttgtgggggcataaggaagagatcatcccctcgtatacggctcttcacaaagaattatctcaatacgggtgtaaaaccattatccaacttgttcacagcggcggccggatgtcttcacatgattcgagactgccgctatgggcgccatcggacgttcggtcagctatctcacctgaaatcccccatgccatgaccactgaagaaatcagccaagtattagatggttatgaaaaatcattcaaaaatgctgttgagggaggtgtagatggcatagagatccacgcagcgcatgaataccttcttggccaattcctctcaccgttaaacaaccttcgtactgacgaatatgggggatcaatggacaaccgaatgacgctactcaacgaagtcgtcatgttggcaagaaaaacagttggtgatgacat

SEQ ID NO: 199825 - DNA, 673 bp, Unknown
  Bacterial polypeptide expressing nucleotide sequence isolated from the Sargasso Sea
aaagatttttattatttaaaaatatgctggcaaataattttaatttttttgactatgattgggggaatatatttaggctggtttaccccaacagaaggaggggcaataggagcaggtggagcaggtttaattgctattttaaataaaaactttaagtttaaagacttggtagaagtaattgaaaacactgcaattacatcaggtatgatatttttagtgttattaggtgctgagttttttaattctttcatagctttaactcaactaccaaaccaacttggtgaaatagccttagaaaataatctttctccttttttaattgtagcttgtattcttgttctatatctatttttaggctgtttaatggatagtttagcgatgatacttttaactattccagtatttttccctttaattatgacacttgaatttggaatgacagctgaggaaacagcaatctggtttggaatattaacccttatagttgttgaagttggattgataacaccacctgttggattaaatgtttttataataaacaaaatggctggtgacgttagtatttcagagacctttaagggcgtattaccatttctagtaagtgatatttttagggttattcttttattctcatttcctggaattactttatttcttttgaatattttttgaa

SEQ ID NO: 199826 - DNA, 878 bp, Unknown
  Bacterial polypeptide expressing nucleotide sequence isolated from the Sargasso Sea
aatgtcaaaaattgaaaattttaaaatgtatattgatggccaatgggtagactcatcttcaggaaaaaaaattgaaacgttaaatccagaaaataatgaagtatgggcaactgttcctgaggctaacgaaaaagatgttgataaagctgttcaatcagcacaaaaggcttttgaaaataattggtctaaacttcatccaagagatagagcaaaatatttaagatctattgcagatcaattaagactaaatgctgaacatcttggaaaaattgaaaccatagacactggaaaactttatagagaaacaaaaactcaagcaaactatattgctgaatattatgattactttgcaggtctagctgataaagttgaaggcactgttgttccaatagataaacccgatatgcaagttacaacaacaagaattcctattggcgttgtcgctgcaattattccatggaattctcaaatgcttttaacagcagtgaaacttgcaccagctcttgcaatgggtaatacggtagtaattaaagcatctgagcttgctccagtaactttactagaatttgcaaaattaattgaaaaagctcaagtgccaaaaggagtaattaatataattacaggacttggtgaaccatgtggtaaagcacttactacccatcatcttgtagaaagaatagcatttacagggggacctgaaactgcaaaacacattgttaaaaattctgctgaaaatttatctcaagtaagtttagaactaggtggaaaaagtcctgtagttgtatttgacgacgcagaacaagaaaatgcattgaatggtattactgcaggaatattggagctagtggacaaagttgtattgctggatcaagacttta

SEQ ID NO: 199827 - DNA, 659 bp, Unknown
  Bacterial polypeptide expressing nucleotide sequence isolated from the Sargasso Sea
tatggcagaaaaaaactacgatttagtagtaattggttctgggcctggtggtgagaaaggtgctgcgcaagctgcatatttcggtaaaaaagtagctttaattgaaaaagaacaagaattaggtggtgctgcagcaaataccggcaccctaccatcaaaaaccttgcgagaaacctctctatatttatcaggatttaaacaaagaggtctgtatggaatggaggtaaattttaaagatcaagttacagctagagattttttatatagagaaaaaatagtttcacaagcagaacgagagagaataaaaacaaatattgaactgcatgacattgatctatttaaaggaaatgcttcgtttatagatcaaaacactatttctattaaacctaacaactctaaggaaatttttattaaaggtgaggtaatactaattgctactggctcttatcccttcagacccccaaatattccttttgagtatcctggagtatatgattcagacaccatactaaaaattctaaagatacctaaaactatgttagtagctggaggaggagttataggctgtgaatacgcatgcatgttcgctgcacttggagttgaagtaacacttgtagaaggaagagatacagttctagcttttcttgataaagaaatct

SEQ ID NO: 199828 - DNA, 1024 bp, Unknown
  Bacterial polypeptide expressing nucleotide sequence isolated from the Sargasso Sea
tgagtcggagttagccggcgatgatattatcctggcgccaggatcggtgcccgtcgaaatcccggcggctcctcttgatgataatcttattgttgattctactggcgcattggaatttaacgcggtacctaaaacgctgggtattataggtgcaggtgttattggtctggagcttggaagcgtatggagtcgacttggatctaaggtggtattgattgaagcgttggatgaatttttgcccgttgcagatcaaagaatagccagggatgcgttaaaaattcttgagggacaaggcctcgatataaaattaggcgctttggttactgaagcgaaagctcaaaaaaatggtgtaaaggtaacctataaagactcagatggagagcatcaggcaaagtttgataagttgattgtggcggttggtcgtcgtccttatacagaaggcctcttggctccggactcaggtgtgaatctggatgaacgaggatttttatatgtaaatgacctgtgttccaccgatgcgccaaatgtttatgcggttggcgatgtggttcgcggaccgcagttggcacataagggcatggaagagggaatcatggttgccgaacgaatcgcgggaaaaaagcctctagtcaactatgatgccgtgccaagtgtcgtttatacccatcccgaaattgcctgggttggaaaaaccgaacaagaattaaaggcggaaggacaagagtttgaagtcgggactttcccatttgctgccagtggacgtgctatggcatcgggggaaactcaaggcttggtgaaaatcatagctgaaaaatcgacggaccgtattttgggtgttcatatattgggacctcaagcttctgagatgatagctcaagcggtaatatcgatggaatttagtgccagcgccgaagatctgggtttgacaatgtttgctcatcccagcttgtctgagtcagtgcacgaggccgccttggctgttggcggtcacgccattcatatggttaatcgaaagaaaaaataa

SEQ ID NO: 199829 - DNA, 919 bp, Unknown
  Bacterial polypeptide expressing nucleotide sequence isolated from the Sargasso Sea
atggtctggaccgttgacgacatcccctcccaggaggggagagttgcgcttgtcacaggagcgaacagcggtctgggcctggccaccgcccgcgccatgagcgctcgcggggcgacggtgatcatggcttgccgctcccggcgcaaagctgaaacggcccggacgcagctgctggaagcggggctcaccggcctggatctgctggatcttgacctggcggacctcaacagcgtgcgtcgtgccgcagccgaggtgagtgatcgctatggccatctggatctgctgttcaacaacgccggggtgatggccccaccgcgtcagctgaccgttcagggccatgaactgcaactgggcgtgaaccacctgggccatatggccctcaccctgcaactgctgccgctgatgcagggccgcaacgatgcccgcgtggtgacggtgacctccggcgcccagtacttcggccgcattcgctgggacgacccaagctgggcacagggctacgaccgttacggcgcctacagccagagcaagctggccaatgtgatgttcgccctggaactggaggcacggcagcaggagcaaggcggcggcatccgctctctggcagcccaccccggcctggcccgtacggatctgcagccaacagcgatcgccagtggcggcaaccgtctggaggctgtggcctaccgcctgatggatcccctgttccaaagcgctgccatgggcgccttacctcagctgcatgccgccacagcagcgacagcgcaggggggagagcactacggcccagaccaactggggggaatgcgcggccacccaacccgctgccgcatcgctccggccgccctcgaccgtgagcagcgtcaacggctctggcaactcagcgaagaattggctggtggccttctgatgccatgac

SEQ ID NO: 199830 - DNA, 732 bp, Unknown
  Bacterial polypeptide expressing nucleotide sequence isolated from the Sargasso Sea
ctcttgttactggggctggaaaaggtatcggaaaagcttgtgcgattgctctagctgaagctggtgctagtttaattattgttagtcgaacaaaaaaagatttagaccaggtctcaaaaatcattaaaaaatttagatctaaatgtaaatcgtatgtttgcgatgtgacaagatactctgagataaaatcagtaatagattctcaaaaaagaatagatattttggttaataatgctggaacaaatattccagaacattttacaaaagtaaaaaggaaagacatggaatacgtagttaagattaatacaatggcaacgtttaatattgctcaattatgctctttaaaaatgattgaattaaaaaatagaaaaaaagttggaggtgtaattattaatatgtcttcacaaatgggtcacgtcggtggaccaattagaagtgtttacaacatgaccaaatttggttttgaaggacttacaaaaggaatgtccatagatcttgctaaatacaatataagagtaaatactgtatgtcctacttttgttgttactccaatgacaagtaaatttttaaaagacaaaaaatttatgagggaggttctgggaaatattccactaggaagatttgctgagctctctgatgttgcgagtgctgtggtgtttcttgcctctgatcaggcatcaatgattactggcacttctttattggttgatggtggatggacttcaaaataat

SEQ ID NO: 199831 - DNA, 1501 bp, Unknown
  Bacterial polypeptide expressing nucleotide sequence isolated from the Sargasso Sea
catgaccacacaagttaagcattacatcgatggcgaattcaccacaggcactggtacatcacaaatcgtggtgaccaatcccgccaataacgtaccgattgccgttattaatagcgctacggccgatgaagtccacgcggccatcgccagtgccaaggcggcttttaagacgtggaaagaagtacctgtgtctgagcgtgcccgtgtcatgttgtgctaccaacacttgttaaaagaacaccacgacgaactggcgactatccttgccaaagaaaccggcaaaacctttgaggatgccaagggcgatgtgtggcgcggaattgaagtggcggaacatgcctgcaacattgcttcattactgatgggcgaaaccgttgagaacgtcgcgcgttcaatcgatacctacagctacactcagcctctgggtgtgtgtgcgggcatcacgccgtttaacttccctgcgatgatcccactgtggatgttcccactggcgattgcctgcggtaacacatttatccttaagccatcagagcaagaccctatgacgccgcagcgcttagttgagctatttgtcgaagcgggtgcgccaaagggcgtattacagctggtgcatggcgataaaactgcggtcgatatcctgctggccgatcctgcggtgaaagccatttccttcgtcggctctgtggctgtaggtcaatacatctataaaaccggtaccgataacttaaaacgcgtgcaagcctttgctggggcgaaaaaccactgcgtgatcatgcccgatgcgaataagcagcaagtgatcaacaacctagtgggcgcatcggttggcgctgcggggcagcgttgtatggcgatttctgtcgcggtatttgtcggcgcggccaaagagtggatccctgagctcaaagaagcgctggcaaaggttcgcccaggtttatgggacgataaagaagccggttacggcccgctgattagcccagctgctaaagcgcgcgtgctcaaacttatcgcccaaggtaaggaagaaggggctgagtgtttactcgatggcagcgactttagcgtggcgggctatgagtcaggtaactgggtcggaccgactatgttcactaaggtcacgaccgatatgagcatctacaaagaagaaatctttggcccagtgctctgctgtatggagtctgattcattagaagatgccatcgaactggttaacgccagcccgtacggcaatggtacttctatctttaccgccagcggcgccgcagcccgtaaatatcaacacgaaatcgaagtcggccaagtcggtatcaacgtgcctatccctgtgccattacctttcttttcgttcacgggttggaagggcagtttctatggtgaccaacacgcctacggtaagcaagcggtacgtttctacactgaaactaaaaccattacttcccgctggttcgagtcggacattgcggtggcagctggccctaatatgagcattaacttgcgctaa

SEQ ID NO: 199832 - DNA, 749 bp, Unknown
  Bacterial polypeptide expressing nucleotide sequence isolated from the Sargasso Sea
gagagtgactggagattatgtttctcaggtggaaccgctagtagaatgtgaggaagcattgtttgttccatcttcaggcattgttgaccaagcatcattaatgagatcatatctaggagagttagagctgtcaggaagcattgcctacaatagtaaatttattaaatctgagctaaagaataatgtccatgtctcaacagttcttaacgaaggtaatgaaattaaaattgagtcttcaattttaatcaatgcagcgggtctttatgctgaagatgttgccaaatcaatatcctccatggataaaacactaattccaaagacatacttcgctaagggaaattatttcgagaccagtaaagatttaaatattaggcacttaatttatcctataccaaatgaagcaagtcttggcttacatttaggtttagatattggcatgcaagtacgatttggtccagatgtagaatggattgatgaaataaattatgatgtagatgagaatagacttgaatctttttataatgatattcgaaaatatatacctacttttgataagggcttattaaaaaaaggctattcgggggtaaggccaaagttgaaaaatcgtggagaaggaaagagtgatttcataatacaaggcgaggagattcacaaaagtaagaatttaataaatctttttggaattgagtctcctggtttaacttcttctttagtcttgggagaacatattgttgaattagttagctgaa

SEQ ID NO: 199833 - DNA, 958 bp, Unknown
  Bacterial polypeptide expressing nucleotide sequence isolated from the Sargasso Sea
aatgaagaaggttgttatttccaataaagttcatactgaagttattgagttattagaaaaaaattttgaagtaattagtaaccaaaatgataaacctctaacttatgaaaaattaaagttcttatgtaaagatgcacatggtgtgatggtattcatgccagatagaattgataagaactttttagataattcaaaaaatttagagatcatctctggagcactaagaggatttgacaatattgatttggaagagtgcataaaaagaaatattaaatttacaatgatcccagatttacttgcttcgccaacagcagaattaacattgggacttcttattggtttatcaagaaatctactaataggtgatgaatatgttaggtctgaaaagtttaaaggttgggaaccaaaattcttctcaaatggaattgaaggaaaaaatgtttgtcttctaggtatgggtaaattaggggttgaagtggctaggaagattaaaggttttaatgtaaaacttttttatcatgatttacaaaaattagattcaatagatgaacaacaactaaacaccaaatatctggaattaaatgatctttttgagaaggctgattatttggttattcttttacctttaaaaaacgatacttaccattttattaactttgaaaacattttaaaaataaaaaaaaattgtttacttattaatacttcaagaggttctgtagtagatgagagtgcaattgcacaagcaattaattctgggcacataggaggatatgcttcagatgtctttgaatttgaagatttatcgataaaagatcgaccaaaaaaaattaatcaggaattattaaatttaaaagataagactttttttactcctcatcttggctcagcagttgatgaagttagactttttattgaattagaagctgctcaaaatattatcaactttttatatcattaa

SEQ ID NO: 199834 - DNA, 1075 bp, Unknown
  Bacterial polypeptide expressing nucleotide sequence isolated from the Sargasso Sea
atgacatgggtaggtttaagtttaagaaatagagttgtaatggctccaatgacaagaaatttttcccctgatggagtgcctaaagattacgctccaacctactatgctagaagggctcaaggaggtgtaggattgatcattaccgagggagttgaagttagtcatcatgctgccagcggctatccgaattgtccaaatctagaatctgatgatgctaaaagaatgtgggaaaaagttgttaacgaagttcatgaaaataattcatctatcttctgtcaattatggcatgtgggtggaataagaaagcccggtatgccacctaatccagaagttcctggattcactccatctggttatgtgcgcccaggaaaaaaagtagcacatgaaatgtctcatgaagaaatacaagaattaataaatatttattccgaggatacaaaagcttgcgaggagctcggatttgatggagtagaaattcatggagcacatggatatttaatagatcagtttttttgggatcaaataaatcacagagacgatgaatatggaggttccattaagaacagatccagatttgcatcagaaattcttcaagcagcaaagtcgaatacatctgagaatttcaaagttggaattaggatttctcaatggaagcaacaagactatgatgccaaaataacatctgagcctcatgagctgaatgaattctttcaaatattaaaaagtgcaggtgcagattttgtgcattgcagtaatcgacgattttgggaaggggaattcgaacctaacggtcttaacttagcaggagttgcaaaaaaggcaacggggcttccaaccatcagcgtaggaagcgttggtttagataaagattttattaagctttatgctggcgatcatcaaacgcaaacggtcgatctaaaaacccttcatgaaaagttaaataaatcagaatttgatctcatcgcagttggaagagcccttttatctgacccagattgggcgaataaagttcaagatggtttagaggatcaaattgtaccgtttgataaaagttttgtggaaaattatgtctaat

SEQ ID NO: 199835 - DNA, 976 bp, Unknown
  Bacterial polypeptide expressing nucleotide sequence isolated from the Sargasso Sea
attatatgaattaggtaagaaactaaattgggatggctctatagacctagactggtcgaaagctataaaaaaagatgaacctccactgaaagcagagttgatagctagaatggaaggccctcttgctgcattacctgaagatgagcgaattgaatatatgcgacatgatagtgcttggtcattgagtcaatttcttcacggtgagcaaggtgcattattagttgcctcacaactagtatcttgtgctccaacttaccaagcaaaactttatgcagcttcgcaaacttttgatgaagcgagacatgttgaagtttttgctagatatttaaaagaagtaactggaattgaatatcctattaataaaaatctgaaatccttgatcgataaaatactttcggatccaagatgggaccttaaattcattggcatgcaaataataatcgaaggattggcgctagcagcttttcaaacaactaaagaaacttcaaattgccccttgcttagacaactggtgcattatgtcattagagacgaagcgagacacgttacctttggagtgaattatcttgaagatttcttaagcactctttcagaagaagaggttgaagatagggcaatgtttgcttatgaagcctgtgtagttatgagagatcgaatcatcaatactgaattgcccgcaaggtggtttaatataagtgaagaagaaattagagaaatgataatcaatgatgaaacacaagatatgtttacaaatctcttattcagcagagttatgccaaacctgaaaagaattggtcttctgactgacaaagtacttccgctttatgaaaagcttaaccttacttcatatatggatgcagatagtgaatttgaaattgattgggcagaacttaataaaccactagagtcgtcaaaggaaatagaccagcaatctgagaaagaattggctgctcatgcagctcagggattattctaa

SEQ ID NO: 199836 - DNA, 827 bp, Unknown
  Bacterial polypeptide expressing nucleotide sequence isolated from the Sargasso Sea
tgcgaaggtgttcgacgacgtgatcgagcgcgtcgcgaagatcgccgcgagcctgaagatcggcccggggatggacccgtcgacgcagatcggcccgctcgtctcggcaaagcagcgccagcgcgtgtgcggctatatcgactcgggcttcggcgagggcgcccgcgccgccgtgggcggccgtgcgatcgacggccccggcttcttcgtcgaacccaccgtgctggtcgacacgacgcaggcgatgcgcgtcgtgcgcgaggagatcttcgggccggtgctcgtcgcgatgccagatttaagcaaaggtgagcaatttgaagagaagttcgttaaaattagcccctttagcaaaatacctgtaattagagatagtgaaacaaaaaaaaatgtttttggatctggagcaatattaatttatttagcagaaaagagtaataaattttatgataaaaataataaattaaatattgaccaatggttgatggctcagatggggctagttggccctatgattggtcagtatcattctttctatcgtttcaataaaggaaaaagtaaatacggcgaagaaaggtattttaaaattactaaagatttgtattctagacttaatataagactatcagagtcaacgtatctcgctggagaagactattcaattgctgatattgcaacttggccatggatagcaagacataaatggcatgatataggattaaaaaatcatgaaaatttatgcagatggtatgaggttatctcaaacagagagcctgttaaaaaaggttatgattttatgggcgcaggtgaaatacctaaaccttaat

SEQ ID NO: 199837 - DNA, 1255 bp, Unknown
  Bacterial polypeptide expressing nucleotide sequence isolated from the Sargasso Sea
tgtgactcggtagacaccgatgacgacaatgacggatttctcgacaccaacgacgacttcgacttcgacccagaggtctgggtggacacagacggagacggcctagccgacttcatcgatccgaactcgacagtagtggcatacacaaccgtacagctgtgcagcaataccccttggtacacaatgtcatcatacccaagcccagcaacaggagcatacctggctgtctcaagcagcgacgacgactccaatgctgacggcgaggaggacgcagagtgtacattcaccctgcctgccggtcagacgctagatgttgtactgcaaactgccagctacggcggtgaggcaatgctacagatcgtcaagccagatggaactgccgtaacatacggctctggctcattcagcacgggcaacacctacaacataggctcgttcacagacgctggatcctacaccatttactacggtgacagctggggcgacggttgcaacccatcgacgttctacggagcttgcttcgtacaagccagctacacctatgtctccgggactacagttccaagcaccaccacggctggaacaagcgtcgacagtgacgacgatggcgacggatactccgatctagatgagggagacgcatacgacactgcaacagcagccctctgcgacgacggtggcgcctacgcatcatccagcaactcgctggatagctccagcactccggctgacatggacggtgacttcacctgtgacgctcttgacagtgacagggacggtgactcgtactccaacacagtggacgtgttcccagacgactcgacagagtgggtagactacgatggagacggaactggtgacaacgcagacaccgatgacgatgcagacggaaccctagacgtcaacgatgccttcccatacgacatctgtgcagacaccgacaccgataacgacggcaaggccgataccatgacggccggttgcacatcagctaccgtactggacatggatgacgacgacgactccgtaatggacgcagacgacgccttcccactggacagcgcagagacactggacaccgatggagacggaataggcaacaacgccgacactgacgacgatggcgatggtgtgatcgatacaaccgatgtatggccactgaacgcatgcgctagcagtgacttcgacagcgatggaagccctgacactctcgtggcaggatgcacatccgcagtggcatcgataggattcgagg

SEQ ID NO: 199838 - DNA, 778 bp, Unknown
  Bacterial polypeptide expressing nucleotide sequence isolated from the Sargasso Sea
atggcacagaaacgcatcctcatcaccggcgcgggcaccggcttcggccgcgaagtcgcgttgcgcctcgccgaacgcggtcacgacgtgacggccggcgtgcgcgtcatcgccgaaatcgacgcactgacggccgccgccaagcagcgcggcaccgcgctgcgcgcgatcaagctcgacgtgacgtcaccacatgaccgcgcccgcgcggccgaactcggcatcgacgtgctcgtgaacaacgcgggcgtgggcgaagccggcgcgctcgtcgacctgccggtcgagatcgtgcgcgaactgttcgacgtgaacgtgttcgggccgctcgaactcacccagcagatcgcgcgcggcatgctcgcgcgcgggcacggcaagatcgtgttcgtgtcgtcgatcgcgggcctgatcacggggccgttcaccggcgcctattgcgcgtcgaagcacgcggtcgaatcagtggccgaggcgatgcacgcggaactcgcgccgcacgggatcaaggtcgcggtcgtcaaccccggcccgtacagcacgggcttcaacgaccggatgatggaaacgacgcgacgctggcgcgatccggccgtgcataccgtgacgcccgagcggctgacgttcccgctcgaacagcacgacccggaggaaatgatcgcgaagatggtcgacgtgatcgacagcggcggcggcgcattccgcaatgtgctgccggcatcgtcggaagcgttcgtgcgcgccgaacaggcgcacgcgtgggagcggcggcagtaac

SEQ ID NO: 199839 - DNA, 1063 bp, Unknown
  Bacterial polypeptide expressing nucleotide sequence isolated from the Sargasso Sea
catgagcgattcgcgcttccatcggctgaccgtggccgacgtgattgccgaaagcgacgacgcgtgctcgttcgtgttcgacgtgccggccgctttgcgcgacgcattcgcgtaccggcccggtcagttcctgacgctgaacgtgccgtgcgcggatgcgcccgtcgcacgctgttactcgctgtcgagcgcgcccggcatcgacgccgcgccgaagatcaccgtcaagcgcgtgcgcgacggccgcgcgtcgaactggctgtgcgaccgcattcgcgcgggcgacgcgctcgacgtgctgccgccggccggcgtattcacgccccgcacgctcgatggcgacctgctgctgttcgcgggcggcagcggcatcacgccggtgctgtcgatcctgaaatcggcgctcgtgcacggacgcgggatgctgacgctgatctacgcgaaccgcgacgaacgatcggtgattttccgcgccgagctgcagcagctcgcgcagcgccatccgggccgtgtgcgcgtgatccactggctcgacagcgtgcagggcatcccgcagcagcgccatctcgaggaactcgcccggccgttcagccagcaggagacgttcatctgcgggcccgcgctgttcatggagaacgcgctggccgcgatgctcggcctcgggctgccgcgctcgcgggtacatgtcgagcgttttgcatcgctgcccgatgcaccggcaccgggggcggcgtcggcggatgcgacggcgtcaagcgttgcagcggcggcctcggcatccggcgacggcgcggcgatcgagacggtgctcgacggcgacgcgttcgcgttcgacagcgcccccggcgaaacgctgctcgacgcgatgctgcgcgcgggcgtgccggcgccgaattcctgccggatggggcagtgcggcgcgtgcatgtgccggatcgagcgtggcgaagtcgcgctcgacagcaaccacgtgctcgacgacgacgagatcgcggccggctggacgctcgcctgttgtgcacggcccgcgagcgatgcgctgcgcgtggtgtttcccgactga

SEQ ID NO: 199840 - DNA, 745 bp, Unknown
  Bacterial polypeptide expressing nucleotide sequence isolated from the Sargasso Sea
catgtcagaccgagtcgtcctcgtcaccggcgccgcgcgcgggctcggcgccgtcatcgccgaacgttttcatgcggccggctaccgtgtcgcgctggccgatatcgccgccgacgccattgaggcgcacgcacgcgaactcgacccgagcggcgaacgcgcgatcgcgctgccgctcgacgtcacgtcgaaacgcgatttcgaagccgcgcgcgatgcgctcgtcgcgcgctggggcgcgatcgacgtgctcgtgaacaacgcgggcgcatcgaaggtcgtccccgcgatggagatcacggccgagcagttcgaccaggtgatcgacgtgaacctgcgcagcgtgctgttcggctgccaggtgttcggccagtacttcgcgacacgcggcgcgggccgcatcgtcaacatcgcgtcgctcgccgggcagaacggcggctcggcgacgggcgcgcactacgcggccgccaagggcggcacgctgacgctcaccaaggtgttcgcgcgcgatctcgctgcccgcggcgtgaccgtcaacgcgatctcgccgggcccgctcgacttgccgatcgtgtatgaaagcgtcgcgccggagaagctgcgtcaggtgctcgcgagcctgccgggcggcaagctcggctcggccggcttcgttgcggatgcggccgtgctgctcgcgtcgggcgacgcgcatttcgcgaacggcgcatgctgggacatcaacggcgggttgtacatgcgctga

SEQ ID NO: 199841 - DNA, 680 bp, Unknown
  Bacterial polypeptide expressing nucleotide sequence isolated from the Sargasso Sea
cattgcactagctgaagcaggtgcaactgttatagctttaagcagaacatcctcagatcttaataaattagaaaaggatatcaaaaaagttaaaggtaaaattattaaagtttcgtgcgatgtaatgaattatgaagatttaaaacaaaaattagataaaattaaaattattgatgttctagtaaacaatgcagggactaatattccagagccctttgaaaaaattaaacaaaaaagtatgaattaccttgtagatttaaatttaaaagcagcatttaacgtggcacaacttgtcgtaaaaaagatgctaaaaaataaaaaaagacctggctcaattataaatatgtcatctcaactaggtcacgtgggtatgagcggtagaaacatatacaatatgacaaaatttggaatagaaggactaactaagggaatgagtgtagagttagcaaaaaaaaatatcagagttaacacggtagcacctacttttgttgaaacacctatggttaaaaacttttttaaaaacaaaaaatttaaaaaattagcccttggtaatatcccgatgggaaaagcggctactgaaagtgatgttgcaacaacagtatgttttttggcatcatcagcttcctcaatgataaccgggacatcaataattatagatggtggatggacagctcaataat

SEQ ID NO: 199842 - DNA, 3196 bp, Unknown
  Bacterial polypeptide expressing nucleotide sequence isolated from the Sargasso Sea
aatgaaaatcgctatcctccatctcagcgacatccatatcaaagagacaaaaacacatgtccttgataggtgggaaaaaatttgcgcaactgccaacaatcttttgcccgacgttcgtgcggtattcgttgtggtgactggagatatcgcgtacggtggtgctgaggcggaatacacattggccgaaaggttctttagtaacctactcgattgtattcgcgcccgggtagcgagtgacgcgattgtctacatggtcactgttcccggaaatcacgacggcacattcaaacaacaaaatgccgcgcgaaaagcaattatcgatagtgttattaatgacggggttatcgacaacagtgtaattgacgcctgcgtagctccgcaggtccattatttttcgttttcggagcgcttttcgtccgattacgtgacctttagggaccggctgtgggtggagcacgaggtgaaggtcgataaccacgttatcgcattcagcgctatcaacgccagttggttgtcgcaggtccctgagacgcccggcaagctcgttttcccggtaaagcggtacctgaatctcgcgaaggggaacgcgtcggtgcgcattgcactgatgcatcatccgctgaactggtacgcacagggcacctatcatccgctgagggagctttgccgcagtcagtatcaggtcgtgatgtccgggcacgagcattcggcaagcgcgtcaacggtaagcgacctgcaattcggtgacagtttgaaccttgaagcaggcgctctcgacccgcatgaggcggacggtgtgagttcgttctctgttgtgaagcttgacctagacaaacaactgtttgcaaaagtagatttctcgtgggatgggcagcgatacatgccgacggacggagatgcagtctgggactccttcgttccgctaccccctcggcgaaatgacggattcgcattaactgacgaaacgaaagcgcgtctcgaagacgtcggcgccacgttcactcatccgagcaaggaacgtattgtcctatccgacattttcgtgtatccagacttgcatgagctttctgggcttgaactggacgggccgaagaccattagtgccgaaatcctcgcaaagcaaatcaataaaataggtaaggctctggtccgtggagatgaccaatttggtaaaacggcgctcttacacacactttataaagcatattttaatgcaggctacgtgccggtgctggtgaccggtcgcgacctcttaagtgagtcggatgaacggctggagcgcatgctgcataatgccatcgagtcgcagtacgggcctgatacggccactcgatatggtcaactagagaaaacctcaaaggtgctcctcgtcgacgacttggacagaaccagtcatcgaccagagacacttgcaaaggcactggagtacgttgaccgtcatttccagcaagcagtcgtttctgtgagcgaacggtttgacatagcggagctttcatcagctcgcaccgccgaggtgggtgcccggttttcgcaatataggcttctcggttttgggtacaagctacggtcgtcgcttatccgacggtggttgacgctaggtgatgcatacccgcatgccgacctccaggcgcgtgttcacgatgccgaaaccataatcgatgcagttattgggaaaggacttgttccaacgacggcattcaatgtattggttctgttgcagtccctcgaggtcagcgcaaaaggttcactagccaattccgggatggctgaatattatgagttccttattcgacgaagcttgttccaagcgaagcttcggggcgaggaactcgatgaagtttttagctacctcgcacatctcgcatggctctttcactctaacagcgtaaagagtctcgacgaaactgaccttgagcgatttaattctgaattttcgaccaacattcatcgcaccgacctcgcgactagactggagctgctgactagatgcaaagtgttagcgaaaaccgggagtagctactcatttcggtacgagtatattcgctacttctttgctgcaaaatatattgcggataatatcgaggacagacctgagcttcgcgatatggtgctccatgcgtgccagcatctctatctccgggacaacgccaacatcgttctgtttttgacgcatcatagtgccagtaaatggataattcgggaagttgcaggagttcttgcgaagctagtcgctgatgtttcaccttttgacctgcaacgcgacaccgctgtcttaaacaagtgggtcacgcaacgcgcaaagataatcgtcgatgccagcaatgttgaagccaatcgctcgtccgagcgggagcgagccgatgaggcttcgaggttgccggagcatgaaccggaagaggaggttgcgtccctcgaggagttggaccaggtcgctcagctgaatttgctcttcaaaacaagcgaaatactcggacagatactcaagaatcgatacggttctctcgacaagtccttcaaacgtgaacttgtccgtgaattatttgaaggccccctgcgcggcatcaataggttcctgatacttgtcaacgaggcccccgaagcattgatggaggaggtcagtgctaaattgattgaccggctgcccaagctctcgaaagaggacgcggatagacacgcacagaggttgattttttactctctgggaatgtttgcagagggcctccttgcccggcagggtgaactggtggggtcaccaaaactgaaggaaacggtcgagcaggttgcgcgagaggggcatgacacattcaatctggtcagcatcgctgcgcagctgagctatccaggacatgtcccaatggctgccattgagcaactagcgaagaaggtgaaggcgaatgtttttggccaccgattgctccaagggattgtcgcgcggcacatgtacatgttctcgcttccaatagacgaacgacagcagctagcgcaagccgttggcatcgatttgcgaatccagttggccaacgaggtgcgtgctgacgccaagaagcttccaggccatagcaggcagccgtcaaatacgaggaatctcttgggacggctccataagtctttcctactgcggaacgagaaggctatcgacgccgttctggaaaaaacgaaggacgccaagaacgagggcaatggcgagtcgtcttga

SEQ ID NO: 199843 - DNA, 511 bp, Unknown
  Bacterial polypeptide expressing nucleotide sequence isolated from the Sargasso Sea
gatgtatttaaaaaattttaatttaaaaaataaaacagcacttgtcactggagctggtaaaggtattggaaaagcatgtgctattgctttggcacaagcaggtgcaaatttaataatcataagtagaactaaaaaagatctattgggcgtgcaaaaaaaaattatttcttacaaaagaaaatgtacattttttgaatgtgatttatttgatatagaaaaattagatactgtttttaaaaaaattagaaaaattgatattcttgtcaataatgcaggaacaaatcgtccagcgcattttactaaaatcaaaagagaagatatggattatatgatagatcttaatttaaaaatagcttttcatgttgcccaattatcaatcaagaaaatgatggttaacaaaaatagaaaatctataggagggagcataattaatatgtcttctcaattaggaaaagttggcgcgcctaacagaagcatttataatatgtcaaaatttggaatagaaggataa

SEQ ID NO: 199844 - DNA, 397 bp, Unknown
  Bacterial polypeptide expressing nucleotide sequence isolated from the Sargasso Sea
aatgcaaaaaataatgcaaaaaaaatgtgctgtttttagaactgaggatttaattaaaagtggtataaaggaatttgaaactgttgaaagaaaaatggaaaatattcaagttaaagatcaatcacttatttttaatacagatttagtagaaacattagaattgcacaatttaatggaacaatcaaaagtaacattatattcagctcttaatcgaaaagaaagcagaggtgctcatgctagagaagactaccctgaaagagatgataaaaattggcttgttcatagtctagtatggttagataaagaaggaaatataaaattagataagaagcctgtaaatttaaataccttaactaatcacgttcaaccaatcccacccaagagaagagtgtattaa

SEQ ID NO: 199845 - DNA, 766 bp, Unknown
  Bacterial polypeptide expressing nucleotide sequence isolated from the Sargasso Sea
tctgcaacacaaggtcgtgatcgtgaccggcggcgcgtcgggcatcggtgccgcgatctcgatgcggcttgccgaagaaggcgcgattccggtggtgttcgcgcgccacgcgcccgacgatgcgttctggcgcgtactcgcgcagaagcagccgcaggccgcgtgcatcccggtcgaattgcaggacgatgcgcagtgccgcgatgccgttgcggaaacgatcgcgcgcttcggccggctcgacggcctggtcaacaacgcgggcgtcaacgacagcatcgggctcgaggccgggcgcgatgcgttcgtcgcatcgctcgaacgcaacctgatccactactacgtgatggcgcattactgcgtgccgcatctgaaggcggcgcgcggcgcgatcgtcaatatctcgtcgaagacggccgtcaccgggcagggcaacacgagcggctattgcgcatcgaagggcgcacagctcgcgttgacgcgcgaatgggccgtcgcgttgcgcgacgacggcgtgcgcgtgaacgcggtgattccggccgaggtgatgacgccgctgtaccggaactggctcgccggtttcgacgaccccgacgcgaagctggccggcatcgcgggcaaggtgccgctcggccaacgcttcacgacggccgacgaaatcgccgatacggccgtgttcctgctgtcggcgcgcgcgtcgcacacgacgggccagtggctgttcgtcgacggcggctatacgcatctcgaccgtgcgatcagctga

SEQ ID NO: 199846 - DNA, 975 bp, Unknown
  Bacterial polypeptide expressing nucleotide sequence isolated from the Sargasso Sea
tttgcaaacacaaggtttcaatattgttaaaaattacaggagctatgtcatgagaaagattgttcactttattgcaggtaaagattttgaggatagcagcgaaaataccgcgtcggtatttgcgcctaacacaggtgaagtacaggctgaagtcagcttggctaacacttcaactttggcctatgcaattgaaacagcccaagctgcacaggttgagtgggcagcaacaaatcctcaacgacgcgctcgtgtaatgttcaagtttaaagagctagttgaagcaaaccgcgatcgcctagcggcattattatcaagcgagcacggtaaagtgttggttgatgcacaaggtgatattcagcgcggtcttgaagtgattgaatttgcctgtggtattcctcatgcgcaaaaaggtgaatataccgaaggcgcaggcccaggaatcgatgtgtactccatgcgccaagcacttggtgtagtggcaggtattacgccatttaacttcccggccatgatcccaatgtggatgttcggtgtggcaattgcctgcggtaacgcgttcattttaaagccatcagagcgcgatccgtcagtacctgttgaactggcaaagcttatgattgaagcaggccttcctgcaggtgtacttaacgttgtacacggtaacaaagaagtggttgatggtattttagatcatcaaactattaaagcggtgagctttgtaggctcttctgacatcgctaactacgtgtacgagcgtggcgctcgtgcaggtaagcgcgttcaagccatgggcggcgcgaaaaaccatggcatcgtaatgcctgatgcagatctagatcaggtggtaaccgacttagtaggtgctgcgtacggcagtgccggtgaacgctgtatggcgctaccggttgtcgtcccagtgggcgatgaaactgctgagaaactgaaagccaagcttattccggcgattaaagacat

SEQ ID NO: 199847 - DNA, 421 bp, Unknown
  Bacterial polypeptide expressing nucleotide sequence isolated from the Sargasso Sea
gatgaccacatccattcccgttgtggtggctggtgccctcggccgcatgggcgccgaagtgatcaaggccgtggtcggagccacggactgcaccctggttggggccgttgacaacaccccgggcaaagagggatgtgatgtcggactcgagctgggtctgggggagctggaggtggcgatcacggccgatttcgaaggctgcctctgcgcggtgagccagtcggcaagggatgcgcaagccggcgcggtgctggtggatttcacacatccatcggttgtttacgagcacacccgggcggccatcgcctacggcgtgcatccggtgatcggcaccacaggcctctccccggaacagctcagtgatctgacccagttctctgccaaggcatcgatcggcggcgccgtgattccgaacttttcc

SEQ ID NO: 199848 - DNA, 1197 bp, Unknown
  Bacterial polypeptide expressing nucleotide sequence isolated from the Sargasso Sea
ccgaatgcgcgcccgccatcggcgcggcgctcgcgcttgagtcgggcaagagcgtggccgatgccaccaatgaggcaatctacgccggccagatcacgcgctaccacgccgagtgggcgcgccgcatcgaaggcgaggtgattccgagcgacacgcccgacgaaaacctcgtgctgcatcgtgaaccgatcggcgtggtcgcgtgcctgatcccgttcaattacccggtctatacgttcatgcgcaaggtggcgcccgcgctgatcgccggcaataccgtggtggtgcgcccgagcaacaacacgcctacctcggcgttcgagatcgcgagagcggtggagaaggccgggctgccggccggcgtcgtgaacattctcgccatgaatcatgcaaccgccgaggcgctttgcacccatcccaaggtcggcatgatcacgctgacgggcagcgtgggcgccggccgcaaggtgctcgactactgcaaggcgaatatcgccaagccctcgctcgaactgggtggcaagacgcccgccatcatcgaggcagatgccgatctcgagaaggccgcacgcgatctggttgcgtccaaaaccactcactgcgggcagctttgcacggcaatcgaacgcgtctatgtgcaggaaagcgttcatgaccgtttcgtcgcgctgctgaagaaaaacatgagcgcggtggaaagcggcgatcgcagcgaacaacctgcgctgatggggccgctcgtcaacgaggcgtcgcgcgagtcgattcacggcatggtggagcgtgcaattgcagcgggtgccacgctcgaaaccggcggcaggctgccgcaaggcaagggctttttctatccggccacgttactgtcgaattgccggcaggacatggaaatcatccaggaagaaaccttcggtccgatcatgccggtcgtcaaataccgcacgctggatgaagcgctggagatggccaacgaccaccagttcggtttgtcctcggtgctttataccgagaactaccgcagcgcgatgaagatcgccaatggcatcgaggctggcgagttgtatgtgaatcgcacgccggccgatccgtatcaaggtttccacgcaggttggaagcgttcgggtctcggcggcgacgacggcaagcacggcatgctcgaattcacgcagacccgtctggtggtcatgaagtactgac

SEQ ID NO: 199849 - DNA, 838 bp, Unknown
  Bacterial polypeptide expressing nucleotide sequence isolated from the Sargasso Sea
ggctctaacaacacataacttggttgaaaaaattgcttttacagggggtcctgaaactgcaagacatataattagaaattcagctgaaaatttatctgaagtaagcttggagcttgggggaaaaagtccagtagcagtatttgatgacgcacatcaagaaaatgcaataaatggaattactgcaggaatttttggtgcaagcggtcaaagttgtattgctggctcaagattatatttacaaaaaggaatttataatgaatttttagataagcttactaaaagagcagaaaaaataaaaattggggcccctatggatcctgaaagtgaaatgggaccaattggtaattttaaacaattagaaataatagaaaaaaatataaaattaactgtagaacaaggtggaaaaattaaatgtggaggtaaaagacatccattttcaaatgatggatactattttcccccaacaattattgaatgtgataatcataatcttcctgtagcagaaaacgaactttttggaccagtactttctgtaatgaaatttgataatgaagaagaagtaataaataagatgaatgataaccagtacggtttatcatctggagtttatactagcgatttttcaaggggtatgagagtttcaaaagcaattagagcgggaattacatttgtaaatacttataggctaatatccccatctgccccatttggtgggatgaaagatagcggttacggtaaagaagctgggatagattcaataaaagattacactagagttaaaacaacctggtactatacctcagatgagcccacaatggaccctttctctatgagataa

SEQ ID NO: 199850 - DNA, 412 bp, Unknown
  Bacterial polypeptide expressing nucleotide sequence isolated from the Sargasso Sea
ttactatataggtggatgtttgtttgatcatgttaaagaaaatatgagaatttataaagaagaaatttttggcccagtactttcagtagttagagtaaaagattttaatgaggctactaagttgattaatgaacatgagtttggcaatggaaccagtatttatactagagatggagatgttggaagaacttttgccagtaatattaaaattggaatggttggtataaatatacctatacctgtaccagtggcattccatagttttggtggttggaaaagatctttatttggagatcaacatatgcatggagtagaaggtgtgagattttacacaaaactaaaaacaataacttcaagatggccatctggattaagatcagatcctgaatttgttatgccaacaatgaagtaa

SEQ ID NO: 199851 - DNA, 976 bp, Unknown
  Bacterial polypeptide expressing nucleotide sequence isolated from the Sargasso Sea
gtgattgcatattattcaaggagagcaaaagcagaagttgggttgattattacagagggaattgaagtaagtcataaggcttcaagtgcatatccaaatgttcctagattggatagcaatgaggctaaagaagcttggaaaaaggtcgtagagggaattaaaaataacaatggggcagttattgcacaactatggcattgtggaggttttagaaagctaggcatgcaaccaaatcctgaagtacctggtcatacagcctctggacttgtaaaacctggtaaaaaagtagcccatgagatgaatttaaatgatattaaggaaacaattgatgcttatgcatcagatgcaaagatatgtgaagagattggatttgatggagttgaaatacatggagctcatggttacttaatagataattttttttggagcggaacaaatattcgtgaagatgaatatgggggctcaatagaaaatcgctcacaatttgtttcagatattattaaatctgttagagagaatgtcagtgaaaattttattgttggcttaagattttctcaatggaagcaacatgactttgaagctaaactcgcatctaatcctgaagaacttaaaacaattcttacttcacctgtagaatctggtttggattatttacattcaagcatgagaaggttctgggaaagcgaatttgcaggctcaaaggaaaacctagcctattggactaagaaaataacaaagatcccaacgattggtgttggcagcgtgggactggattcagattttattgatatgactgcaccagcaacaccaacaagtattgacaaagcaatagatgatattacgaatgacaaatatgatcttatagcagttggcagagcattgttatctgatcatgaatgggttttaaagatgaaggaaggcagagttaacgatgttattccgtatacaaaagacgcattgctaaatctttattgat

SEQ ID NO: 199852 - DNA, 470 bp, Unknown
  Bacterial polypeptide expressing nucleotide sequence isolated from the Sargasso Sea
aggtgctaatttagttgtcgatggtagaaatattaaacttcaaggttatgaaaatggtttttatataggcggatgtttgtttgataatgtaaaaaaagacatgagaatttacaaagaagaaatattcgggccagttttatctgtagtcagagctaaggattttgatgaggccacacaactgataaatgaccatgaatttggaaatggtacaagtatttatactagagatggagatgtaggtagaacttttgcaagtaaaattaaagttggcatggtcggaataaatattcctatacctgtgccagttgcctttcatagctttggtggttggaaaagatcattatttggagatcagcatatgcatggtcctgaaggagtaagattttatacaaaattaaaaacaataacttcaagatggccctctggtgttagatctaatccagaatttgtaatgcctacaatgaagtaaa

SEQ ID NO: 199853 - DNA, 1785 bp, Unknown
  Bacterial polypeptide expressing nucleotide sequence isolated from the Sargasso Sea
gttgatttcttttttgatgcttatgagaatgcgattagaaaagtaggtgaaaaaaatgctctactatcttcttcttttcatgaaatatcaattaaattatctgctattcatcaacgatatgaagccactaaaaaagatagagttacatcagaacttttagaaagagtttatgagttatgtttgcaatctgctcaacatgatattgctctaaccattgatgcagaagagcaagacagattggagttaagcctctatttaataaaagaattagcttcaagaaaaaaaatacaagattggggtggtcttggtttagcaatacaagcgtatgggaaaagagctccaataatagttaaattcattgaagagcttgcttctaaaagaaatggaatgatgatgaggttagtcaaaggcgcatattgggatcaagaaattaaaatacatcaaactaaaggtgctccagacctaccagtatttacatcaaaatcattcacagatataaattatttagctactgcaaaaattatttcaaaaacaaaaaatattagaccttattttgccactcataatgctcacactattgcagggattatggatctttacaaagggagagagaatgaatttgaattccaaagaatatttggaatgggtgatttaacttacaggaatgcaaaaaaagtatatgaagattttccattaacaagagtctatgctcctgttggttcaaaaaaagaactccttccttatcttgttagaagattgcttgaaaatggagctaatagttcattcgtaaacaaatacctttctaaagaaatacctgttagtgacgtagtaaaaaatcctatagaaattgcttcggctaatttagaagaaggtaatttcttaaaaattgttccaaggccgatggacatattctcaaatagagataattcaattggctttgattttggtgatttagaggatataaaagaattggagaacaatatgaaagatttccataataatgagttcaaagcttgttcaattattaatggcttggatgtggctgaagaatatgaagccaaaaaagcccctttcgacaacaaaaagcatataggtgaaatctcatatttgtctaaagataaattagaaaatattgagttagatgaatcttgggctgaactgagtcttgaagaaaggattaaagttctaaataaagttgcaataaacattcagaataatagagataagtttttttatcttttagctaatgaagctggcaaaactttgaaagattgtgatgctgaagttagggaatctatagattttattaactattattgccatcaagctgaagagttatttaccaaagaagaattagaaggtccgacaggagaaaaaaattatctagtgcatgcaccgaaaggaaaattcttatgcattagtccttggaactttccaatggctatttttgtaggtcaaatttctgcagctttagtaactggtaatagtgttattgcaaaaccagcagaagatacatcaataattgcatatgaaataattaaattatttcatgaagctggagttccaggatcagcattgcaactaataattggtggaagagaaataggcaatgaactaacaaaaaatgatcaactaaatggagttgctttcactggttcatcagaagctgcgaagaagattaatgttaatctcgctaattcagatggcccaataaaaacattgattgctgaaacaggtggtcaaaatgtaatgtttgttgattcttcgtctttaaaagagcaagtt

SEQ ID NO: 199854 - DNA, 1543 bp, Unknown
  Bacterial polypeptide expressing nucleotide sequence isolated from the Sargasso Sea
cgaaggcagcacgttaactgacccggtgacgggcgaagcgctggtgcgcgtgtcgagccaggggctcgatcttccacgcgtcttcgatttcgcccgcgagcaaggcggcgccgcgctacgcgcgctcacttatgcagagcgcgccgcgcgtcttgccgacatcgtcaagctgttgcaggcgaagcgcgacgattactacgcaatcgccaccgccaactccggcaccacccacaacgactcggcagtcgatatcgatggcgggattttcacgctttcttattacgcgaaacttggcgcgacgctaggcgacgtgcacgcgctgcgcgacggccacgtcgtttcgctcagtaaggaccagtcgttcagcgtccagcatgtgctcacgcccacgcgcggtgtcgccctctttatcaacgcgttcaatttcccgtcgtgggggctgtgggagaaggccgcgcccgcgttgctgtccggtgtcccggtgatcgtcaaaccggctaccgcgaccgcgtggctcacgcagcgcatggtcgcagacgtggtcgatgcaggcattctgccgcagggggcgctatccgtcatctgcggcagctccgcgggcctgctcgatcaggtacaggccttcgacgtggtgtcgttcaccggctccgctgaaaccgccgcgatactccgcgctcacgcggcctttgttcagcgcggcgcgcgcctgaatgtcgaagccgacagcctgaacagcgcgatcctctgcgccgacgccgcacccgatacgccagccttcgaactgttcatcaaggaagtggtgcgggagatgaccgtgaagtcggggcagaaatgcacggcgatccggcgagcgttcgtccctgaggccttactcgaagccgtgctcgatacgctgaaggcaaagctcgcgaagatcaccgtcggtaatccgcgtaacgacagcgtgcggatggggtcgctcgtgagccgcgaacagtatgagagcgtgcttgctggaatcgccgcattgcgcgaggaagcagtgctcgcgtttgacggctcggccgtgccgcctgtcgacgtggatcccgcgattgccgcgtgcatcgcgccgcatctgttcgtggtcaacgatcccgatcgcgcgacgctgctgcacgacgtcgaaatcttcggaccggtcgctacggttgccccgtatgagccggccagcgacgccggcgaactgcgcgaggcacacgccatcgcgttggcgcggcgcggccgcggctcgctcgtcgcctcggtctattcgaacgacgatgcgcacctcgcccgggtcgccctggaactcgccgacacgcacggtcgcgtccatgcggtctcgccatcggtgcaaggcagccacaccggccacggcaacgtgatgccaatgtcgttgcatggcggtcccggtcgcgcgggcggcggcgaggaactgggcggcttgcgggcgctggagttctaccatcggcgtgccgccatccaggcatcgaataccggcatcgatgtattaacgcaaacggcccactcgctcgaaagctga

SEQ ID NO: 199855 - DNA, 363 bp, Unknown
  Bacterial polypeptide expressing nucleotide sequence isolated from the Sargasso Sea
gtgctcctggcgtgactaaagaaaatccggccttcagcgaggaaattttcggtccagttgcggtggtagttccgttcgacacggacgaggaggcgatagcgctcgccaacgacacggagtacggactcgcgatggccatcgtcacatcaaacgtaggccgcgcgttgcgcatgggcgaacgtctgcgcagcggccttttgcacatcaacgatcagacggttaacgacgaggtgatcaacccattcggtggtgtgggtgcatcgggaaacggaacgagcgtcggcggcccagcgaactgggaggaattcacgcaatggcaatggctcacggtcaagggcgaagcgccgctttatccgctctaag

SEQ ID NO: 199856 - DNA, 1186 bp, Unknown
  Bacterial polypeptide expressing nucleotide sequence isolated from the Sargasso Sea
accgattagaattttcggtattatgaataatgtaaccttgcttgcagttccgttgtttatttttatgggaactattcttgaaaaatcaggcattgctgcaagtatgttgaaaaatatggcattagcttttagaagtattaagggtggtttgtctatttcaattattttagttggtgctttacttgcggcaagcacaggtattgttggagcaacagttgtgactatgggattaatgtctctccccattcttattaatcaaggatacgataaaagcttttctgcgggactagttgcatcaactggaacacttggacaaattattccaccatccattgcattagttttgcttggcgatgttatgtctaatgcctatcaaagagcacagaatgatatgggaattttttcacagcaaacggttactgttggtgatttatttattggatcaatagtgcctggtgcattaatttgcattggctatcttatttatactatttataagaaccaaataaacccaaatattaacgaccatactattgattctaaaattaatataattaatttatttaaaactctagctctcccattcttattaattttcttagtactaggttcaatctttgctggaatagcaaccccaactgaagctgcagcaattggagcatttggtgcattaattattgcattggtaaatggaaaaattacttttgcatttattaaagagtcttcagaaaaaacagcaatagtgtcaacaatgatatttacgattcttattggtgcctcaatcttttctttgatctttagaggtgttggaggagatgaattgataaaccttatttttagttcgattccaggtggttcatacacggcacttatttttgtattagtggttatatttttattaggatttatcctcgactttatagaaatatgttacgtgattgttccgctgatagctccgccgctcttgatgatgggctttgatccagtttggttggcaattttatttgcaatcaacttacagacatcttttttaacgccgccttttggattttctttattttatttaaggggcgtagctgatcaaagtattcaaacagctgaaatatataaaggcgtgataccttttataggaattcagcttttaatcttgattttagtaattatcttcccaattctgattgtataa

SEQ ID NO: 199857 - DNA, 757 bp, Unknown
  Bacterial polypeptide expressing nucleotide sequence isolated from the Sargasso Sea
cgtcaaagttaactttgcagaagtttctcttgaattgggtggtaagtcacccttcatcgtgttcgatgatgcaaatattgaaagcgccgttaatgcctcaattgctggtatttttggggcaactggacaaagctgcgtcgccggttcacgcctctacttgcatgaagatattgcagatgaatttcttgaaaagatgattgctttaacccgtcaaattataattggtgaccccttagaagaagatacccaaatgggtccgctatgcacgctgggacaattagagaatatcgagattgaggtaaaaaatgccaaacaggagggcgctaagatattggttggaggtaagcaaccagaggataaatcaggtctattctatgagcctacaattattgagtgcccaaaccaaggcttgagaattgtggataaagagctttttggacctgttttatgcgttcagcgttttaagacagaggatgaagttctctctctagctaatgatacggaacatggactagccgcaggaatattcacccaaaattcagcacgttccttgcgtatggcaggtgctgtgagagcaggcattgtatgggttaatacctatcgggtcgtttcgccaatagcagagttcggaggcgtaaaagggtctggctatggtcgcgaaagtgggttccaagcgatttatgactatacccgtcccaagaccatatggatgaatacgtcagatgacccaatggcgaacccttttgtaatgcgatag

SEQ ID NO: 199858 - DNA, 841 bp, Unknown
  Bacterial polypeptide expressing nucleotide sequence isolated from the Sargasso Sea
aatgagtaaacttaaaaaatatcaaatgtatattgatggacagtggatcgatgctgaaaataataaaacatttgaaactttaaaccctgaaaataatgaaccttgggcaattgttcctgaagcaagttctaaagatactgataaagcagttaaagctgcacaaaaagcattcgaaggtgaatggcctaaattacttcctaaggaaagagcaaaatttttaagagctattggagatgagttaagagaaaatgcagaaatgcttggagaaatagaaacaatagatactggaaaattatttagagaaacaaaaaaacaagcaatctatattgcagaatactacgattactatgcaggtttagctgataaagttgagggtacagttttgcctattgataaaccaaatattcaagcaataaccactagaataccaataggtgtggtagcagcgattatcccctggaattctcaaatgtttttaactgctactaaattagctccagcacttgcaatgggaaatacagttgtaattaaatcatcagaactagcaccagcagtattatttgaatttgcaaaattaattgaaaaaactggaataccaaaaggagttgtaaatgttattactggatttggagacgcgtgtggaaaaactttaacaacgcatgatttagttgaaaaaattgccttcacaggtggaccagaaactgcaagatatataattaaaaattcagcagaaaatctttctgaagtgagtttagagcttggaggaaaaagtccagtggctgtttttgatgatgccgagcaagaaaatgcaattaatggaattacagcaggaatttttgga

SEQ ID NO: 199859 - DNA, 601 bp, Unknown
  Bacterial polypeptide expressing nucleotide sequence isolated from the Sargasso Sea
aacgagttagctaaaaaagtagaagccttaaaaattggacctggcatggataaaagttctgaaatgggtcctttggtcactaaagaacatctcgaaaaagtaaaaggttatgttgatttaggagttaaagaaggtgcaaaattagttgtagacggaagagacataaaacttcaaggatacgaaaacggttattatataggcggttgtttgtttgatcatgttaaaaaagatatgagaatttataaagaagaaatatttggacctgtattatcagttgttagagctaaaaattttgatgaagctgttcaattggtaaatgatcatgaatttggaaatggaacaagtatttatacgagagacggtgattctgggagaacatttgcaaataaaattaaaattggaatggttggaattaatataccaataccagtacctgttgcattccatagctttggtggttggaaaagatctttatttggagaccaacacatgcatggacctgagggtgttagattttatacaaaattgaaaactataacttcaagatggccttctggaatgagatctaatccagaatttattatgccaactatgaaataat

SEQ ID NO: 199860 - DNA, 397 bp, Unknown
  Bacterial polypeptide expressing nucleotide sequence isolated from the Sargasso Sea
atgcaaaatattatgcaaaaaaaatgtgcagtttttagaacaaatgatctaattcaaagtggaattgaagattttaatacaatagaaaattctttaaataatatttttgttaaagataaatcattgattttcaatacagacttagttgaaactttggaattgcataatttaatgtcacaagcaaaagtcactcttcattctgctctaaataggaaagaaagtagaggggctcatgcaagagaagattttacagaaagagatgatataaattggctaatgcatagccttgtgtggcttaacaataaaggtgaaattaaattaggaagaagaccagttcatatgaataccttaactaaccatgtgcaatctattgcaccaagcaaaagagtatactagt

SEQ ID NO: 199861 - DNA, 1103 bp, Unknown
  Bacterial polypeptide expressing nucleotide sequence isolated from the Sargasso Sea
agtactagaagaacttccaaggaaggttttagaatttcctttagataacgatcttaatttaacagaaaaagaagttgaagatgttgcagagatttttaagactcctctgactggttcttacaattgggattacacaatacaagataatcgtattaaaaggctctatgagcttggaaaagagttgaactggaatgtagagaaggatattgattgggatcaacctttgccagaaaaagaggacaatccacctgctattttctgggacgaatatgagccttaccaaaagctttctacagaggataaattcaagtttcttcaacacagggcttcctggtctatcagccaatttcttcatggtgaacaaggtgcactgttagtggcttcacaattagtttcatgtgcaccaacctataatgcaaaactatatgctgcttctcaaacttttgatgaagcaagacatgttgaagccttcaataaatatattcaaaaaagagtgggtctatcttatccaataggacatggccttaaatctcttcttgataaaattctttctgatcctagatgggatttaaaatttataggcatgcaaatcattatcgaaggcttagcgctagctgcatttaatgttgcaagacaaggaacaaatgatccggttttcaaggatatgctttatctaattaccagagatgaagccagacacgtaacgtttggtgtgaattacctagaagaatttgttcaaactctttccgaagaggagagagaagatcgtgctatgtttgcttacgaagctgctgtggtaatgcgttctagacttatggcagccgacgtttactctaattttggttgggatattgatgaaacggttgcattccagagcaaagcagatgtaactgcaaattttcagcatttacttttcactagagtaatgccaaatctttcaaagataggtcttattacagataaggtcagaccgctatatgatgacttgggtgtcttagatttagaaagttggcctaatgatggcgaaattgattgggtttctcttgaaagaccccttgatgctaaagaagataattcagaatctgaaatcgtagctatttaac

SEQ ID NO: 199862 - DNA, 1105 bp, Unknown
  Bacterial polypeptide expressing nucleotide sequence isolated from the Sargasso Sea
tatgaaaataacacaagtagacaattgccctccgggactgagatacttcgacaaagacgatctcgaaagcaagctggaacctcaagatatcgaagatatagttgaaattttccaaacccctctgactgggtcttacaactgggattatactgaggcagataataggctaaaaaggttatatgagcttggcaaaaagcttaattggaatgccactttagacctagactggtctaatcagccctactcattagaggaatgggcgacagatccacaacaccagcaactagcaggattcaagccgtatgatgatttacctgaagaaaagaagattgaatgctcttggcacttgcttgcaagcagtttgagccagattgtccacggtgagcagggagctctattagtagcttcacaactggtttcttgtgctcctacttacaatgcaaaattatatgcagcatcacaaacctttgatgaagctaggcatgtagaggttttcaacaaatatctccaagaaaggattggttggaattatcctgtaatgcctggtctcaagctacttttagataaaattctttccgacccaagatgggatttaaaattcataggaatgcaaattatcatagaaggccttgcacttgccgcctttgaaagacaaaaagcggcagctatggatcctttattgaaagatatcttctatctggttataagagacgaagcaagacatgttacttttggtgtcaattacctagaagaatttgttgcaactctttctgataaagaaagagaagatagagcagagtttgcctacgaagcgtgcgttgtaatgagaaatagatttggatctgacaatgttatgaaacactatggatggaatgtagaggaagctcaagaagtcctcaatcaatctgagaatgcgaagctcttcaataatcttctttttgccaagataatgccaaatttaaaaagaattggtctattaactgaaaaaacgcaagaaaaatacgaagaaatggatatattacaattccaagacttggaagatcatgggaatatagattgggatgagctttctcaacccctagaatactcctctaaaactgcttag

SEQ ID NO: 199863 - DNA, 739 bp, Unknown
  Bacterial polypeptide expressing nucleotide sequence isolated from the Sargasso Sea
atgaagaacaaacaatataagattgataaaggtcttatgctatttactcaaccacgctcgccatttttttacggaaaaattagattaaacagaaaatatgtcactaagtctttcgcaccaataactgatttagaagaagctaaagctatgttatttgattggcagagggagttgcttattaaaaatactatgccccttgaatctgcttcctcctcagaaaattttaaatcacggtctgaatatattgagcatgttcctgtagaaaatgattttcaatttttggaagttggcaggtttgatcctaataaaaaaaatatagaagaaagaaaaataaattttgttgaaatttatggagattataatcagtcagaagcatcaaatcagtctcacagatgtttagactgtggtaacccatattgcgaatggaaatgtcctgtacataattacatacccgattggttaaagctggttaatgaaggcaatatttgggaggccgccgatctatgtcatcaaactaattcgctaccagaaatgtgtggcagagtttgccctcaagatcgcctatgtgagggagcttgtacactcaatgatggctttggagcagtcagtataggtaacattgaaaaatttatcactgataaagccattgatatgggatggaagcctgacctaagtaatagagtttggactaataagaaagtagcaataattggagctgggccagctggtataggttgtg

SEQ ID NO: 199864 - DNA, 862 bp, Unknown
  Bacterial polypeptide expressing nucleotide sequence isolated from the Sargasso Sea
tatgtcaaaaaatataagtaaactctctggaagaaaaggtcttaaagataatctctttaagcgaatgattaatacagcgaacaagagtaaaaatggtaaagaaattaaacaactcgctgaagaatatcatgttggaatgtcaactattcacggagcagaaagtttttacgaatttttaagacctgagcataaagagaaaaaagcatggatatgtaatggaagcgcatgtatgtgcgcaggaacacaaggtaaagtaagaaaaaaattatctgaaaaattgggcgaggacaaaatcggtatgatgttttgtttaggtcattgttatgaaactagttcttttcactacaatggtcataattactcaggaaatgatattgatcaaattgatgaaattattaaaggtaaaaaaattaatacaaaaaatattaattcagcaagtcatgctacaaaaagtatattaatgggcgaagacttatcttctgtcgaaaaatttaaagatctactatcacaaatattaaaaaaagataaaaaagaaattcttaaaactataactgaatcaaatctttgcgggagaggtggtgcaggatttcctactggcatgaaatggaatttttgcagtcaacaaaaagtaaaaaaaaaatatgttgtttgtaatgctgacgaaggtgattccggtgctttctctgacagatatcttttggaagaccagccattaaaggtattatttggaatgatagtttgtggttatattattggaagtgacgaaggtgttctttacattagaggtgaatatcctaaatctatagaaattattaatcatacaattaacgagcttaaaaaattaaatcttttgggtaaagat

SEQ ID NO: 199865 - DNA, 808 bp, Unknown
  Bacterial polypeptide expressing nucleotide sequence isolated from the Sargasso Sea
atgattttaaaaaataaaacatttgataatagtttagcatttttttttatttcaattttaccaatttcaataattattggtcctgccatttcattgttaaatatattatgtatatcttttttatttattattatttactttaagtccaaagatataaattttcaaaaaaaagagttaattttattttttttaatattttatatttatttaattttaaattcttttttaggaattgattttgaaaactcatcaacaagaagttttggctttttaagatttattttattatttttagcaattaactacttttttttaaaaattgagaattttaataagatatttaaaatatgggcaattatcttatctttattagctatagatggtttatatgaagtaatatttaaagctaatatttttggatggggtgatttttcagactctgcaaaccaaggtcaaaggattgttagtttttttaaagacgagcctgttgtaggatctttcttattttgtttcattttattactatctggatatatgcttgaaaataaggagcttaaaaataaaaaaatttttttcaccttatttttctcatttttatttttaattattttattatctggagagagatcaaattttttaaaaacgatttttgcatctgtaatttttatatttatttctagagagtttagcaaagcctatattgtaaaattattcctttttttaactattgctttagtaataatatttaattcatactcttatttgtttaaacagtattcatatttagttaactcattgtcatttagtg

SEQ ID NO: 199866 - DNA, 1126 bp, Unknown
  Bacterial polypeptide expressing nucleotide sequence isolated from the Sargasso Sea
atgagatcaaaaaaagttaataatcaacctcaagagataacagattatcctgagattgatccaaaagaccagaatgcaattgaatgcattaatgaaatatttatgtctcctttaactggaagctacaattgggattacatagttgtagaagatagaatcaaaaaactttacgaattagggaaagaactgaactggaatgtttcgtctgatctagattggtcacaagattatccaaaagataagttaatgataaattatgagctatttcagactcctgagagtgttcttaaaggttacgatgatttatcagatgaaaaaaaggttgagatggataggcatagagtatcttggaatattagtcagtttctacatggtgaacaaggagcattattagtagcatcacagctcgtttcatgtgcacctacttttaatgcaaagatgtatgccgcttcacaaacttttgatgaggctaggcatgttgaaggttttaataggtaccttaaggaaaaaattggatttcagtatcctgcaacaaatggccttaagtcattaatggacaaaatactcactgacgaaagatgggatcttaaatttattggtatgcaaataattattgaggggctagctcttgctgctttcaataacatgaaatttattttgaatgatggattactaaaacaacttttacattatgttattagagatgaagctagacatgtaacttttggtgtgaactatctagaagattacttaaaaacattatcaaaaagtgagattgatgatagggctgaatttgcgtttgaagcctgcgtggtaatgagaaataggctcatctccggggatgttatagcaagatttcttgattacacgccagaagaagcgcaagcagctgcagagaatacagaacaagggcaaaattttagaactcttttatttaccaagattattccaaacctgaaaagaattggtctattaaatgacaaggtaatgcctaagtatgagaaacttggagtattaagttatgcagaattagaagataattttgatattgattgggcagacatgtcaaaaccttatgagactcaagaagagattgaaagatttattagcaatcctcaccactaat

SEQ ID NO: 199867 - DNA, 1567 bp, Unknown
  Bacterial polypeptide expressing nucleotide sequence isolated from the Sargasso Sea
catggcagaacaatatttcatgggactagatggtttcatctggttcgttggtgtcgtagagaatcgtaatgaccctgctgaacttggtagagtccaagttcgttgtctaggatatcacaccgaagatctatctctcatacccaccgcagatttgccgtgggctcatgtcatgcaccctgccactgaccctgccgtacagggtttgggtaatagtccctcttttcttgttgagggtacttgggttgtcgggttttttcaagacgcaaaagataaacaacaacctatcgtcatgggtacgttgcctggctacccacaatcaacaccagataccacaaaaggttttaatgatcctacaggaacataccctagtcaaaatcgtgaactaactggagaagcaatcagtaagtttaaatcttctggacactcactcaatgaaagtgatgtcagtcgattggctagaggtggagattcagaacaacattcctctcttataaaacgaagagccttaaaacaagatagtgtacccattgcaacagaaccatataacactaaaacagataatacacaagttactggcccaaaacgagagtcttggaatgaacctgatccaagaggtcacagttccagtaaatcaccataccctaccgcaaactatccctacaatcatgttcatgaaagtgaagctggtcatattcatgaggtagacgatacgccaggcggcgagcgtttgatgcaacaacactccagcggttctttcacagagatacatccagacggaagtaaggtagtcaaggttgtaggagataactacgaaatcattgcaggcaaatcaaacatactggtggttggtgatacgaatattacttacgatggaaatgtccgtcagttaatcaagaaagattatgttctggaagttgagggtgattactctataaaggttcataaaaataacagggtgaagataggagctggtggtgctggaaatctatacgaggaagttacaggtagtcacacatacaatatcaatgggggagtgagaggtcgtgtaggacgagacattgatattaatgttggtaggaatgaatcaagattaatcggtggaacctatgcgatagtaggaactagaggtatgactttaaatagtgcatttggttctactgttattacatcaacaaaagatatatcaattacatctggttcacttggttcaatagatattaaagcaggaacaaccgcaagtatggctggtgttgcagtaacccaattaggtggacttgcaattgctgtaggagatattactactaccactattagtctatcatctaatttatctgttggtcttacctcgcctacctttaatatcggtgtctctgcaattactgctgcacaagcagttcttgcttccgatattagagctgcaattccctgtatagtaaacataacaggtgcaacaaacataacaggtgtaacaaacatagtaggtgcaacaaacgtggtagggtcactggcagcaacaacgatgacagcaccaattgcacattttccactccattcggtacacatttaa

SEQ ID NO: 199868 - DNA, 1108 bp, Unknown
  Bacterial polypeptide expressing nucleotide sequence isolated from the Sargasso Sea
tatgaaaattcggaaccaagatgggcccccagaggatttactttacttcgatgaagacttagatctgtcccaaaaacaagttgaagatgttgttgagatatttaagacccctctcactggagcatataactgggattacacgattgcagacaacagaattaaaaaactttatgaattaggtaaggagcttaattggaatggctcaattgatttgaactgggactatactcaccctactgatgaaaaactagttgaacctgatgaagagttacctcatgaggcgctagaagcttatcaagctctctcagaagaagaaaaaatactttttgatagacataatactgcggaattaatgagtcaatttcttcatggagaacaaggagccttacttgtagcatctcaattagctagctgcgctccaacttataatgcgaaactttatgctgcctctcaaacatttgatgaagcaagacatgttgaagtattcaatagatatcttcaggataaaattggtattcactacccgattaatccatctttaaaattattacttgataagattctcactgatgaaagatgggacttaaagtttattgggatgcagataatcattgaaggtttggctcttgcggcatttcaaatgcttaaagctattacaaaagacccactgttaaaacaattactccactatgttgttcgtgatgaagcacgtcacgtaacatttggaataaattatcttgaggactacttaacaacattatcaaaagaagaaataaatgaaagagctcagtttgcttatgaagcatgtgttatttctagagatagacttgtaaatactcaggctgaacagagattcctaaagatgactgctgaagaagctagagaatttcaattaagtactggtacttttgaaatgtttagaaacttcttattttcaagagtaatgccaaacctaaagagaataggtctattaacagatgaggttaggccaaaatttgaggcacttgggttgctagagtatgagcatgcgccagatgattttgaatgtgattgggcagaaatgaaaaagcctcttgaaaaatttggacaaattccaaccaatctataa

SEQ ID NO: 199869 - DNA, 1141 bp, Unknown
  Bacterial polypeptide expressing nucleotide sequence isolated from the Sargasso Sea
tatgaagataaaagttgttgaaaatccccctatagatcccagagagtttgacctgccagaaggtttcagtgaagaaaatattgaagacgtcgtcgaaatattcaatacacccctaattggacactacaattgggactatactgatgctgatacccgtataaagaaattatatgaattaggtaagaaactaaattgggatggctctattgacctagactggtcgaaagctataaaaaaagatgaacctccactgaaagcggagttgatagctagaatggaaggccctcttgctgcattacctgaagatgagcgcattgaatatatgcgacatgatagtgcttggtcattgagtcaatttcttcacggtgagcaaggtgcattattagttgcctcacaactagtatcttgtgctccaacttaccaagctaaactttatgcagcttcgcagacttttgatgaagcgagacatgttgaagtttttgctagatatttaaaagaagtaagtggaattgaatatccaataaataaaaatctaaaatctttgatcgataaaatactttcggatccaagatgggaccttaaattcattggcatgcaaataataatcgaaggattggcgcttgcagcctttcaaacaactaaagaaacttcaaattgccccttgctaagacaactggtgcattatgtcattagagacgaagctagacatgttacctttggagtgaattatcttgaagatttcttaagcactctttcagaagaagaggtagaagatagagcaatgtttgcttatgaagcctgtgtagttatgagagaccgaatcatcaatactgaattgcctgcaaggtggtttaatataagtgaagaagaaattagagaaatgctggtcaatgatgaaacacaagacatgtttacaaatctcttgttcagcagagttatgccaaacctgaaaagaattggtcttctcacagataaagtacttccactttacgaaaagcttaatctcacttcatatatggatgcagatagtgaatttgaaattgattgggcagaactcaataagccactagagtcatctaaggaaatagaccaacaatctgagagagaattggctgctcatgcagctcaagggttattctag

SEQ ID NO: 199870 - DNA, 1108 bp, Unknown
  Bacterial polypeptide expressing nucleotide sequence isolated from the Sargasso Sea
aatgaaaattcgtaaacaaaatggtcccccagaggatttgatatattttgatgaagatcttaatctcactcagagtaacgtagaagacgttgtagagatattcaacacacctttaacaggttcatacaattgggattacactatttctgacaatagaattaaaaaattatacgaattaggtaaggagcttaactggaacggatctatagacttaaagtgggattatactcatcctgctgatgaaagacttgttgaaactgatgaaccattacctcatgaagcacttgaagcatatgaaaagctctctgatgaagataagattttatttgataggcactctacagcagaactaatgagtcagtttctgcatggtgagcaaggtgctctccttgttgcatcacaactcgcatcatgtgctccaacatataatgcaaaactatatgccgcttcacaaacttttgatgaagcaagacatgttgaagtgttcaataggtatctacaagaaaagattggtatccattatcctatcaatccttcattaaagttgttgttggataaaatacttactgatgaaagatgggatctcaaatttataggcatgcaaattattattgagggtttagcgcttgctgcctttcaaatgttaaaagcaattactaaggatcctttgcttaagcaattgttacattatgtagttagagatgaagcaagacatgtaacgtttggaataaattacctggaagaatttattaaaacactgtcaccagaagaaattgaagaaagagctcagtttgcttacgaagcatgtgttatttctagagaaagacttataaatacaaaagcagaacaaagatttcttaatatgtcagctgatgaggctagagaatttcaaatgaatactaaaaccttcgatatgtttaggaactttttattctcaagggttattccaaatttatctaggattggtttattgactgataatgtcagaccaaaatttgaggcgctcggtttacttgagtatgagaatgctccagacgattttgaatgcgattgggctgaaatgaaaaaaccacttgagaaatttggtcaaataccaacagctttataa

SEQ ID NO: 199871 - DNA, 1126 bp, Unknown
  Bacterial polypeptide expressing nucleotide sequence isolated from the Sargasso Sea
catgaaatcgaaaaaagttaataatcaacctcaagagataacagattatcctgagattgacccaaaagaccaaaatgctattgaatgcattaatgaaatttttatgtctcccttaactggaagttacaactgggattacatagtagtggaagatagaatcaaaaaactttatgaattaggtaaagaattaaattggaatgtttcttctgatttagattggtcacaagattatccgaaagatcagttgatgataaattatgatctatttcaaactcctgagagtgtgcttagaggatatgacgatttatctgatgaaaaaaaagttgagatggatagacatagagtttcttggaatattagtcagtttctgcatggtgagcaaggagcattattagttgcatcacaacttgtctcctgtgcacctacttttaatgcaaaaatgtatgccgcttcacaaacttttgatgaggctagacatgttgaaggctttaatagatatcttaaggaaaaaattggatttcagtatcctgcaacaaatggccttaagtcattaatggacaaaatactcaccgatgaaagatgggatcttaaatttattggtatgcaaataatcattgaaggactagctcttgctgcttttaataatatgaaatttatattaaatgatggattactgaaacaacttttacattatgttattcgagatgaagctagacatgtaacttttggagttaattatttagaagattatttaaaaacattatcgaaaagtgaaattgatgatagagctgaatttgcgtttgaagcctgcgtagtcatgagaaataggctcatctctggggatgttatagctagattcctcgattacacaccagaagaagcgcaagcagctgcagaaaatacagaacaaggacaaaattttagaactcttttatttaccaagattattccaaacctgaaaagaattggtctattaaatgacaaggtaatgcctaagtatgaaaagttgggggtattgagttatgcagaattagaagacaattttgatattgattgggcagacatgtcaaaaccttatgagactcaagaagagattgaaagatttattagtaatcctcaccactaa

SEQ ID NO: 199872 - DNA, 1072 bp, Unknown
  Bacterial polypeptide expressing nucleotide sequence isolated from the Sargasso Sea
ggtcaatggtcgacggatctggactttcgtctgcattgtttggatcagttgcatcagggccttgtcaaccatgtcgaggaactgacagagatcacgatcgctgaagtgggcgcgacccgtatggcgtgctcaaccattcaggtggtcgaacctttgaagtttctcccgttctatatggaagtggcacgaaactatgattggcggacggatctagggacggctgagacgctcggcggagagtgcgtcagatggtatgagaaagaaccggtgggggttcttgctgcgatcacgccttggaatgtccccaatcagattaacctggcgaaaattgttcccgctcttgctgcgggatgcaccgtcattttaaaaccggcgcctgatacaccgtggactggtctggctcttggcagaatcgtcaccgaacacactgatatccctgatggagttgttaatgtcgtgactgcgtccgatcctgcaagtggcgcctacctgactgctgatccgcgcgtcgatatgatcagttttaccgggtcgacggcgacagggaaaaaggtgatggaggcagccagcgccaatgtcacaaaagtcttcttggagcttggagggaaatccgctctgatcgcccttgatgatgtggatgactttgggatggtcgcagcgacagcggcgtttggcatggcgaccgtcagcgggcagggatgcgcgctttcgacaaggatccttcttcccgagtcacgctacgaggaaggcatcgaagccatcgcgtcgatgatggcggccgttccccccggcgacccgactgatgcggcgacgatgatgggcccactcattaatgcccgccaacgtgaccgggtcgaatcctacgtccagtcagctgtcgatgatggggcacgtattgtttgcggcggtgcacgccccgatcatctcgaaaaggggttctattatgaaccgacattgattggcggtgttgataatgcgatgcgagtcgcgcaggaagaaattttcggccctgtgcttgtcgctatcccctatgaggatgatgatgaagccattgcgatcgcaaatgattcta

SEQ ID NO: 199873 - DNA, 850 bp, Unknown
  Bacterial polypeptide expressing nucleotide sequence isolated from the Sargasso Sea
atggtgggaacaacaaaatatgtcaatgcatcacagattctttcttacgctagtgctacttcttctactgacattaacgggggtactattgatggtgtcactctaggtacaaacagcgcagtaactcaggcggtagtagatgatatcaatttgaatggtgcaacaattggtcatacatctgacacagatcttatgaccctggctgatggaagcgtgacctttactggttctactgttatcgcaacagctgatgtgaatggaggagctgttgatgcagtaacgctaggaaccaacagtgcagtgacgcaggcggttatcgataatgttaatattgatggagctataataggtcatacatctgatacagaccttatgaccctggcagatggcagtgtgacttttactggttctactgtaattccagcagcggatgtaaatggtggagcgatcgatgctgtgacgctgggaacaaacagtgctgtgactcaggcagtgatagataatgtgaatattaatggtgtggaaatagggcatacagctgatacagatctcatgaccttggcaaatggaagtgtgacctttactggttccacggtgattccaacagcggatgtgaatggaggcgcgatcgatgcagtgacactgggaacaaacagtgcagtgacccaagcggtaatagatgatattaatttaaatggtacaaccatagggcacacagacgatacggaccttttaaccctggcaaatggaagtgtgacctttactggttccacggtgattccaacagcggatgtgaatggaggcgcgatcgatgcagtgacactgggaacaaacagtgcagtgacccaag

SEQ ID NO: 199874 - DNA, 1048 bp, Unknown
  Bacterial polypeptide expressing nucleotide sequence isolated from the Sargasso Sea
atttgatggagctgcaaatgtattcgattattatgctggcttaactgataaaattgaaaataaacttataccttcaggaaatgatacatttaactatattgttcttgagccatttggtgtgagcttgcaaatagttccttggaactatccaatagcactttttgctagatcagttgcagtaagtttagttgtaggaaatactatagtaataaaacctcctgagctatgcccaatttcatcaaatatttttggagaaatttttaaagaagtagaactaccagatggtgttataaatatagtgcatggatatggagaagttacagggaaaaaattagttgatcataattctatagatcaagttgttttcactggttcgcctgaggttgcatcagaaattttaaagagaaccgctgacagaatcattccatgtcatcttgaactaggtggtaaatctgcagctataatttatccagatgctaatattgataatgcagtagatagcacgattaaaggtatttttaagcctaatgctggccaaatatgtgtagcaatgtctagagtgattatacatcaaaaaataaaagatgagtacatgacaaaattatttgaaaaaactaaaaaattaaagattggggcaggtagtgataataatacagaagttactccattaatttcaactgaacaattgcaaagggtttcaaattattgtcaatcaggagttcaatctggagcagaattgatcataggtggtgaaaaacatgatcaagaaaatggcaactattacaaaccaactatatttgataatgttgatccaaaatcaaccattgcccaagaagaaatatttggtccagttacaagtatttttaattttgaaacagaagaagaggctatagaaatagcaaattccacagattatggtcttgcctcaggtgtttttacaaataatgatgaaaaagctaagtggaccgctgatagaattgaggctggaattgtttggcataatgattggtttgttgatggagttaatttgcctggaggtggttataaa

SEQ ID NO: 199875 - DNA, 802 bp, Unknown
  Bacterial polypeptide expressing nucleotide sequence isolated from the Sargasso Sea
atgaatcgttttgagaatcgagtagctcttgtgactggtggagcttcaggaatcggcgctgcttctgtccgtcgtttagttaccgaaggagctcaggtgatgatcgctgacttggatggtcagggcgccgaacagctagccagcgaaataggagccatgactgacactttcgaagttgatgtcgctgattcatcagctgtagacgacatggtcaaagccactgttgaacgtttcggtcgactagatgtccttttcaataatgccgggatcgtttccaccggcactgtagacacgttaagcgatgagcattggaagcgagtcatggatgttgatttgagttctgtgatgtacggctgtcgcgctgttatccctgtgatgagagctcaaggtggtggagctatcgtgaacactgcttcaatttcgggattgtttggggactggggaattcctgcctacaacgccgctaaaggggctgtggtgaatttgactaaagctatggccgctgaccacgcacgggacaacattcgtgtgaatgcagtgtgcccaggaggagttgaaactccgttagtcgccgaagttgttgcgagccgaagagcccaagttgaatataaacgtctcgttccccaaggccgtatgggtaagcctgaagaaatagctgccgcggtcgcatttttggccagcgatgatgcgagttacgtaactggccacaaccttgttgtagacggtggggtgactgtgacgactggccaacccaatttcacggcgatcgctgaacgctggtgggacccactaaaaaattaac

SEQ ID NO: 199876 - DNA, 706 bp, Unknown
  Bacterial polypeptide expressing nucleotide sequence isolated from the Sargasso Sea
caagctcaaccttgaacttggaggaaaggcgccggcaatagtgcttgaagatgccgacctcgatctggcagtcaatgcaattaaggcatcccgggttatcaatacaggccaggtgtgtaactgcgcagaacgaatttatgtgcacactgcggtagccgataaatttatagaaaagttgagtagtgcgatggcagcgacgcgctatggtgacccaatgaaacagtccgatctggaaatgggacctctcattaaccaagccagtctggataaagtcatctccatggtgagtaaggcgaaaagcgagggtgcacaagtcatcaccggcggtaaagttgcagatatcggcccgggatttcattacgaacctactgttcttgcagggtgccactcagacatggagatcatgcaaaaagagatttttggaccggtattgcccgtgcaagtagtagccagcctggaggaagccgttgaattagccaacgcctctgaatacggcctgacatcctcggtttacacccgagatctcaggcaggccatgcgtgcaattgacttactggactatggcgaaacctacattaatcgtgaaaactttgaagccatgcaagggtttcatgccggtacccgtaagtccgggattggcggtgccgacggcaaacacgggctctatgaatatacccgcacccacgtcgcctatgtgcaaaactaa

SEQ ID NO: 199877 - DNA, 916 bp, Unknown
  Bacterial polypeptide expressing nucleotide sequence isolated from the Sargasso Sea
ggtgcgatcgatgcagtgacgctaggtacgaacagtgcagtgactcaagctgtgattgataatgtgaacatcaacggaacagagataggtcatacatctgatacggatcttatgacgttggcagatggtagtgtgacctttacgggttctactgtgatcccaacagcggatgtgaatggaggggcaattgatgcggtgactctagggacaaatagcccggtaacccaagcagttatcgataacgtcaatattaatggtgcccaaataggccatactacagatacagatttaatgacccttacaagtggtactgtaacagtagcagggactgttgcagcaacagctattacaggtgatggttcagggcttactggcattactgcttctgttatgaaatcagatgatatttctcaaggagatgcagcagtgaccatcagcacttcatcaggagctgttaatattaatccagcatctggttcaccgattcttttagataatacgatcaacattgatggagcaatcataggccatacggacgatacggatctcatgacgttagcaaatggaagtgtgacttttacgggttctactgtgatcccaacagcggatgtgaatgggggtgcgatcgatgcagtcacactagggaccaacagtgcggtgacccaggcggtcatcgataatgtgaatatcaatggggcagagattggtcatacttctgatacagaccttatgacccttgcagatggtagtgtgaccttcaccggttctacagtaataggtaccgtggatgttaatgggggtgcgattgatgcggttacattagggaccaacagtgcggtgacccaagcggtcatcgataatgtgaatatcaatggatctactatagggcatacggatgacacggatctattgacct

SEQ ID NO: 199878 - DNA, 441 bp, Unknown
  Bacterial polypeptide expressing nucleotide sequence isolated from the Sargasso Sea
atataaaactgcaaggttttgaaaatggtttttttattggaggctgtttatttgacaaagttgaaaaaaacatgaggatttataaggaagaaatattcggaccagttctttcagttgtaagagtaaaatcttttgaagatgcaacaaaactgatcaatgaacacgagtatggaaacggtgtaagtatttatacaagagacggtgatgccggaaggacattttcaagtaaaattcaagttgggatggttggaattaatgttccaatacctgtcccaatggctttccatagctttggtggctggaaaagatcattatttggtgatagtgccatgcatggaatagaaggcgtaagattttacacaaaacttaaaacaataacttcaagatggccttcaggaattagatcaaatgcagagtttgtaatgcctataatgaaataaa

SEQ ID NO: 199879 - DNA, 866 bp, Unknown
  Bacterial polypeptide expressing nucleotide sequence isolated from the Sargasso Sea
gatgactcttgcagatggtagtgtgacatttacaggttcaacggttattccaactgcagatataaatggtggggcgatagacgcggtgacactgggtacaaacagcgcagttactcaagcggtggttgacaatgttaacattgatggggctttgataggtcatacctcagatacagatttgatgactcttgcagatggtagtgtgacatttacaggttcaacggttattccaaccgcagatgtaaatggtggggcgatagacgcggtgacactgggtacaaacagcgcagttactcaggctgtaatagataatattaaccttaatggagttgaaatcggtcatacctcagatacagatttgatgactcttgcagatggtagcgtgacatttacaggttcaacggttattccaaccgcagatgtaaatggtggggcgatagacgcagtgacactgggtacaaacagcgcagtgactcaggctgtaatagataacattaaccttaatggagttgaaatcggtcatacctcagatacagatttgatgactcttgcagatggtagtgtgacatttacaggttcaacggttattccaactgcagatataaatggtggggcgatagacgcagtcactcttgggacaagtagtccaattactcaagcagtgatcgacaatataaatatgaatggtgcacaaataggtcatacaacagatacggatttaatgacactatcaaatgggactctaactgttgcggggactgtagccgcaacaacagttactggtgatggttccggtttaactggaattacagcttccgagatgaagtcagatgacatttctcaaggagatgcagcagtgaccatta

SEQ ID NO: 199880 - DNA, 805 bp, Unknown
  Bacterial polypeptide expressing nucleotide sequence isolated from the Sargasso Sea
ggtaaagatactttaaactatgttgttttagaaccctttggagttgcgcttcaaattgtaccttggaattatcctgtttctatattttctggaatggttgcgcagaattggatagtgggaaataccatagttataaaacctcctgaactttgtcctatatcctctaatttttatggtcaaatttttgaggatgttggtgttccaaaaggaattataaatattcttcacggttatggagaaacaactggtcgaaaattagtccaacatccaggaagtgattatattgtatttactggatcacctgaagttgcttcagaaattcttaaagaaacagcagatagaattatacctactcattttgaattaggaggaaagtctgcagcaataatctatcccgatgctgacattgataaagctgtagacagtacagttaaaggaatttttaaaccaaatgcaggtcaaatatgtgtagcaatgtctagagttatagttcatccaaaaattaaagatgagtatatgacaaagcttgtggcaaaaacccaaaaattaaaaataggtgcaggcgacgaagatggaacggaagtaacacctttaatctcaactgatcaaatgcaaagggtttcaaactatgtaaaatctggtgtacaatcaggtgctacattaacaataggcggggataaagctgtgagagacgatggtaatttttaccaaccaactatttttgataatgttaaagttgatgcaacaattgctcaggaagaaatatttggccctgtaacatcaatatttgattttgaagatgaag

SEQ ID NO: 199881 - DNA, 896 bp, Unknown
  Bacterial polypeptide expressing nucleotide sequence isolated from the Sargasso Sea
aatgaatgactttattaaacctagtaataaaattcatacaattgatgatgcaataaaattatctaaaagacgattacctaaattagtctttgattttattgatggagcatctggagatgataaacttgctgaaattaatagtgcagctttagatcaaattagattagagccaaaggtttttagaaatgtagaaaatagaaaattaaataaaaaaatatttgatttaaattttgattatccctttggatttgctccaatgggaatgacaaatctttcatggcctgaagcagataaaatgatagctaaagaaagtgcttataataatattccaacctgtgtttcaatggcttcaagtactacacttgaagatatgtttactttctcagaaggtcattcatggatgcaaatatatatttttcaaagtgaagaatttattatggaattattaaaaagagcagaaaatattggatacaaagttttaattcttactgttgatgtgcctattctttcaagaagagccagagatgacagaaatggttttggctatccatttaaaataggtccaaaacaatttttagattttgcactacatcctcaatggagtttaacaactttattaaaaggagcaccaaaaccaatgaattatgttacttctaaaagtggtgatcaaatttttcgacgaaaagaaagtagaggagcaactgattggaatactctaaaaagggtcagagatgcatggaaaggaaaattaataatcaaaggtgtaatgaattctgaagatgctctaaaaattaaagaagctggtgctgatgcaattccagtatctaatcatggtggaagacaattagatagtgctactgcttctattaatgctttaccattaattcgaaaatctt

SEQ ID NO: 199882 - DNA, 871 bp, Unknown
  Bacterial polypeptide expressing nucleotide sequence isolated from the Sargasso Sea
ttcacaaatgtgctttacagcagtaaaattagctccagctttagctatgggaaatactgttgtgataaaagcatctgagctagcaccagtaacacttttagaatttgccaaacttattgaaaaaacaggcataccaaaaggtgttgtaaatgttattactggtttaggagatccttgtgggaaggcattaactcaacataatctagtagaaagaattgcatttacaggaggaccagaaacagcaagacatattgtaaaaaattcctctcacaatttatctcaagtaagtttagaacttggaggtaaaagtcctgttgcagtttttgatgatgctgatcaagaaaatgcactgaatggaattacagctggtatatttggagcaagtggccaaagttgtatagcaggatcaagattatatattcaatcaagtatatatgatgattttctaaataaacttataaataaagctaaaaatataaagctaggacctccaatgtctgaagcaacacaaatgggacctctcaatagtttaaagcaacttgaattaattgaaaaaaatataacagaaacagaatctcaaggtggaaaaataagatgtggtggaaagagatctaatatttcaaataaaggatattattttccaccaactattattgaatgtaaaaatcatagtttaccaacagcagagaatgaattgtttggtccaattttatcagttatgaaatttgaaaacgaagaagagctaataaatcttatgaatgataataagtatggtttatcatctggagtttatacaaaagatttaggaagaggaatgagagtttcaaaagcaatcagggctggtatagtatttgtaaatacttatcgatct

SEQ ID NO: 199883 - DNA, 802 bp, Unknown
  Bacterial polypeptide expressing nucleotide sequence isolated from the Sargasso Sea
catgtctgaacacaaagatatagatatgatgcattttactggatcaacaagggcaggggttgctgttgctcaagcatcagctccaacagtgaaaagagttgctcaggagctaggtggaaaatctgccaatatagttcttgatgatgcagacattgagaaagcagtatctgctggtgtctcttcatgttttctaaatacaggacaatcatgtaatgcaccaacaagaatgcttgtgtcatctaaaaattatgacaaagcagttgaggttgctgttaatactgcaaatgctataaaagtaggcgatccttttgatgctgatacaaaaatgggaccaatttctaataagacccagtacgagaaagttcaaaggatgattcagattggtattgacgaaggagctacactatctgctggtggcgttggtcttccagatggttgtgagagcggctattacgtaaaaccaactattttttctgatgtaactaatgatatgactattgctagagaagagatttttggcccagttttatgcttaattaaatatgaaaccgaagaagaagccattgagatagcaaatgatactccttatggtcttgccggatatgtccaaggtgagcatgcacatgcagttgaagttgcttcaaaaataagagctggccaaattactatcaacaaaggagctagagttagatcagcaccatttggtggttatggttcttctggaaacggaagagagcatggcacacatggcctggaagaatgcttggagacgaaagctgtaattggggctttagtcgaataa

SEQ ID NO: 199884 - DNA, 958 bp, Unknown
  Bacterial polypeptide expressing nucleotide sequence isolated from the Sargasso Sea
agcaatcggttcaggtgtgattgttaatgcagatatcaatgcctcggctgccatagcagactctaaactttctaccataaccacagcagataaggtatctggagcagcaatacaagttgatgatgcgacaagtggtacaggaataaccctagcagacgatgataagtttctagtagatgatggcgggacaaccaaatatgtcaatgcatctcaggttctttcatacgctagtgccacttcttccactgatattaatggggggaccattgatggcgtcactcttgggaccaatagtgcggtgacccaggcggtcatagataatgtgaacattgatggggcagtaataggtcatacctctgacactgaccttatgacattggcagatggtagcgtgacctttaccgggtccaccgtgatcccaacagcggatgtgaatggaggagcaattgatgcggttaccctaggaacgaatagtgccataacgcaagcggtcgtagataatgtgaacattgatggggcagtaataggtcatacctctgacactgaccttatgacattggcagatggtagcgtgacctttaccgggtccaccgtgatcccaacagcggatgtgaatggaggagcaattgatgcggtgactttaggaacaaatagtgcagtgacccaggcggtgatagataatgtgaacattaatggggtagaaataggtcatactgctgatacagatcttttgaccttggcaaatggtagcgtgacattcacgggatccaccgtaatcccaacggcagacgtaaatggaggagcaattgatgcggtgactttaggaacaaatagtgcagtgacccaggccgtcatagatgatatcaatttaaatggagcaaccataggacacacggatgatacggatcttttgaccttggcaaatggtagcgtgacattcacgggatccaccgtgatc

SEQ ID NO: 199885 - DNA, 709 bp, Unknown
  Bacterial polypeptide expressing nucleotide sequence isolated from the Sargasso Sea
tccacatcaatacctttaagtttggatgtaactgatgccggtcagattcagaaatgtgtggacacaatgattaaaaattttgaaaaaattgatgtcttagtcaataacgcggggtatggttatttatccgctattgaagaaggggaatcccaagaagtaaaaaatctttttgaaacaaatttttttggtgcgcttgagctgactaagaaagttttgccacatatgagacacaaaaaatttggacgcattattaacaactcatctcaggctggattaatggcaaatcccggcacaggttactatagtgcttcaaaatttgctttggagggtcttatggaggcgctagacaaagaggttagaccactgaatatttcggttacatcagttcaacctggagcttttcgcactgattggtcaggtcgttcaatgaaaaaatcaaaaattaatattagtgattatgatgagcacgtaggcagtaggataaatatgataagtcaaatcgatggtaagcagcccggtgatcctaaaagagcagcaaaaattatcttttcattaacaagagatgataaccccccaaataagttattgcttggtgcaggtgtcttaaccacatataaagaaagacttgaggaattaagagctgatttagagagttatgaatctcttactttaagtgcagactttccaaatgatttagaggagcagtaaa

SEQ ID NO: 199886 - DNA, 529 bp, Unknown
  Bacterial polypeptide expressing nucleotide sequence isolated from the Sargasso Sea
ttagttacaaaagaacatttagaaaaagttacaagttatgttgatttaggtgttaaggaaggtgcaaagttagtggttgatggcagaggtttaaaacttcaaggttacgaaaatggtttctatatcggtggatgtttatttgatcatgtaaataaagacatgagaatttataaagaagaaatatttggtccagttttatcagttgttagagtaaatacttttgaggaagctgcaaaattaattaacgatcatgaatacggaaatggagttagtatttatacaagagatggtgatgcaggtagaacttttgcaagtaaaattcaagttggtatggttggtattaacgtacctatcccagtgccaatggcatttcatagttttggtggctggaaaagatctttatttggagatagtggaatgcatggtatggaaggaataaaattttatactaaacttaaaacagtaacatctagatggccttcaggtgtccgatcgaacgcagaatttgttatgccaataatgaaataaa

SEQ ID NO: 199887 - DNA, 760 bp, Unknown
  Bacterial polypeptide expressing nucleotide sequence isolated from the Sargasso Sea
atggaaaactcttttgctaattatcccagtttgcaaggcaaaaatattctcattactggtggtgcatccggtattgggaaagagcttgtaaaagggtttgctgagcagggtgctaatgttgcatttttagatttgaatgatgaagctggagagcggctttccctcgatattggagaaaatgtttattttcaaaaatgtgatttaaaagaggttggtaatttaaaatcgtcaattgaaaagctcagagctaaaatcgggttatttgatgtactggtcaataatgctgcccatgatgaccgacataattggcaagatgtaacagaagcatattgggatgagcgttttgctactaacttaagacatcaattttttactatccaatctgtggctagcgatatgattcaaaagggaggagggtctattgtaaatattggttctaattcatggatagaggcagttggaaactttcctgcatatgcgactgcaaaatccgctgtccatggattatccagaacattagcaagggatttaggaaaacatagaattagggtaaatacagtcgtgcccggatggattatgacagatcgacaaaaagaactatgggtgacgccagagggtctagaaaatcaatataaaagacaatgcttacctgatttaattgaacctgtttatgtcgctcgtatggtcctttttttagcatccgatgatggagcgatgtgtacggctaacaattatatggttgaagctggatctatatagt

SEQ ID NO: 199888 - DNA, 751 bp, Unknown
  Bacterial polypeptide expressing nucleotide sequence isolated from the Sargasso Sea
aatgcttgatatctccaaggaaccaatggaagtagctcctactgctcactattctatggggggtattgtattaaatgcagagaagcatagcactccaataaaaggattatatgcagcaggtgaagttgctggagggcttcatggtgcaaatcgtcttggaggtaattcactcgcagaaattttaatctttggaagaagagcaggcatagctagcattgaatattcaaacaatttaagtgcgcaaataagatcaaaaaaagtagttaaagaggctcacgaaaatattaatagtcatattaaaaaaggaaaagagttagcgataccactttataatgaattgagtaatattatgtggaaatattgcggcgtattgaagaatgaaggactgcttaaagaaggattcgaaaaagtaaaagaaataaaaaatcttgttaaagaaattgacgttaggattcacgaccgcaattgtaatgatttgattcaaatctttgatcttcaggcatgttcaataagtgcagaagctactattagatctgctttatgcaggaaagaaagtagaggagcccatcaaaggagtgatttccccgaattagataattcaaaaaaatgtaactttcatataaatatggagaaaagttcttttaatttgtcagtcaaagagataagcactaaaccacttaaagaaaacttaagagaaatcttaaccaaatcaaataaagtcgttaatttaaaaggaaaattacttgaataa

SEQ ID NO: 199889 - DNA, 730 bp, Unknown
  Bacterial polypeptide expressing nucleotide sequence isolated from the Sargasso Sea
ggcgttcctgccggtgtatttaatgtagttaacggatatggtcctttagttggtgctgccttatcggatcatcctgatgttgcaatgatgtcttttacaggatcgacggaggctggtatagctgtagctcaggcttctgcggtgtctgtgaaaagagtacatcaagaacttggtggtaaatcttcaaatatcattttagatgatgtagcagatctagaaaaatcaattaaaggaggtgctggtcactgttttttaaattctggacaatcctgcaatgctccaacaaaaatgctggtttcagaaaaaaattacgataaagcagttgaggttgcagtccaaactgcaaatagtactactgttggagatccccaaggagaatttagaattggacccattgctaacaaacctcaatatgaaaagatcttaaaaatgatagaaattggaattaatgagggtgcaactttagtggctggaggtattgaaaagcctgaaggttatgagaaaggctattatgttaagccgacagtatttgcaaatgtgaccaatgacatgactattgctaaagaagaaatttttggtcctgtgttatcaattcttaaatatagctctgaagaggaagccattaaaattgcaaatgatactgagtatggactggcaggatatgtccaaggtgagccagagcatgccaataaagttgcaagaaaaattagggctggacaagttatcatca

SEQ ID NO: 199890 - DNA, 607 bp, Unknown
  Bacterial polypeptide expressing nucleotide sequence isolated from the Sargasso Sea
gggaaatactgttgtcataaaaacatctgaactagcaccagtaacacttttggaatttgctaaactaattgaaaaaacaggcataccaaaaggtgttgtaaatgttattactggtttaggagatccttgtgggaaggcattaacacaacataatctagtagaaagaattgcatttactggagggccagaaacagcaagacatattataaaaaattcttctcacaatttatctcaagtaagtttagagcttggaggtaaaagccctgttgcagtttttgatgatgctgatcaagaaaatgcaataaatggaattacagctggtatatttggagcaagtggccaaagttgtatagcagggtcaagattatatattcaatcaagtatatatgatgattttcttaataaacttatagataaggctaatactattaaattaggtcctccaatgtctgaagcaacacaaatgggtccccttaatagtttaaagcaacttgaattaattgaaaaaaatataaccgaaacagtatctcaaggcggaaaaataagatgtggtgaaagagatctaatttttcaaataaaggatattattttccaccaactattatga

SEQ ID NO: 199891 - DNA, 457 bp, Unknown
  Bacterial polypeptide expressing nucleotide sequence isolated from the Sargasso Sea
taaaaaacaatatgataagataataaatttaattcaaagcggtattgatgaaggagctactttaattgcaggaggtattgaacgacctgaaagtttaagtaaaggctattttattcaacccacagtctttgttgatgttttaaatgatatgaaaattgcaaaagaagaaatttttggtcctgttttatcaataataccatttgaaagtgaagaagaggctatttcaattgttaatgatacatcttatggtcttggtaattatttacaaactcaagataaagaaaaagcaagaagggtagctagacaagttagatcaggaggggtttatattaatggtaatagtgctgatccaggtacaccttttggtggctatagacaatcaggcaatggtcgtgaaggaggcacctgggggctagaagagtatcttgaagtaaaaacaatttgtggatggaaataa

SEQ ID NO: 199892 - DNA, 859 bp, Unknown
  Bacterial polypeptide expressing nucleotide sequence isolated from the Sargasso Sea
tttgcagacaaatgttctaaaatacttacaactcatccaaaagtaaacagaattgcctttactggtggaatgcatactgcaaaacatattataagaaactctgctgaaaatttatctcaagtgagcttggagttagggggaaaaagtcctgttgctatttttgatgatgcaagaatagataatgcaatcaacggtgtcactgctgctatctttggtgcaagtggccagagttgtatagcaggttcaagattatatctgcagaaaggaatatataaagaatttctagaaaagattacagataaagcaaaaaaaattaaaataggtgaccctatgaaagataatacgcaaatgggacctcttgcaactcataatcaaataaagaatattcaagagaatatttataaaactattaaacagggtggaaaattaattacgggtggcacaactgtaaaagaatttaaaaaagggtggtattttgaacccacaataattgaatgtgatcatcataatttacctgcagcagaaaatgagttatttggaccagttttatcagtaatgaaattctctgatgaggcagaaataactaaatctatgaacgataataagtatggtctagcagcaggaatttttacagaaaataatggagtagctctaagattatcaaaagctcttagagcaggaatagtttttgtaaatacttatcgtttaatatctccagtagctcctttcggaggttttaaaaatagtggatatggaagagagtcaggcattgaaacaatgaaagattattcaaatttaaaaactacctggattaatacctctaaggataacattgatgatcctttcatagtaagataat

SEQ ID NO: 199893 - DNA, 977 bp, Unknown
  Bacterial polypeptide expressing nucleotide sequence isolated from the Sargasso Sea
agagagaaagaagaagaaggcggtaagcttcttagccaagaaaatggtaaaacgattaaacaatgtattgatgaatttaaaggtgctgcagacacctttgatttttatgcaggacttacagacaaaatagaaaataaattaattccatctggtcatgatacattgaactatgttgttttagaaccgtttggagtagctcttcaaatagttccttggaattatcctgtttctatattttcaggaatggttgcgcagaactggatagtaggaaatactatagttataaagcctcccgaactttgtccaatatcttctaatttttatggtcaaatttttgaggatgttggtgttccaaaaggaattataaatattgtccatggttatggtgaaacaactgggcgaaaactggttcaacatccaggaagtgattatattgtttttacaggatcacctgaagttgcttcagaaattcttaaagaaacagcagatagaattatacctactcattttgaattaggaggaaagtcagcagctataatctatcccgatgctgacattgataaagctgtagaaagcacagttaaaggaatttttaaaccaaatgcaggtcaaatatgtgtggcaatgtctagagttattgttcatccaaaaattaaagatgagtatatgacaaagcttgttgcaaaaacccaaaaattaaaaataggtgcaggtgacgaagatggaactgaagttacccctttaatctcaactgatcaaatgcaaagagtttcaaactatgtaaaatctggtgtacaatctggtgctactttaacaataggtggagataaagctgagagagatgatggaaatttctatcaaccaactatttttgataatgttaaagttgatgcaaccattgctcaagaagaaatatttggccctgtaacatcaatatttgattttgaagatgaaaaagaagcaataagtatagctaa

SEQ ID NO: 199894 - DNA, 805 bp, Unknown
  Bacterial polypeptide expressing nucleotide sequence isolated from the Sargasso Sea
tattatgattactttgcaggtttggccgacaaagtagaaggaactgttgtcccaatagataaaccagatatgcaagttacaacaacaagaattcctataggtgtggtggctgcaattattccttggaattctcaaatgctactaacagctgttaaacttgcaccagctcttgctatgggtaatactgttgtaattaaagcatctgaacttgctccagtaactcttttagaatttgcgaaattaattgataaagctggattgccaaaaggagtaattaatatcattacaggtttaggtgaaccttgtgggaaagctttaactacacacacccttgtagaaagaatagcattcacaggtgggccagaaactgcaaaacatattgttaaaaattctgcagaaaatttatcccaagtaagtttggagcttggaggaaagagtcccgtggtagtatttgatgacgctgatcaagaaaatgctttgaatggaataactgcaggaatatttggagcaagtggtcaaagttgtattgcaggatcaagactatacttacaatctaaaatttatgatgaatttttaaaaaaattaatttctaaagcagaaaaaataaagttgggtggtccaatggaaaaagatactcaaatgggaccattaaatagttttaagcagttagaaaatatagaaagaaatattaaagcaactattgaacaaggtggaaagattagatgtggtggaaaaagatcttctgtttcaaataaaggttactactttccagcaacgattatagaatgtaaaaatcacaatcttc

SEQ ID NO: 199895 - DNA, 511 bp, Unknown
  Bacterial polypeptide expressing nucleotide sequence isolated from the Sargasso Sea
gctgagccggttcgggtcgtcgatgtcggtgctggacttcctgcacttgggcagctcactgtcgctgcggagtttcacgcgtgcgggcagcgcggtgtcggtgcgcgggctgagccggttcgggtcgtcgatgtcggtgttggatttcttgcatctgggcagctcgctgtcgctgcggagcttcacgcgtgcgggcagcgcggtgtcggtgcgcgggctgagccggttcgggtcgtcgatgtcggtgctggacttcctgcacttgggcagctcgctgtcgctgcgtagcttcacgcgtgcgggcagcgcggtgtcggttcgcgggctgagccggttcgggtcgtcgatgtcggtgttggatttcttgcacctgggcagctcgctgtcgcttcgcagttttgcaaggcttgggagttctctctctgtggcgggaacgacgttgcttggatctgaagtcaagtttgattcggataatggtgtgaacatcattggttcggcggcgtcggaggtt

SEQ ID NO: 199896 - DNA, 877 bp, Unknown
  Bacterial polypeptide expressing nucleotide sequence isolated from the Sargasso Sea
ttttatcaagctaccagttttaatggagatctatccaactgggatgtatccagtgtgacgaatatgttttatatttttttaaatgctaccagttttaatggagatctatccagctgggatgtatccagtgtgacgaatatgtacgcaatgttttatagtgcgacaagttttaatcaggacatatcagactgggatgtatccagtgtgacgaatatgtacgcaatgttttatagtgcgacaagttttaatcaggacatatcaggctgggatgtatccagtgtgacggatatgaccgcaatgttttatagtgcgacaagttttaatcaggacatatcaggctgggatgtatccagtgtgacggatatgtaccaaatgtttggttggagcgatgctttatccgatggtaataagtgtgcgattcatgcgtcatttcagagcagcgatgcctggccctatgactggtctgagttttgctaccagtttacatctagagaagagctggagacagcgttagacctgtggatttccgataattcttctgctttggctacctatggaacgatcaatggctgggacgtatctctgattacagatatgtccgacttatttaaactaaaaacaaccttcaatgatgatatatctaattgggatgtatccaatgtgattaatatgtctgaaatgtttgaaaatgctcaagcctttaatataaacatatcagcttgggatgtttcaagtgtaacagatatgggtgcaatgtttaatggtgctaccagttttaatagagatatatcaatatgggatgtatccagcgtaactgatatgagttatttctttagtaatgcttccaattttaatcaggatatctcaagctgggatg

SEQ ID NO: 199897 - DNA, 769 bp, Unknown
  Bacterial polypeptide expressing nucleotide sequence isolated from the Sargasso Sea
atgtacctcaaaaaaataaatcttaaaaacaaaactgctttagttacaggagcgggaaaaggtatcggtaaggcatgcgcaatagctcttgcagaggcaggcgctgaccttgttattcttagtagaactcaaaaagatttggatattgtttctaaagttataaaaaaatttagatcaaaatgtatggcttatgtttgcgacgttacaaattataaccaaattaaaaacataataagtaagcaaaaaaaaattgatatattggttaacaatgctggaaataacattccagaacattttacaaaagttcaaaaaaaaaatatggaatacctggtaaaacttaataccatatctacatttaatatagctcaactatgcactttaaaaatgttagaaagtagaaatagaagaaaaattggaggttctataattaacatgtcgtctcaaatggctcatgttggtggacctattagaagcgtatacaatatgactaaatcaggactagagggtttaacgcgaggtatggctattgatttagccaaaaacaatattagagtaaatactgtgtgccctacttttgtagttaccccaatgacaaaaaaatttttaaaaagtaaaaaatttaaaaatgatactcttaaaaaaatccctatgggaaaatttgccgaattaagtgatgtggctactaccgttgcctttttagcttcagatgcttcttcaatgattacaggaacatcaatcttggttgatggaggatggacggcaatataat

SEQ ID NO: 199898 - DNA, 793 bp, Unknown
  Bacterial polypeptide expressing nucleotide sequence isolated from the Sargasso Sea
catgaggatatagatatgatgcattttactggatcaacaagggcaggtgtcgctgttgctcaagcatcagctccaactgtaaaacgagttgctcaagagctaggtggaaaatctgccaatatagtacttgacgatgcagatattgagaaagctgtatctgcaggagtctcttcatgtttcctaaatacaggacaatcatgtaatgcacccacaagaatgctagtgtcatctaagaactatgataaagcagttgaagttgctgctaataccgccaatgctatgaaggttggagatccttttgatgctgatacaaaaatgggaccaatttctaataagactcaatacgagaaagttcaaaggatgattcaaattggtattgatgaaggagcaactctgtctgctggtggcgttggtcttcctgatggctgtgagagcggttattatgttaaaccaactatattctctgatgttacaaatgatatgactattgcaagagaagaaatttttggtccagttttatgtttaataaaatacgaaactgaagaagaggctatcgaaattgcaaatgatactccatatggccttgctggatatgttcaaggtgaacaagctcacgcagtagaagttgcttcaaaaataagggctggtcaagtcaccattaataaaggagctagagttagatcagcaccctttggtggttacggctcttccggtaacggaagagagcatggcacacatggccttgaagaatgtctggagactaaagctgtaataggtgctttagtcgaataaa

SEQ ID NO: 199899 - DNA, 633 bp, Unknown
  Bacterial polypeptide expressing nucleotide sequence isolated from the Sargasso Sea
tagccgttggaaacataggagacgagttggtttcgcgcttgtctaaaaaggtagaagctttaaaagtaggaccaggcatggataagaattcagaaatgggaccattggtaactaaagaacacctagataaagtgaaaaattatgttgaaataggggtaaaagaaggagcagatttagtttctgatggtagaaatataaaactgcagggttttgaaaatggtttttttattggtggctgcttatttgacaaagttgaaaaaaacatgaggatttataaggaagaaatattcggtcctgttctctcagttgtaagagtaaaaacttttgaagacgcaacaaaactgatcaatgaacacgagtatggaaacggtgtaagtatttatacaagagacggcgatgccggaaggacattttcaagtaaaattcaagttgggatggttggaattaatgttcctattcctgttccaatggctttccatagctttggtggctggaaaagatcattatttggagatagtgccatgcatggaattgaaggtgtaagattttatacaaaacttaaaacaataacctcaagatggccttcaggaattagatcaaatgcagagtttgtaatgcctataatgaaataaa

SEQ ID NO: 199900 - DNA, 652 bp, Unknown
  Bacterial polypeptide expressing nucleotide sequence isolated from the Sargasso Sea
tcttatccagaagctgttagagatggagtaagaactataatgagtaacactggacagtcttgtgatgctccaacacgaatgctagttcaaagatcaatttatgatagagcagtaaaagaagctgtagatgaagcaaataaaattaaagtagatgtggcatctaaaaaaggtgatcatattggacctttagtatccaaagttcaatacgataaagttgtaaatcttataaatgagggaattaaagagggtgcaactttagctgccggtggacctgatctaccaaatggtctaaataaggggtattttgttaaaccaacaatttttactgatgtaaacaacgatatgaaaattgctagagaagaaatatttggtccagtactttcaattattccatttgataccgaagaagaggcaattaaaatcacaaacgatacttcttacggattaggtaactatttacaaactgaggataaagaaaaagcacaaagagtagctagaaaagtaagagcaggaacagtttatatcaatggccaaggggccgaaactggagcaccttttggaggatttaagcaatcaggaaatggtcgcgagggtggactatggggatttactgaatacctagaggttaaagcaattactggttggaattaaa

SEQ ID NO: 199901 - DNA, 793 bp, Unknown
  Bacterial polypeptide expressing nucleotide sequence isolated from the Sargasso Sea
tctagtaaaaaaattgacatgattagctttactggaagcgtagaaacaggttcagcaattatgactgaagctgctaaaaatattactaaagtgaacctagagttgggaggaaaagctccagcacttgttttagctgatgcagatattgatttagctgtttctaaaattcgtgatgcaagagttattaatagtggtcaagtatgtaattgtgttgaaagagtatatgtagataaaaaaattgcagatgaatttacagaaaaattaactaaagcaatgcaaaacactaagtttggaaatcctaatacaaaaactgatatagattatgggcctttaatcaatgaagatggctccaagaaagtaagtgaattagtgaattcagcaaaaggttctggagcagaaatcttaactggtggaaacagagatgaatcatctgaaggaatttattatcatcctactgttatagctaattgcaaacaagatatgagaattatacaagaagaaatttttggtccagttttacctttagttgaatttgaagatttagaccaagcgattgaatatgcaaatgattctgattatggtcttacttcttctatttttactaataatttaaaaacagctttaaaagcttgtaatgaaatacggtttggagaaactatgatcaatagagataacatggaaatcttccaatcttttcatgcaggattaagaaagtcaggtattggcggcgctgatggtaagcatggactatatgaatacatgcaaacacacgcagtatatatgagagcgtaat

SEQ ID NO: 199902 - DNA, 465 bp, Unknown
  Bacterial polypeptide expressing nucleotide sequence isolated from the Sargasso Sea
catgactacaggagaccctcaaaacgaagaaatatttcttggaccgatttcaaatcaaacacaatatgagaaagtacagtccctgattcaagaaggtatcgcggaaggtgcaacacttgcttgtggtgggacaggcagacccgatggtttagagaaagggtattatgtgaaaccaacagttttcacaaacgtcaacaataaaatgactattgctcgtgaagaaatatttggtcctgtaatatgtttaattccttacaaggatttagatgaggcaatagaaatagctaacgactctccttatggattatcaagcatgatttcctgtgcagatgaaactaaggggcatgaaattgcaaaaagagttagaactggtcaggttatagtgaatagacagtcaagaggagagtttcctgcgcctttcggaggatttaaaatgttcaggaaacggcagggagcacggaacat

SEQ ID NO: 199903 - DNA, 829 bp, Unknown
  Bacterial polypeptide expressing nucleotide sequence isolated from the Sargasso Sea
cgaaatagacgaaggtagaggagtggatggatgtgtccttcttgaccttaggcatttaggaagagaaaaaattgaagaaagacttggatacttacaagaggtggccactgaatttagagatatagacctagccgaacagccaatccaagtaaaaccaacaatgcattacataatgggtggaattaaaacagactcgtcaggggcaacagatatccctggtttgtatgcagccggagaatgcgccaatgttagtgttcatggtggaaacaggctgggtgcaaattctctcctagatactattgtattcggaagaagatcagcaagagcagcaatcgaatatatatcaacagttaaatcacactcgactagcaacgttgaactaaaaaacgaaactgaaagaataaaaaatatagtagacagatcaaatggtgaaagatctgcaactcttagaaatgaaatgggaattgctatgacctcaggaatcggtgtatacagagacactgcaagtattgaaatggcaaaaaataaaatatcagaacttttagacagatatccaaatacttcaattgacaataaaggaaaagtctttaatactgatcttatatttaatctggaattgaaatatatgctagatgtagctctcactatgtgtattggtgccgaacagcgaaaagaaagtagaggcgcacactatagaacagatatgacagaaagagacgatgcgaattggttgaaacatactcatgttaaaaatgaaaacgggaatccaaaattctatacctctgatgtcaaaatcactgattggaaacctgaaataaggaaatattaa

SEQ ID NO: 199904 - DNA, 949 bp, Unknown
  Bacterial polypeptide expressing nucleotide sequence isolated from the Sargasso Sea
aaaaccgcaattcaagccgaacttgaggtcgctcaagccggtcagaaagaattacaatcccaaataacagaattagaatccaaacatgcaaaagcagaggcagaacaatccaaacaagcagaaggaaaacaagcagaattacaagccagtacagcagcgttagaaatcgcacaagcaaaattaagcagattagaagaagaaaaggcagcattaggagccaggacaatagagttagcagctgcagtaaatcaagaattacaagccaaggaagaggcattagcacaagcaacggctgcattggaagccaaagcacaagaagaaaaagctgcattggaagccaaagcacaagaagaaaacgcagcattagaagccaaagcacaagaagcaaacgcagcattggaagccaaaaaagccgaacttgaggtcgctcaagccggtcagaaagaattacaatcccaaataacagaattagaatccaaacatgcaaaagcagaggcagaacaatccaaacaagcagaaggaaaacaagcagaattacaagccagtacagcagcgttagaaatcgcacaagcaaaattaagcagattagaagaagaaaaagcagcattaggagccaggacaatagagttagcagctgcagtaaatcaagaattacaagccaaggaagaggcattagcacaagcaacggctgcattggaagccaaagcacaagaagaaaaagctgcattggaagccaaagcacaagaagaaaacgcagcattagaagccaaagcacaagaagcaaacgcagcattggaagccaaaaaagccgaacttgaggtcgctcaagccggtcagaaagaattacaatcccaaataacagaattagaatccaaacatgcaaaagcagaggcagaacaatccaaacaagcagaaggaaaacaagcagaattacaagccagtacagcag

SEQ ID NO: 199905 - DNA, 898 bp, Unknown
  Bacterial polypeptide expressing nucleotide sequence isolated from the Sargasso Sea
tatgggaaatactgttgttattaaagcatctgaattagctccagtaacacttttggagtttgctaaaataattgaaaaaacagaaatacctaaaggagttgtaaatattataactggtttaggtgatccttgtggaaaagcattaacacaacataatttggttgaaagaattgctttcacgggtggaccagaaacagcaagacatattattaaaaattcttctcataatttatcacaagttagtttagagcttggaggcaaaagccctgtagcagtttttgatgatgctgatcaagaaaatgcacttaatggcataactgcaggtatatttggcgcaagtggtcaaagttgtattgctggctcacgattatatattcaatcaagtatatatgaagaatttcttaataggcttgttgaaaaagctaaaaatataaaattaggccctccaatgtctgaagagactcagatgggacctcttaatagtcttaagcagcttgaattaattgagaaaaatataaatgaaacagagtcccaaggaggaaaaattagatgtggaggtaaaagatccaatttttctaataaaggttattactttccagcaacaattatcgaatgtgataatcataatttaccttcagcagaaaatgaattatttggaccaatattatcagtaatgaaatttgaaaaagaagaagaattaatatctctaatgaatgataataaatatggtttatcatctggtgtttacacaaaagatttaggaagaggaatgagagtttcaaaagcaatcagagcaggtatagtatttgtaaatacttataggttaatctctcctatggcaccatttggaggtatgaaagatagtggatacggtaaagaggctggtaaggagtcataa

SEQ ID NO: 199906 - DNA, 898 bp, Unknown
  Bacterial polypeptide expressing nucleotide sequence isolated from the Sargasso Sea
aattttaaaaccatcagagcaaaccccgttctctttgataaagttggcaaacttactcaaagatgttttgcctgaaggggttttgaatttggttaatggtcgagggccagttaccggttcaagcttagtgaataaccctggcgttgatagaattagttttaccggcggtaccgttaccggtcgccaagttatgatggatgcaggaaagcaacttactccttgcactatggagttgggaggtaaatctgcgaatatagtttttgcctcagctgactatcagagagcccttgatggagcactcatcggaattttttcaaacaatggacaacaatgtcttgctggatcccgaattcttgttgaggaaaaaatctttgatcaatttgttgaagaattcgttcaacgcaccaaaaagattgtagtaggtgatccgcttaataacgagacggagataggccctatcgcttcaaagcaacatatggaaagaattttgtcttttgccgaaggtgtccaaaaagatggagataaactgttggtagggggaaagaggttgtcggaacaaaaagatggttactttattgagccaaccgctgttttggctagttcaaataacagtagggtatgtcaggaagagatttttggtccatttgctagttttatttcctttaaatcagaagaagaggctgtcagtatagctaacgatactgaatttggtctcgtatcatatgtgtggtcagaccacatgccaactattttaaatgtatctgagtctatgaggtctggggtagtttgggtgaacaccccgatgatgcgagaattaagagcgccatttggaggttatcacaactcaggagtgggaagagaaggtggatattcgtgtgaacagtttacacagaggaaa

SEQ ID NO: 199907 - DNA, 676 bp, Unknown
  Bacterial polypeptide expressing nucleotide sequence isolated from the Sargasso Sea
tctggtgctgaggtgttttttttgggacttaatgctcagaagggtggaaaacttgagtctgagctttgctctgaaaattttaaagtttctttttttcgatgtgatgtcacgaaagaagatgaagtcaaagaaatctttgataagattgtttttcatgcaggtaatatagatgttttggtgaataacgcaggaggttgggaaaatcagcagtcggtcttaaaaacatctttagacgaatgggaaaaaattatctctaggaacttaagaagtgttttcctgtgttcaaaacaaattattcctgtttttcaatcacaaaaaagtggcagaattgtgaatataagttcaataggtagtcttacgattgtaaaatctgcctcctctccgccatatattgctgcaaaagcaggtgtaaatgctcttggacgtgtactagctgccgaattagctgactataatgttgcagtgaatactttggccccatccacgacagaaaccgaaagacttgttagagtcagaagtgaagatcaaagaaaacaaatggctgaaagaactttatttaggcgtctctcaacagtagaagaaatagcgaattgggttttgtttcttgctgctcctgaatcttcttatttgactgggcaaactattagtgtaaatggtggaagattaatgatctgat

SEQ ID NO: 199908 - DNA, 559 bp, Unknown
  Bacterial polypeptide expressing nucleotide sequence isolated from the Sargasso Sea
tatggaaaactcttttgctaattatcccagtttgcaaggcaaaaatattctcattactggtggtgcatccggtattgggaaagagcttgtaaaagggtttgctgagcagggtgctaatgttgcatttttagatttgaatgatgaagctggagagcggctttcccttgatattggagaaaatgttttttttcaaaaatgtgatttaaaaaaggttggtaatttaaaatcgtcaattgaaaagctcagagctaaaatcgggttatttgatgtactggtcaataatgctgcccatgatgaccggcataattggcaagatgtaacagaagcctactgggatgaacgttttgctactaacttaaggcatcaattttttactattcaatctgtggctagagatatgattcaaaagggaggagggtctattgtaaatatcggttctaattcatggatggaggcagttggaaactttcctgcatatgcgactgcaaagtccgctgtccatggattatccagaacattagcaagggatttaggaaaacatagaattagggtaaataca

SEQ ID NO: 199909 - DNA, 682 bp, Unknown
  Bacterial polypeptide expressing nucleotide sequence isolated from the Sargasso Sea
cggcaatcagcgaatattattctagatgatgctgatattgagaaagctgccgctgctggagcgaatcattgctttatgaatactggacaatcatgtaatgcgccaacaagaatgctagtttcatctaataattatgaaaaagcagttgaagctgctgctgatgtggcaaattcaacaattgttggttcgccagaagaagagggtgtaaaaattggaccaatttctaataaagttcaatatgaaaaagttcaaaagttaattcaaattggaattgatgaaggtgcaaggcttgtagcagggggtcttggaaggcctgaaggcatttcagaaggttatttcgttaagccaacagtttttgctgatgttactaatgatatgaccattgcacgagaagaaatttttggccctgttctttgtattttaaaatatgagtctgaagacgaagctatagaaattgctaatgatactgagtatggcttagcaggttatgttcaatctggcgatgaggaccatgcaaaacaagtagctagaaaaattagagcgggtcaaattagcatcaatgggggcacaagaggtcctgcagcaccttttggtgggtttaaaacctctggtaatggaagggagcacggcctttctggtttaaatgaatgtctagagactaaagcaattattggcaattaat

SEQ ID NO: 199910 - DNA, 859 bp, Unknown
  Bacterial polypeptide expressing nucleotide sequence isolated from the Sargasso Sea
tgtaggcgaggttgaaaaatgcgcatggatttgtgattattacaaagaatttgctccagaatttctatctgatagattaatcaaaacagaatattataaaagcatggtaacgttgcagccaattggactaatattaggtataatgccatggaatttcccattttggcaggtctttcgatttgcgattccagcattgattgcaggcaatggagctattttaaagcatgcatctaatgtccaaggttgtgcatttgcaatagagtcaagttttttagaagccggttttccagcagatatatttcgcaatatttcagtcagtggtaaaaatgtaaaagacgtgataaaaaataaggcgatttcagcagtgactatcacggggagtacacctgcaggtagtgctgtagcacaaactgctggaaaatatttaaaaaagaccgttcttgagctgggaggtaatgacccatatattatacttgatgatgcggatttggataatgcaatagaagcgtgtatcagtgggcggattttaaatacaggacaaagttgtatttcagccaaaaggctaatagtaacaaaatcattatatcatgattttttaaaaaagctcaaggtaaagttagctaaaatgataatgggtgatccaatggacaatgttgatattggacctatggtatcaataaatgccagagatgaaattcatgaccaggttacgcgttcaatatattctggtgcacaacttgaacttggtggcaaagtaccagatttaaaaggatgtttttatccggttacattgttgtctaatgtcaaaccaggtatggcagcatttgatgaagaaatatttggaccagttttttcagta

SEQ ID NO: 199911 - DNA, 544 bp, Unknown
  Bacterial polypeptide expressing nucleotide sequence isolated from the Sargasso Sea
catgaagcttttggaaattgcaaaaaatgttgcagaaaaattgataactggtgaccctacaaaagaagacacagacattggtcctctagtaagtcaagctcaatttgataaggtacaaaggttaattgaatctgggattaaggctggtgctcaattagtaactggtggattaggcaagcccacagggcttaatgccggttattttgttaagccaactgtttttggagatgtaaataacaccatggaaattgctcaagaagaaatattcggccccgtcttatctgtaatcccgtatgaaaatattgataatgcggttcagattgcgaatgatacaagctatggcctttctgcttatgtatgtggtagtgaccccagaaaattaaggagtgtcgcaaggcaaattagagcaggtcaaatccatattaattatggtagcgggggaactaatgcaccatttggcgggtttaagcaatcgggtaatggacgagagaaggctgagtggggtttggaagaattcttagagactaaagctataatggagtaa

SEQ ID NO: 199912 - DNA, 590 bp, Unknown
  Bacterial polypeptide expressing nucleotide sequence isolated from the Sargasso Sea
aaatagattaggttcaaactcattaatagatttagtagtttttggaaaatcagctgcaaaaagagctgcagaacttgttaagccaggaacacctcacgaagaaatacctcaaagtgaaacagataaatgtttagatagatttgataaacttcgtaacgcttcaggtgcaacgaaaacttcagaactaagattatccatgcagagaaccatgcaatcaaaatgcgcagtttttagaaccgaaaaaacattaaaagaaggaatggatcaaatcagaaaaccttttgaaggaatatctgatatttcagtttcagacaagtccttattgtttaatactgatcttgttgaaactttagaatttgataatcttattagacaggcgatgacgacaatagactcggcttatcatagaaaagaaagtagaggagctcacgcaagagaagactacaaaactagagatgataagaaatatatgacacatactttagcttggcaaaagggaaacgaagttaaagtagcttatagacctgttcatgcaaaaacattaacaaacgatgttcaatactttccgccaagagaaagagtatattaat

SEQ ID NO: 199913 - DNA, 581 bp, Unknown
  Bacterial polypeptide expressing nucleotide sequence isolated from the Sargasso Sea
tggagctaatagattaggcgctaattctttattagatactgtagtttttggaagaagatcagcagagaaagcttcagattatgtaaaaagtatttctaatgaggtcattcctacagatgaatatgttaaacgagatctagatatgattaagaaaatattggattctgaaggtaaattcaaagttgctgaagttagaaataagatggcaacggcaatgactaaaggaattggtgtttttagagatcaagaatctatggaatatgccaaaaaaattgttgatcaaacaaaaattgattatcgagattccgtaagaattgataacaaaggaaaaatttataacactgatttattatttgcactcgagttgggaaatatgattgattgtgctgaatctatagttcatggagctttaactcgaaaagaaagtaggggagcccattttagaactgatatacctggtagaaatgatgaagaatggctcaagcatactcttatctacaaaagctcagaaggagaaataagtgttaagactcctgatgtaacaattactgaatggcaaccagttgaaagagtatattaaa

SEQ ID NO: 199914 - DNA, 812 bp, Unknown
  Bacterial polypeptide expressing nucleotide sequence isolated from the Sargasso Sea
aatgcttttaacagcagtaaaacttgcaccagctttagcaatgggtaatacagttgttattaaagcttcagagcttgctcctgttactcttttggaatttgcaaaactgattgaaaaaactggaatgcctaaaggggtaataaatattataactggactaggtgaaccatgtggtaaagcattaactactcataatcttgtggaaagaattgcttttacaggaggacctgatactgcaaaacatattgttaaaaattccgcagaaaatttatctcaagtgagtttagaacttggtggcaaaagtccagtagttgtttttgatgatgctgatcaagaaaatgctttaaatggaattaccgctggtatatttggagcaagtggacaaagttgtatagctggatcaagactttatttacaatcaaaaatttatgatgagtttttaaaaaaattaatagataaagcagaaaatataaagttgggcagcccaatggaagaagatgctcaaatgggacctcttaatagttttaaacaacttgaaaatattgaaaaaaatatcaaagctacaattgaacaaggtggaaaaataagatgtggaggtaaaagatcctcaatttcgaataaaggctattattttccagcaacaataattgaatgtgaaaatcataacttaccagttgcagaaaatgaattatttggaccaattttatctgtgatgaaatttgaaaatgaaaaagaagtaatagaaaaaatgaatgataacaaatatggtttatcttcaggagtttatacttctaattttgcaagaggactta

SEQ ID NO: 199915 - DNA, 388 bp, Unknown
  Bacterial polypeptide expressing nucleotide sequence isolated from the Sargasso Sea
tgcaggagggttagggcgtccagatggattttcagagggatactttgtcaaacctaccgtttttgcagacgttactaatgatatgaccattgctagagaagagatatttggacctgtactaagtattttgaaatatgagacggaagacgaagctattgatattgcaaatgatacagagtacggattagctggatatgttcaatcaggggacgaaagccatgcaaaggacgttgcaagaagaatcagagcaggccagattagtataaatagaggtaatactggccctgcagctccttttggaggttttaagacctctggaaatggtagagagcatggattaagcggacttaatgaatgcctcgagacaaaagctatattaggaagttag

SEQ ID NO: 199916 - DNA, 471 bp, Unknown
  Bacterial polypeptide expressing nucleotide sequence isolated from the Sargasso Sea
tatgaaacgttttctaaacaacaaagccttggtcacaggcggagcatccggaatcggaaaggccatctgtcagagacttgttgaggaaggagcagacctggttttcatcgacaggaacattgacgctggtaaagcatttgagcaagaactttccaatcaagaatcttcaagtctctttattgctgctgatatgactattctagccgaagttgagaaagcattcgctgagacaaaaaattttctgcctcacatcgatgttcttgtcaacaatgctggtgacgcatttgctgaaaactatgaggatacaactatagaaaactggaacgcagatttgtctctgaaccttacttcacactacatgctcacaagtctcgtacttccagaaatggagaaacgtgaaaaaggtgtggtaatcaacatttcctctgtgaacggcattcaggcattaggttgtccggcctatagtgctgc

SEQ ID NO: 199917 - DNA, 716 bp, Unknown
  Bacterial polypeptide expressing nucleotide sequence isolated from the Sargasso Sea
gtacctaatggagtatttaatgtagtcaatggatatggacctactgttggagcagcattatcagagcatccagatgtagctatgatgtcatttactggttcaactagagctggaattgctgtagcacaagcatctgcaagttcggttaaacgtgttcatcaagaacttggcggtaaatcttcaaatataattcttgatgatgtacctgatctagaaaaatctgtaaaaggcggtgcaggacattgttttttaaattcaggacaatcatgtaacgctccaacaaaaatgcttgtttcctcaaagaattacgataaggctgtagaaattgctgcagcaactgcaaacagtactactgttggagacccaaatggagaatatagattgggaccaattgcaaataaagttcaatacaaaaaaattattaaattgatagaaataggtattgaagagggcgcaacattagtcgcaggaggagtagaaaaaccagatggatgtgaaaaaggttactacgttagacccacagtttttgcaaatgtgacaaatgatatgacgatagcaaaagaagagatatttggccctgttcttgtaatgattaaatataataatgaagaagaggctatcaatattgctaatgatactgaatatggtcttgcaggttatgttcagggtgatcccgatcatgccagagaagttgctcaaaaaataagagctggaca

SEQ ID NO: 199918 - DNA, 370 bp, Unknown
  Bacterial polypeptide expressing nucleotide sequence isolated from the Sargasso Sea
gatgaggatatataaagaagaaatttttggtccagtactttcggtagttagggctaaagattttgattctgctgtaaatttagtcaatgaacacgaatttggaaatggaactagtatctatacaagagacggtgatgtgggtagaacttttgctaataaaataaaaattggtatggttggaattaatattccaataccagttccagttgcttaccattcttttggaggttggaagagatctttatttggtgatcagcacatgcatggacctgaaggtgtaagattttatacaaaattgaagacaataacttcaaaatggccttcaggattaagaacagatcctgaatttgtaatgccaattatgaaataa

SEQ ID NO: 199919 - DNA, 841 bp, Unknown
  Bacterial polypeptide expressing nucleotide sequence isolated from the Sargasso Sea
tttagagaaaataagactcaagcaacctacatagcagaatactatgactactttgcaggattagctgataaagttgaaggtactgtgctaccaattgataaaccaaacatgcaagtgattacaacaagagttccaattggagttgttgcagcaatcgtgccttggaattctcaaatgcttttaactgcagttaaacttgcgccagctcttgccatgggaaatacaattgtcattaaagcttcagagttgggaccagcaacattattggagtttgcaaaactagttgaaaaaactggaattccaaaaggagtggttaatgttataacgggttttggtgaaccttgtggtaaagctttaaccagtcacaatctagttgaaagagtagcatttactggtggaccagaaactgcaaaacacatcattaaaaattcagccgaaaatttatctcaagtcagtttagaacttggaggaaaaagtcctgtcgctgtgttcgatgacgcagaccaagaaaatgcactaaatggaataacagcaggaatctttggagcaagtggacaaagttgtatagcaggatcgagattgtatcttcaaaaaaatatatatgaagattttttaaataaattaatagataaagccaaaaaaataaaaattggtgccccgatggaacctgatactcagatggggcctttaaatagtttaaagcaattagaggttatagaaaaaaacatcaagcttactattgatcaaggtggaaagttaaaatgcggaggtaaaagacacaccttatcaaataaagggtattactttccggcaacaataattgagtgcgataatcatagtt

SEQ ID NO: 199920 - DNA, 829 bp, Unknown
  Bacterial polypeptide expressing nucleotide sequence isolated from the Sargasso Sea
atgaccttggcaaatggaactctcacggtttctgggacacttgcagcaacagccgttacaggtgatggttcaggtcttactggtattactgcatccgttattaaatcagatgatatttctcaaggagattcaacagtgaccattagcacatcatcaggagctgttaatatttatccagcatctggctcatcgattcttttagataatacgatcaacattgatggtagtttaattggccatgctgatgatacagacctcatgacccttgcaaatggtagtgttactttcacgggttctactgtgatcccaacagcggatgtaaatggtggtgcgatcgatgcggtgacactaggaacgaacagcgcagtgacccaggcggtcatcgataatgttaatatcgacggagctgtaataggtcatacatctgataccgatctcatgaccttagcagatggtagcgttactttcacgggttctactgtgatcccaacagtagatgtaaatggaggtgcgatcgatgcggtgacactaggaacgaacagcgcagtaacccaagcggtagtagatgatatcaatttaaatggtgcgaccatagggcatacggatgatacagaccttatgaccttggcagatggcagtgttactttcacgggttctactgtgatcccaacagcggatgtaaatggaggtgcgatcgatgcggtgacactaggaacgaacagcgcagtgacccaagcggtagtagatgatatcaatttaaatggtgcgaccatagggcatacggatgatacagaccttatgaccttagcagatggcagtgttactttac

SEQ ID NO: 199921 - DNA, 757 bp, Unknown
  Bacterial polypeptide expressing nucleotide sequence isolated from the Sargasso Sea
tcctgaagttgcttcagagatattaaaagagacagcagatagaattgtcccaacacattttgaattaggcgggaaatctgcagcaataatttatcctgatgctgacatcgataaagctgttgatagtacagttaaaggaatttttaaaccaaatgcaggacaaatatgtgtagcaatgtctagagttattgttcatcctaaaattaaagatgaatatatgacaaagttagttgcaaaaacgcaaaaattaaaaataggcgcaggtgatgaagaaggaacggaagtaacacctctaatatcaactgatcaaatgcaaagagtctcaaactatgtaaaatctggcgtgcaatctggtgctactttaaccatagggggggataaagctgaaagagatgaaggtaatttttatcaaccaactatttttgataatgtcaaagttgatgcaacaattgcacaagaagaaatatttggtccagtaacatcaatatttgattttgaagatgaagaagaagcaataagtatagctaattcaacaaaatacggtcttgcttctggagtatttactgcggatgatcaaaaagcaaaatggactgctgatagaattcaagcaggaattatttggcaaaacgattggtttgttgatggaaataatcttccaggtggtggttacaagagatcaggttatggaagagatggtggcgtagatggggtgtatagtcacggacagaccaaaaggattagtaaaagactctactag

SEQ ID NO: 199922 - DNA, 894 bp, Unknown
  Bacterial polypeptide expressing nucleotide sequence isolated from the Sargasso Sea
agtgcacaaaaagcttttgatacttcatggtcaaaattacaccctcgagatagagccaaatatttgcaattaatagcaaatgaattacgaaataatgctgaacatcttggtaaaattgaaacaattgatacaggaaaattatttcgtgaaacaaaaactcaggccaattatattgcagagtactatgattattttgcgggactagcagataaagttgaggggactgttgttccaattgataaagaagatatgcaagtcacgactactagagtaccaataggtgtagttgctgcaattattccttggaattcacaaatgctgcttacagcagtaaaattagctccagctttagctatgggaaatactgttgttataaaagcatctgatctagcgccagtaacacttttggaatttgcaaaactcattgaaaaaacaggcataccaaaaggtgttgtaaatgttgtcactggtttaggagacccatgtggaaaggcattaactcaacataatctcgtagaaagaattgcatttacaggaggtccagaaacagcaagacatattataaataactcatcacacaatttatctcaagtaagtttagaacttggaggtaagagcccagttgcagtttttgatgatgctgatcaagaaaatgcactgaatggaattacagctggtatattcggagcaagtggtcaaagttgtattgctggttcgagattatatattcaatcaaatatatacgatgattttcttaataaacttatagataaagctaaaaatataagattaggccctccaatgtctgaagaaacacaaatgggacctcttaatagtttgaagcaacttgaattaattgaaaagaatataattgaaacagaagcacaaggtgga

SEQ ID NO: 199923 - DNA, 448 bp, Unknown
  Bacterial polypeptide expressing nucleotide sequence isolated from the Sargasso Sea
atctgaacttgctccagtaactcttttagagtttgcaaaattaattgataaagctggattgccaaaaggagtaattaatatcattacaggtttaggtgaaccttgtggtaaagctttaactacacacaaccttgtagaaagaatagcattcacaggtgggccagaaaccgcaaaacatattgttaaaaattctgcagaaaatttatctcaagtaagtttggaacttggtggtaaaagtccagtcgtagtatttgatgacgctgatcaagaaaatgctttaaatggaataactgcaggaatatttggagcaagtggtcaaagctgcattgcaggatctagactatatttacaatctaaaatttatgatgaatttttaaaaaaattaatttcaaaagctgaaaaaataaaattgggtggcccaatggaaaaaaagatactcaaatggacc

SEQ ID NO: 199924 - DNA, 664 bp, Unknown
  Bacterial polypeptide expressing nucleotide sequence isolated from the Sargasso Sea
cagcgcagatatcacaggcattttcaccgaagcgggcgcgcccgctggattgtttggtgatctaccgattctgatttcagagagcccagcagtcattgcaaatccgcttgtgcggggcatcacactgaccggaagtgagcgggcgggtcgcgaagtggctgccgaggcgggcagaaatcttaaaaagtgtgtgctcgagcttggcggtagtgacccgtatcttattttagcagatgctgatttggaacttgccgctgactgctgcgttaccagccgaatgctttgtgccggacaggtttgtatagccgcaaagcgcataatcgcagtcgatgatatttatgaacgattccggaacatagtgattgataaaatcgatcaatatgagatggatgatcccgccaaatcgaattgtcgtctcggaccgctcgcgcgagaagacctacgcgatacggtccaccggcaggtggttgaaagtgtcgaagcaggggcagacctggcatgtggtggccacataaccgggcgggccgggtggtggtatcctccgacggtattggaaaatgtgcatccgggaatgccggcatttgaggaggaaatattcggacctgtggtatcgctcgtgcgagccgcggatacgactcacgctattgcgttggccggtgacacc

SEQ ID NO: 199925 - DNA, 859 bp, Unknown
  Bacterial polypeptide expressing nucleotide sequence isolated from the Sargasso Sea
tattttcggacaatttttaatgaaattgatgcccctgaaggtattctctatatagttcatggttatggtgaaacaacaggcagaaaacttgttgaccatcattctgtaaatcaagttgtattcactggttcaccagaagttgcttccgaaataataaaaagaacagcagatagaataatcccttgtcatttagaattgggaggtaagtctggagctataatttacgaagatgcaaatatcgaaaaagcagttgatagcacgattaaaggtatatttaaacccaatgcaggtcaaatatgtgtagcaatgtctagaataataatccatccaaaagtaaaagatgaatacatatcaaaattatatgaaaaaactaaaaatttaaatattggtgcaggtgacgatgaaaaatcagatgtgactccattaatttcaaaagatcaattgaaacgagtttcagattattgcaaatctggtttacaatctggggcaaatttagtcatcggaggaggaatacatgaaaaagaaaaagggaactttttccagccaactatatttgataatgtaaacccagactccgcaatagcaaaggaagaaatatttggtccagttgcaagtatttttaattttgaaacagaagatgaagcaataaatattgcaaatgcaactgactatggtttagcttcaggtgtttttacttctaatgatcaaaaagccaaatggacagcagaaagaattgaagctggaataatttggcataatgattggtttgtagatggcgtaaatttaccaggcggaggttataaaaaatctggctatggtcgagatggtggtattgacagtttgtacagctatggacaaa

SEQ ID NO: 199926 - DNA, 433 bp, Unknown
  Bacterial polypeptide expressing nucleotide sequence isolated from the Sargasso Sea
tcttttagagtttgcaaaattaattgataaagctggattgccaaaaggagtaattaatatcattacaggtttaggtgaaccttgtggtaaagctttaactacacacaaccttgtagaaagaatagcattcacaggtgggccagaaaccgcaaaacatattgttaaaaattctgcagaaaatttatctcaagtaagtttggaacttggtggtaaaagtccagtcgtagtatttgatgacgctgatcaagaaaatgctttaaatggaataactgcaggaatatttggagcaagtggtcaaagctgcattgcaggatctagactatatttacaatctaaaatttatgatgaatttttaaaaaaattaatttcaaaagctgaaaaaataaaattgggtggcccaatggaaaaagatactcaaatgggaccattaaat

SEQ ID NO: 199927 - DNA, 921 bp, Unknown
  Bacterial polypeptide expressing nucleotide sequence isolated from the Sargasso Sea
atttgatggggcggcaaatgtatttgattattatgccggcttaactgataaaattgaaaataaacttataccttcaggaaaggatacttttaattatattgtacttgagccttttggtgtaagtttgcaaatagttccttggaattacccagtatcactttttgctagatcagttgcggtgagtttagttgtaggaaatactatagtaataaaacctcctgagttatgccctatttcatcaaatatttttggagagatttttaatgaagttgaagtacctgacggaattttaaatattgtacatggatatggagaagttacaggcaaaaaattagttgatcatagttcaatagaccaagttgtttttacaggatcaccagaagttgcatcagaaattttgaaaagaacagctgacagaatcataccatgtcatcttgaattaggtggcaaatcagcagccataatttatccagacgcaaatatcgatattgcagtagacagcacaattaaaggtatttttaaacctaatgctggtcaaatatgtgtagcaatgtctagagtaattatacatccaaaagtaaaagatgaatacatgacaaaattaatagaaaaaactaaaaatttaatgattggagcaggtagtgataatatgacggaagttacccctttaatatcaacagaacaattgcaaagagtttcaaattattgtcaatcaggagttcaatctggagctgaactcataataggtggtgaaaaacatgatcaagaaaatggcaactattataaaccaactatatttgataatgttgatcccaaatcaacaattgctcaagaagaaatatttggaccagttacaagtatttttaattttgaaacagaagaagaagcaattgaaatagcaaattcaacagattatggact

SEQ ID NO: 199928 - DNA, 707 bp, Unknown
  Bacterial polypeptide expressing nucleotide sequence isolated from the Sargasso Sea
aataaccttagccgatggtagtgttacttttacgggttccactgtgataccaacagcggatgtgaatggaggggcaattgatgcggtgactctagggataaatagcccggtaacccaagcagttatcgataacgtcaatattaatggtgcccaaataggccatactacagatacagatttaatgacccttacaagtggtactgtaacagtagcagggactgttgcagcaacagctattacaggtgatggttcagggctaactggcattactgcttctgttatgaaatcagatgatatttctcaaggagatgcagcagtgaccatcagcacttcatcaggagctgttaatattaatccagcatctggttcaccgattcttttagataatacgatcaacattgatggagcaatcataggccatacggacgatacggatctcatgacattagcaaatggaagtgtgacctttacgggttctactgtgataccaacagcggatgtgaatggaggtgcgatcgatgcagtcacactagggaccaacagcgcggtgacccaggcggtcatcgataatgttaatatcaatggggcagagattggtcacacttctgatacagaccttatgacccttgcagatggtagtgttactttcacgggttctacagtaataggtaccgtggatgtgaatgggggtgcgatcgatgcggtta

SEQ ID NO: 199929 - DNA, 748 bp, Unknown
  Bacterial polypeptide expressing nucleotide sequence isolated from the Sargasso Sea
acaggatcagcaattatgactgaagctgctaaaaatattaccaaagtgaacctagagttgggaggaaaagctccagcacttgttttagctgatgcagatattgatttagctgtttctaaaattcgtgatgcaagagttatcaatagtggccaagtatgtaattgtgtagaaagagtatatatagacaaaaaaattgcagatgaatttacagaaaaattaactaaagcaatgcaaaacactaagtttggaaaccctaatacaaaaactgatatagattatggacctttgattaatgaagatggctccaagaaagtaagtgaattagtgaattcagcaaaaagttctggagcagaaattttaactggtggaaacagagatgactcttctgaaggaatttattatcatcctactgttatagctaattgcaaacaagatatgagaattatacaagaagaaatctttggtcccgtattacctttagttgaatttgaagatttagaccaagcgattgaatatgcaaatgattctgattatggtcttacttcttctatttttactaataatttaaaaacagctttaaaagcttgtaatgaaatacggtttggagaaactatgataaatagagataatatggaaattttccaatcttttcatgcaggattaagaaagtcgggcattggcggtgctgatggtaagcatggactatatgaatacatgcaaacacacgcagtatatatgagagcgtaat

SEQ ID NO: 199930 - DNA, 861 bp, Unknown
  Bacterial polypeptide expressing nucleotide sequence isolated from the Sargasso Sea
ggccctcggggaccctcggggccctcgggatcctgggggccctcggggtcctcggggtcctcggggtcctcgggggccctcgggggccctcggggccctcgggggccctcgggggccctcggggtccctcggggccctcggggtcctcggggtcctcggggtcccttggggtccctatgctatgctatgcgttgctttgctttgctatgctatgctttgctttgttttgctttgctatgttatgctatgctttgttttgcttggctttgctttgctatgctatgctatgctttgttttgctttgctttgctatgctttgctttgcgttgttttgctgtgctttgctatgctatgctttgttttgcttggctttgctttgctatgctatgctatgctttgttttgcttcgctttgctttgctatgctatgctatgctttgctttgctttgctatgctgtgatttgctttgttttgctttgctatgctatgctatgctttgttttgcttggctttgctttgctatgctatgctttgctttgttttgctttgctatgctatgctatgcgttgctttgctatgctatgctatgctttgttttgctttgctatgctatgctatgctttgttttgcttggctttgctatgctatgctttgctttggtttgctttgctatgctatgctatgctttgttttgcttggctttgctttgctatgctatgctatgctttgttttgcttggctttgctttgctatgctatgctatgctttgttttgctttgctatgctatgctatgctatgctttgctttgctttgctatgctttgctttgttttgctttgctatgctatgctatgctttgtt

SEQ ID NO: 199931 - DNA, 922 bp, Unknown
  Bacterial polypeptide expressing nucleotide sequence isolated from the Sargasso Sea
ccggttggagttgcaggcctaatcacaccctggaatctaccactctacttgctttcttggaaagtggctcctgctttattgatgggcaataccatcgtcgccaagccatcggaaatgacgccgatgacagcttcgctactggctgaagtcatcgaagatgtgggtttgccaagcggggtattcaatctagttcatggaaatggtttggatgcaggagcacctttgactgcacaccctgatgtcaacctcatttccttcacaggaggaacggcaactgggagtgaggtggcaaaatctgcaagctcgggtttcaagaaattgagtttggaacttggtgggaaaaatgcgaccatcattcgtgaagatgtggacattgaatccatgatgcccggcatcgtccgtgcatcgttcttgaatcagggacaagtttgtctgtgtggttcaagaatactaattcatgaatcaatttatgatgtctttgtcgaagctttcctcaacgctgtcaacgacatgattgtgggagatcctgctgatgaagatactgaactaggggcattgatttcagcagcacaccgtgacaaagtcatgtcctacatcgaccttgcagaggatgaaggtggagacatattgtgtggcggtggcccccccgttgggattccggatgcatttgcaaatgggttttggatttcacccactgtaatcgatggattaacgcccgatagtcgatgtgcgacagaggaaattttcggaccggtcgtaacactacatcctttcttcgatgatgcagaagccattgaaattgcaaatatgaccgattatgggttggcaggttcaatttggactcaagatgtcgatgcaggatcacatttggctgaacaaatcgaatccgggatggtatgggtcaactgctggttgcatcggg

SEQ ID NO: 199932 - DNA, 859 bp, Unknown
  Bacterial polypeptide expressing nucleotide sequence isolated from the Sargasso Sea
aatgcctaatggtattttaaatattgttcatggatacggagagataacaggaaaaaaattagtagatcataaagaggtaaatcaagttgtttttacaggatcaccagaagttgcttcagaaatattgaaaagaactgcagataaaataataccttgtcatctcgaattaggaggaaaatcagcagctataatttatccagatgctaatattgataaagctgtagaaagcactatcaaaggaatttttaaaccaaacgcaggacaaatttgtgttgcaatgtcaagggttataattcatccaaaaattaaagatgaatatatgtctaaattatttaaaaaaactaaaaatttaaaaattggtcctggtagtgatgaaaaaacagatgtcacaccattaatttctaaagaacaattgcaaagagtctctaattattgtcaatcaggaattcaatcaggtgcagatttagttactggaggaaaaataaaagaagagaatgagggtaattattttcaaccaactatttttgataatgttgatccacaatctacaattgcacaagaagaaatatttgggccagttacaagtgtatttaattttgaatcagatgaggaagctattgaaattgctaattcaactgattacggacttgcatcaggtgtttttacatcaaatgatgaaaaagccaagtgggcagcagatagaattgaatctggcattgtgtggcataatgattggtttgttgatggtgttaatttacctggaggtggttataaaaaatctggttatggccgtgatggtggaatagatagtttatacagctatggacaaacaaagcgtgttagcaaacgtttaacataa

SEQ ID NO: 199933 - DNA, 514 bp, Unknown
  Bacterial polypeptide expressing nucleotide sequence isolated from the Sargasso Sea
attgttcactttagtttcactttatttttcactttattgttcactttacttttcacttgttttcagtttattcttcattttatgtttcactttatttgtcactttatttttcattttatttttcactttatttttcattttatgtttcactttattttcactttatttttcactttatgtttcactttatttttcacttttttttcactgtacttttcactttacttttcactttattttcactttatgtttcactttatttttcacttcatttgtcactttatttttcactttatttttcactttgtttgtcactttatgtttcacgttatgtttcactttatttttcattatatttttcactttatttttcactttattgttcactttatgttcaccttatttttcacttatttttcacgtgtattgttcactttatttttcactgtatttttcactttacgtttcactttatgttcactttatttttcactttatgttttactttattttt

SEQ ID NO: 199934 - DNA, 784 bp, Unknown
  Bacterial polypeptide expressing nucleotide sequence isolated from the Sargasso Sea
catgaatcgttttgagaatcgagtagctcttgtgaccggtggagcttcaggaatcggcgctgcgtctgtgcgtcgcttagtcactgaaggagctcaggtcatgatcgctgatctagatggcgaaggcgccgagcagctagccagcgaaataggcgccatgactgacactttccaagttgatgttgccgattcgtcagccgtagatgacatggtcaaagcgaccgttgaacgtttcggtcgactagatgtccttttcaataacgctgggatcgtttccactggcactgtcgacacgttaagcgatgagcattggaagcgaatcatggacgttgatttgagttcagtgatgtacggctgtcgcgccgttattcccgtgatgagagctcagggtggtggagctatcgtaaatactgcttcaatttcaggattatttggggactggggaattcctgcctacaacgccgctaaaggggctgtggtgaatttgactaaagctatggccgctgaccacgcccgggacaatattcgtgtgaatgcagtgtgcccaggaggagtcgaaactccgttagtcgctgaagtggtcgcgagccgacgagcccaaattgaatacaaacgtctcgttccccaaggccgtatgggtaagcctgaagaaatagctgccgcggtcgcatttttggcgagcgacgacgcgagttatataactggccacaaccttgttgtagatggtggggtgactgtgacgactggtcaacccaatttcacggcgatcgctgaacgctggtgg

SEQ ID NO: 199935 - DNA, 505 bp, Unknown
  Bacterial polypeptide expressing nucleotide sequence isolated from the Sargasso Sea
aatgggtgatccaatggacaatgttgatattggccctatggtatcaataaatgccagagatgaaattcatgaccaggttacgcgttcaatatattctggtgcaaaacttgaacttggtggcaaagtaccagatttaaaaggatgtttttatccagttactctgttgtctgatgtcaaaccaggtatggcagcatttgatgaagaaatatttggaccagttttttcagtaataatggcagaagatgaagaggaagcaattaatctagggaacaatacgcagtttggcttaggggctgctattttcacagaaaatatcaaaaaggctgaagagatagctaaatccagtttaaatgctggattatgttttgtgaatgattttgttaaatcggatcctagattaccatttggaggtgttaaagaatctggatatggacgtgagctatcaagctatggtctgatggaatttgtaaatataaaaactgttgtagttaaccatgattattag

SEQ ID NO: 199936 - DNA, 717 bp, Unknown
  Bacterial polypeptide expressing nucleotide sequence isolated from the Sargasso Sea
tcatccagatgttaatatgatatcttttacagggtctacaagagcaggagctttaatttcaaaaaatgctgcaaaagattttaaaagagtcagtcttgaacttggaggcaaaggtgcaaatattgtgtttaaagatgcagacaatgaagctattgaaagaggagctcttagatgttttagaaattcgggacaatcttgcaatgctcctacaagaatgttggttgaaaaatcaatatatagcgatgctttagaaagattaaaaaaatatacagatgaatttaaagtcgatactccagacaaagaaggggatcatattggtcctgtaatttctgaaactcaatataataaaattcaaacacttataaaaaaaggagttgaagaaggcgctaaattgatttcagggggtcctggaaaacctgaaggattagaagcgggatattatgttaagccaacagtttttgctgatgtcaaaaatagcatggagatagcaagaacagaaatttttggaccagtattatcagtaataccatttgaaacagaagaagaggcaatagaaatagcaaatgatactccttatggtttgacaaattatattcaaagtgaagatcaagaaaaagtcaaaagagttgcaagaaaattgagatctggaatgattgttgcaaacacctcgtcacttgctgtagatgctccgttcggaggttttaaacactctggtat

SEQ ID NO: 199937 - DNA, 829 bp, Unknown
  Bacterial polypeptide expressing nucleotide sequence isolated from the Sargasso Sea
actaaagtatctgctgctattgcgtctggatgtactatgatattaaaacccagcgaaatatctccatattgcgcgatgttattagctgaagtaattgataaagctggactaccaaaaggcgtattcaatttagtaaatggatatggcccaatagttggtgcagcattatctgagcatgtcaatgtcgatatgatgtctatcacaggctcaactagagcaggtattgcagttgctcaagcttctgcagcctctgttaaaagagtttcgcaagaattgggtggtaagtcagcaaatataatcctcgactctgtagcagatctagaaaaatcagttaaaggtggagttggccattgttttttaaattctggtcaatcttgtaatgcacccacaaggcttttagtttcagaaaaaaattatgaaaaagctgtagaagttgcagttgaggtagcaaattcaacaactgttggtgatccaaatggagaatatagaattggaccaatatcaaatagaacccaatatgaaaaaataataagaatgattgaaataggtatcgaagaaggtgcaaaacttgttgctggaggcattgataaaccagatggttatgaaaaaggtttttatgttaaacctacggtttttgctgatgtaactaatgatatgactattgctcaagaagaaatatttggacctgtgttatgtatcataaaatataatacagaggatgaagcaattaatattgctaatgactcagaatatggtttggctggttatgtccaaggcgaactatctcatgctcaagaggtggaagaaaaattagagcagggcaaattac

SEQ ID NO: 199938 - DNA, 580 bp, Unknown
  Bacterial polypeptide expressing nucleotide sequence isolated from the Sargasso Sea
atgggtatttatttaaaagatattaatcttaaaggtaaaacagcggtagttactggcgccacaaaaggcataggtagagctaccgctatagctcttcaccaaattggggcaaaagttatagcttttgggagaaatgaatctgaattaattgatcttaaaaaaaaattaaaaaaaaaaattacttattacagatgtgatatgaatgattatgaaaaattaaaagaaattatatattctcaaaaaagaatcgatgttttggttaacaatgctggaactaatcttccagaaaaatttttaaatgtaaaacaaacttcattagatcatctgttaaatgtaaatacaaaagctgctttcaatatggccaaactttgcacagataaaatgattaaattaaaaaataggaaaaaagttggaggctctatagtaaatatttcttctatgtttggaattgttggaggaccggacagaactgtttatagcatgacaaaatttggaatcgaaggtttaactaagggtatgtctattgatttggcaagtaaaaatattagagtaaattgtgttgctccctatgtttgttgaa

SEQ ID NO: 199939 - DNA, 749 bp, Unknown
  Bacterial polypeptide expressing nucleotide sequence isolated from the Sargasso Sea
aagagcagggaaattaattacaaaaaatgcagccgaaacaattaagagagtttgtttagaactgggcggtaaaggtggaaatattgtatttgcagactcataccctaatgctgttagagatggaataaaaaatgtaatgagcaattctggacaatcttgtgatgccccaacaagaatgcttgtagaaaaatctatatacgaaagagctgtaagtgaagcagtggatgaagccaataaaattaaagtagatatagcatcaaaaaaaggagatcacataggtccagtagtttcaaaagttcaatacgataaaattattaacttaataaaagatggagttaatgaaggtgcaacattagctgcaggaggtcctgaaatgcccaatggtttaaataaaggatattttattaaaccaaccatatttactgatgttacaaatgatatgcagatagcaaaaaaagaaatttttggaccagttctttctattataccttttgaaacagaagaggaagcaattagagttaccaatgatacagaatacggccttggaaattaccttcaaactgaagataaagaaaaggcaaaaagagtatctaaaaaacttagatctgggatcgtttatattaatggaaattctccagactctggaactccttttggtggattcaaacaatctggaaatggacgcgaaggtggttcttggggattagaagaatatctagaggtaaaaacaattactggctggaaataaa

SEQ ID NO: 199940 - DNA, 817 bp, Unknown
  Bacterial polypeptide expressing nucleotide sequence isolated from the Sargasso Sea
cggtaacgcgttcattttaaagccatcagagcgcgatccgtcagtacctgttgaactggcaaagcttatgatgaaagcaggccttcctgcaggtgtacttaacgttgtacacggtaacaaagaagtggttgatggtattttagatcatcaaactattaaggcggtgagctttgtaggctcttctgatatcgctaattacgtgtacgagcgtggcgctcgtgcaggtaagcgcgttcaagctatgggcggcgcgaaaaaccacggcattgtaatgcctgatgcagatctagatcaggtggtaaccgacttagttggtgctgcatacggcagtgccggtgaacgctgtatggcgctaccggttgtcgttccagtgggcgatgaaaccgctgagaaactgaaagccaagcttattccggctattaaagacattatggtaagtcatagtgaagatcctaacgctcattatggccctgtggttactgctgctcacaaagagcgcgttgaaggctatatcgacctttgcatagaagaaggtgctgagcttgtttacgacggcagaaccagtcagatcccagacgacagtcaaggctacttcatcggcccaacgttcttcgaccacgtgaccaaagacatgcgctcataccaagaggagatttttggtccagtgctgcaaatggtgcgcgcgaaagatttcaacgaagcggttaacttagcaagtgatcatcaatacggtaacggtgttgctatgtacacccgtaacggccatgcggcgcgcgaatttgcgcaacgtgtaaacgtgggcatggtagggattaat

SEQ ID NO: 199941 - DNA, 885 bp, Unknown
  Bacterial polypeptide expressing nucleotide sequence isolated from the Sargasso Sea
attggcgtttgacgcaagcattgatactgataaaaaagtaattacagttgacccgcttatcgattttgattacagcgaaaccatttatctttcaattggagattttgaagattttggcggaaacactttaacctcaaatccatcaacaatgttcaatgtgatcgcaaatgtaaagcccgttgctattgctcaagacgttacgctaaacgaggatagtaagatttcaatcgagctcaaaggtaccgatagcgaaaacgcacctcttgcctatgtattttcattgcctagatttggggagctagctggggatgttccaaatattgtttacactcctatggctaacttttttggtcccgattcatttagatttattgttaatgatggattcgataatagcgattcatctttcataaaaataaacgttcaaccaattaatgacagcccaaaacttcagctaatcaatttagatactttgaagatcaatcaagtaagcaatgaaggatatttatttccaaaaaataataatcagaatagtacagagatactttctattagcgatgttgataacgataaaatagcaaagacaataattaagatagagccatttatttctggtgaggatacattatttattgaaaatggaaatatataccctaatataaaaagtgacggatcagggaaagtatttacatttaccacgcccgatcttatcggagctaatcattcttattcgctctcactgattaaatacaaaaatttattgggcaaggatttaaccaaaggtacaagagcgattttgggctttgtaagcgatggggatagcttaagtaattctctgtctagaatcatcaatctaaatattgttaattcgattccggaggtgct

SEQ ID NO: 199942 - DNA, 714 bp, Unknown
  Bacterial polypeptide expressing nucleotide sequence isolated from the Sargasso Sea
gaattatcctttagcaatgataggtcgttcattatcatgttcatttgcaactggtaattctacaattattaaaactgcagaattaactccgctatctgcaacaatttttgcaaaagctataaataatgccgaagttccaaaagggctaataaatataatttgtggatatggaaatgaagcaggttcatatttggtatcacatgaagatgtaaatcatgttgtttttactggctcagttgcaacaggtaaaaaaattcttcatgcttgtgccgataaagcaattccagccgttgttgaacttggaggaaaatctgcaggaatagtctatccagatgcagatctgaatgatgttttagatagcgcaaaaagtggaatctttggagttgccggacaaatttgtacagcaatgtcacgtcttgtagttcataaatctataaaagatgaactggtagataaattagttgatttaagtaaatctctaaagattggtcctggtattgataaagatactgatttaactccggttatatctgaaaatcaattacaaaaagttgaaggttacgcaaggtcaggaattcaagaaggtgcagaagctgctcatggaggaaaaagggttgatcgagaaggttactttatggaaccaactgtattaaataatgtaaaacaagatatgactgtagcaagagaagaaatatttggtccagtgctttcagt

SEQ ID NO: 199943 - DNA, 823 bp, Unknown
  Bacterial polypeptide expressing nucleotide sequence isolated from the Sargasso Sea
ctttcagctcgaaaaacattgaaaaaatcttcctggagaaggttatcggttgaaaaaagaattgagatactggaatcttgcagaaaattaatactggataatattgaagaacttgcacgcctagaatgtttgggaacaggtctaattttaagggaaataaagggatttcatatacatagggctgcttataattttcgtttctttgctcaatacataagtcaagctcatggtgaacgttatgacaatactgaaggctatattactttagtaaatagagaacctgctggtgttgttggactaatagcaccttggaatgctccattagccctggcaactatgaaaattgcttccgcaattgcatttggaaattgtgcaatattaaagccttcagagcaaacacctttttccttgataaaattagcaagtttactccaggatgtattacctgaaggagtattaaacttagtgaatggtaggggaccaataactgggtcaagtcttgtaagtcatcctgaggtagacagaattagttttactgggggtaccgttactggtcgtgaggtaatgatggatgcaggcaaacaacttacgccttgtacaatggaacttggaggaaagtcagcaaatataatttttgcttctgcagattatcaaagggcaatagacggagcacttataggaatcttttcaaataacggacaacagtgtctggctggatctagaattcttatagaagaaaaaatatttaatcaatttgttgaagaattcgaagaaagaacaaaaaaaattgttgttggagatcctctaaatgacgaaacagaaa

SEQ ID NO: 199944 - DNA, 720 bp, Unknown
  Bacterial polypeptide expressing nucleotide sequence isolated from the Sargasso Sea
gaaaatatttaaaaaagaccgttcttgagctgggaggtaatgacccatatattatacttgatgatgcggatttggataatgcaatagaagcgtgtatcagtgggcggattttaaatacaggacaaagttgtatttcagccaaaaggctaatagtaacaaaatcattatatcatgattttttaaaaaagctcaaggtaaagttagctaaaatgataatgggtgatccaatggacaatgttgatattggacctatggtatcaataaatgccagagatgaaattcatgaccaggttacgcgttcaatatattctggtgcaaaacttgaacttggtggcaaagtaccagatttaaaaggatgtttttatccggttacattgttgtctaatgtcaaaccaggtatggcagcatttgatgaagaaatatttggaccagttttttcagtaataatggcagaagacgaagaggaagcaattaatctagggaacaatacgcagtttggcttaggggctgccattttcacagaaaatataaaaaaagctgaagagatagcaagatccagtttaaatgctggattatgttttgtgaatgattttgttaaatcggatcctagattaccattcggaggtgttaaagaatctggatatggaagggagctatcaagctatggtttgatggagtttgtaaatataaaaaccgttgtagttaaccatgattattaga

SEQ ID NO: 199945 - DNA, 793 bp, Unknown
  Bacterial polypeptide expressing nucleotide sequence isolated from the Sargasso Sea
gggccagaaactgcaaaacatattgttaaaaactctgcagaaaatttatcacaagtaagtttagaacttggtggaaaaagtccagttgtggtatttgatgacgctgatcaagagaatgctttaaatggaataactgcaggaatttttggagcaagtggtcaaagttgtatcgcaggatctagactttatttacaatctactatttatgataaatttttagaaaaattaatttctaaagctgaaaaaattagattaggtggcccaatggaaaaagatacacaaatgggacctttaaatagttttaaacaattagaaaatatagaaaaaaatattaagaatacaatcgaacaaggtggaaaaattaggtgtggaggaaaaagatcctctgtttcaaataaaggttattattttccagcaacaattattgaatgtgaaaatcataatctaccagtcgcagaaaatgaattgtttggtccaattttatcggttatgaaatttgataaagaggaggaggtaatagagaaaatgaatgataataaatatggattatcatcaggagtttatacctcaaattttgcgagagggcttagagtttccaaagctataagagcaggaattgtattcataaacacttatagactcatatcacctatggcaccctttggaggaataaaagatagtggctatggaaaagaagcgggcattgagtctattaaagaatataccagaataaaaacaacatggtataattcatctgataaaccaatgtctgatccatttactatgggttaat

SEQ ID NO: 199946 - DNA, 711 bp, Unknown
  Bacterial polypeptide expressing nucleotide sequence isolated from the Sargasso Sea
taccttgtcatttagaacttggtggaaagtctgccgcaataattttccctgatgcaaatattgatcaagctgttgaaagtactattaatggtatttttaaaccaaatgcaggacagatatgtgttgctatgtcgagagtcattattcatccagaagtaaaaaatgaatatttgaaaaaacttattaataaaactgaggatttaaaaattggtcctggagatgataaaaattcagatgtaactcctcttatttctagagagcaacttaaaagagtttcaaattattgttattctggaattcagtcgggagcaaatttggcatttggtggaaatgaattcattcataaaaagggaaattatttttctccgacgatatttgataatgtagacaaaaactcaacaatcgcacaagatgaaatctttggccctgtaacagttgttttagattttgaatcagacgaagaggctattgatattataaactcaactgattatggtcttgcttcagggattttcacatctaatgaccaaaaagccaaatgggtggcagatagaatagaagctggaatagtatggcataacgattggtttgtagatggtgttaatttgccaggcggtggttacaaaaagtcaggttatggtagagatggtggattagatagtttatatagttatggacaaactaagagagtaagtagaaggctattttagg

SEQ ID NO: 199947 - DNA, 1303 bp, Unknown
  Bacterial polypeptide expressing nucleotide sequence isolated from the Sargasso Sea
atgattgaaaagaaaaatttttatattaatggttcatgggttacaccaaaaaatgaaaaagatatccaagtaattaatcctgcaactgaaaaaagttgtgcagtaatttctttaggaggcaaagaggatattcacgatgcagtattagcagctaaagaagcttttaaaacctggggatattcctcaaaacaagagagaattgaattattggaaaagttttatgtgctttataaaaaaagatggaatgatattactgaggcaattattcaagaaatgggtgcaccaaaagattttgcctcaaaactccaaacgggaactggcgctagtcatacaaaatcatttattcgttatttaaaagagtttgagtttgaaaaaccacttggagatcatgctaaaaatcaaagactaatatatgaaccaaagggagtttgtgcattaattactccttggaattggcctataaatcaagttactttaaaagttattcctgctttagcatctggctgtactatgattttaaaaccttcagagttagcaccattatctgcaatgattattgcggaattaattgatgaagcaaagtttccaaaaggtgtatttaatttagtaaatggagacggtgcaactaccggtgatgcattaacaagccaccctgatgtaaatatgatttcatttactggctctacaagagcgggggcattaatttcacaaaatgcagccaaagattttaaaagggtaagtttagagttagggggaaaaggtgcaaatatcatatttaaagatgctgatacagaagctatagagagaggtgcttttagatgttttagaaattctgggcaatcctgcaatgcacctacaagaatgttagttgaaaaaccaatttatgacgatgctattgaaaggctaaaaaagtatgcaaatgaatttaaagtagatgatccaaataaagagggtgaacatataggccctgtaatttcagaagtacaatttgataaaattcaaggtttaatccaaaagggaatagatgaaggggcaaaattaattgctggcggcccaggaaaacctgaaggattaaaagatggttattatgtaaaacctacagtatttgcagatgttaataatgatatggaaattgcaagaacagaaatttttggtccagtcctatctgtaattccatttgaaactgaagaagaggctatccagattgcaaatgacactgattatggattacaaattatattcaaactcaagataatgataaaatacaaagggttgcgagaaaacttagatctggaatggtaga

SEQ ID NO: 199948 - DNA, 1301 bp, Unknown
  Bacterial polypeptide expressing nucleotide sequence isolated from the Sargasso Sea
tatggagttaagaaattttattgacggtaaatttattgattcactctctaagaaaaatattcctgttttaaatccagctaatcaaaaaattgtaggtaatattgatgaggccttggatgaagaaattgatttagctttcaaagctgcaaaaaaagcattcgataaaagaattttggtcgatatggatgcaaaagataaatcaaatatgatgagagctattgctaaaaaattaagagaacgaaaagaagaaggaggtaaactccttagccaagaaaatggtaaaacgattaaacaatgtatagatgaatttaaaggtgctgccgatactttcgatttttatgctggactaacagataaaatagaaaataaacttataccttctggaaatgatactttaaattatgttgtccttgaaccttttggtgtggctcttcaaattgttccttggaattaccctgtttctattttttcaggaatggttgcacaaaactggattgttggaaatacaatagttatcaaacctcctgaattgtgccctatatcatctaatttttatggtcaaatttttaaagatgttggcgtgccagatggaattataaatattgttcatggttatggagaaacaactggacgaaaactagttcaacatcctggaagtgattatattgtttttacaggatcgcctgaagttgcatcagaaattctaaaagaaacagctgatagaattataccaactcattttgaattaggaggaaagtctgcagctataatctatcctgatgctgatattgataaagctgtagacagtactttaagaggagtttttaaacctaatgctggtcaaatttgtgtagcgatgtctagagtattgctacatccgaaaattaaagatgaatatatgacaaagctagttggcaaaacgcaaaaattaaaagttggtgcaggtgacgaagatgggactgaggtgacgcctttaatctcaactaaccaaatgcaaagagtttcaaactatgtaaaatctggcgtacaatcaggtgctactttaacaatgggcggggataaagctgatagagatgatggaaatttttaccaaccaacaatttttgacaatgtaaaaattgactcaacaatagctcaggaagaaatatttggtccagttacatctatatttgattttgaagatgaagaagaagcaataagtatagcaaactcaactaaatatggtctagcttcgggtgtatttactgcagatgatcaaaaagcaagatggacagctgatagaattcaagccggaattattt

SEQ ID NO: 199949 - DNA, 835 bp, Unknown
  Bacterial polypeptide expressing nucleotide sequence isolated from the Sargasso Sea
atgaacaattttagtggtaagaatgtgcttataacaggggcatcttcgggaattggactagccatggcaaaagattttgcaaatagaggagcaaatttaattctcactgcaagatctgaagataagttgatgcaattagcagaggatttaagtgataaaaatataaagacacatgtcttcattgaagatataagtttgcctaattctgctcaaaaactttttaaccaggtaaatgaggctggattgaaagttgatgtgcttgttaataatgcaggatatggtcgttggggaaactttgatgagtgccctatagaagactatgaaaatatggttcacttaaatgttacatctttaactgaattgagctacttattcgttgatcaaatggtaaaaagaggttcaggcgggattattaatgttgcttcaacagcagcattctttccaataccctattcagccgtatatgcagctacaaaagcctatgtattaagtctaagtgaggctttaaactttgaatactcaaaaaaaggtgtacatgtgatggcagtatgccctggtgcgactgaatcgaagttcataaatgtagcaacagaaaattcagaaagattaaagcaaagattaattaatgtagatagagctaaaaataaattaacaaccagcaaaatacagactgctgaagattgttcaaaagaggctttggatgcatatttaaaaggaaaaatatacgtaattacaggacaaaataatagaaatctttacacaatgtctcgttttttctctagaaaaaccaacttaaactggtctggaaaaatatttaaaaagattgcaggctgat

SEQ ID NO: 199950 - DNA, 1002 bp, Unknown
  Bacterial polypeptide expressing nucleotide sequence isolated from the Sargasso Sea
tatggaaaaatatcaacattatataaatggaaaatggacggacggatcttcaaaagagacaatcaatgtagtaaatcctgcaaatggtaaagacataggccaagttgtatgcgcaaagaatgatgatgtaaatgcagctgttgaggcagcgctaaactcatataaatctagagtccttgttgatatgttaccaatggaacgcgcaaagcttatgcgttcaatcgcaaatgaattacgagcagtgagtaaagaaggtgggaaactactgtgtcatgaaaatggaaagcttcttgctaatgcagaatacgaatttgttgatggcgcaaattattttgattactacagtggaatgactgataagttagaaggcagcactattccagtaaataataaagtagtagattacacattgcttgaaccttatggagtctcaggacatattattccatggaattttccaatatccatgcttgctcgatctttagcatgtgcttttgcggcaggtaattctacagtaatcaaaacagcagaactcacgccattagccacagcttcattctttgcaaaagcaatagataatgctggagtgccaccaggcttgattaatgtaatatgcggtcatggcaatgaagcaggagctgaacttacggctcacaaagacgttggtcagataacttttactggatcagtagcaacaggtaaaaaaattcttcatgccgctgctgacagagctgttccagcggttgttgaactaggaggcaagtcagctgccattgtttatcctgatgctgatttagataaagttgttgcatcagctaaagcgggaatttttggtcaggctggacaaatatgttcagcgatgtcacgagtagtcgctcataaatcaatcaaaaatgagcttgtagaaaagttagctaacttggcttccacaattaaagtaggaccaggagatgttgaaggcaaagaacttacacctgttatatctgaagaacaggtacaaaa

SEQ ID NO: 199951 - DNA, 438 bp, Unknown
  Bacterial polypeptide expressing nucleotide sequence isolated from the Sargasso Sea
gcgatgactcggttgggtattttattcaaccaacaattattcttaccaaaaatcctacatatcgaacaatgtgtgaagaaatttttggccctgtgcttacaatatatctgtatgatccatcggattggaagaaaactcttgaattagttgattcgacttccccttatgcattaacggggtgtgtgatggctaacgataaacaggcaattgcagaagcatctaacgctctcacccatgcagcaggaaatttctatattaatgataagccaactggggctgtggttgggcaacagccatttggtggaagccgtgcatccggaaccaatgataaagctggttctatgtttaatttggcacgatgggtatcgcaaaggaccgttaaagaaaactttgacccacccactgattatcgttatccatttttagaagaaaattaat

SEQ ID NO: 199952 - DNA, 1438 bp, Unknown
  Bacterial polypeptide expressing nucleotide sequence isolated from the Sargasso Sea
ttggaagtaagaaattttataaatggcaacttcgtagattcattctcaaaacataatattagagtagtcaatccagcgaaccaaactgatgttggttttattgacgaagctcttgatgatgaaattgaatttgcttttgatgcagcttctcaagcatatcaaaaaagagttcttcaggacatgacttcctcaaaaaagtctttttatttgaggtcaattgcagaaaaactacgacattataaatcatatggttcccaaatattaagtaaggaaaacggaaaaactttacttcagtgtgaaggggagtttgagggtgctgcctctgtttttgaatattatgcaggtattacagataaaatagaatttaagatgattccttcaggtgataatacatttaattacgttgttttggaaccttatggagtaagtttacaaataatcccatggaattatccaatttccttatttgcaagatcagttgctgtaagtttagttgtgggaaatactatagttataaaaccaccagaattgtgtcctatatcatcaaatatttttggtatgattttcaaagaaattgacttgccacctggcttagttaatattgtccatggttatggtgaggtgacaggtaagaagttagttaaaaataaaaacgtaaaccaaatagtttttacaggttcaactgaagtagcttcagaaataattaaagaaactgctgatagaattattccatgccacctagaacttggtggaaagtctgcagccataatttttccagatgcaaatattgatcaggcagttagtagtacaataaatggaatttttagaccaaatgcaggtcagatatgtgtagcaatgtctagagtgattatacatccaaaagttaagaatgagtacttgaataaattgaaaacaaaaactgaagagcttaaaattggtccaggtagtaataaagactcagatgttacccctttaatttcaaaagaacagttacaacgtgttttaaactattgtaaatccggtattcagtcaggtgctaacttgattactggtgggaatgaatataatcttaaacaaggaaactatttccaaccaacaatatttgagaatgttgacaaaaacacaactatcgcacaagaagagatatttgggccggtaactactattttagattttcagtctgatgaggaggctcttgatataattaattgtagtgaatatggactagcttcaggtatttttaccactaacgatgtaaaggcgaaatggattgcagatagaattgaagcaggcatagtttggcacaatgattggtttgttgatggagtaaatcttcctggtggtggttataaaaagtcaggttatggaagagatggaggattagatagtttatatagttatgggcaaacaaagcgtgtaagtaaaaggttatattaga

SEQ ID NO: 199953 - DNA, 1404 bp, Unknown
  Bacterial polypeptide expressing nucleotide sequence isolated from the Sargasso Sea
gatgaatttaattcaacattttattgatggaaaagtatttactggttcatctaataaaaaaggcaaaatatttaatccagcaaccggaaagcaagagtctgaagttatattgggttcaaaatcagatttagaccttgctgtcgaaaaggcgaaaacagcatttgaaacttggtctaatgtgcctgctatccaaagagcaagaattatatttaaatttaaagaattaattgaaaaaaattctgatgaactaacaaaattaatagtcgcagaacatggaaaagtctatgaagatgcaaaaggctcattaacaagaggtttagaagttgtcgaatttgcttgtggtatacctcaaatgttaaaaggcgagttcacagaaaatgttggaacagatatagatagttggtcaactaggcagccattaggagtttgtgcaggaataacaccgtttaattttcctgcgatggttccaatgtggatgtttccaatggcaatagcttgtggaaatacttttattttaaagccttctgaaaaagacccatcttgtgctatgaaattagcccacttatttaaagaagctggtttgcctgatggagtttttaatattgtaaatggagataaagaagtagttgatgctattttagaaaataaaaatattcctgcagtaagttttgttggttcaacgccaattgcaaaatatatttatgaaaatgcagcgaaaaatgaaaaaagagttcaagcattaggtggagccaaaaatcactgcgttgtaatgccagactgtgatttagatcaagcagtcaatggtttgatgggtgcagcatatggatctgctggtgaaagatgcatggctcaatcagtagctgttgcagtaggtaatattggagatgatttggttgaacaaatatcaaaaaaagttgaaaatctgaaagtaggtccaggaatggataaaacttctgagatggggccgctagtaaccaaagaacatttagaaagagttaaaggatatgttgatttaggtgtaaaagagggtgcaaaattagttgttgatggtcgagatatcaagctacaaggctatgaaaatggatattacattggtggatgtttatttgatcatgttaaaaaagatatgaaaatatataaagaagaaatttttggaccagttttatctgttgttagagtagataattttgatgaagcacttcaattaataaatgaccatgagtttggaaatggtacgagtatttatacaagagatggagatgcaggaagaacgtttgcaagtaaaataaaagttggaatggttggaataaatatacccattccagtacctgttgcctatcatagttttggaggatggaagagatctttgtttggagatcaacacatgcatggtccagaaggagt

SEQ ID NO: 199954 - DNA, 763 bp, Unknown
  Bacterial polypeptide expressing nucleotide sequence isolated from the Sargasso Sea
tatggaatcaactaagaaaaaattagctatagtaacaggtgcagcaagaggaattggtctagcaactgcaaaattatttagtcaaaatgattataaagtagcaatagttgatagagataaaaacgagctttcaaatttatctttagcaaataatttaatgaaatcattttgttatgatatttcagattttaacaacgtagatatgatgtatcaggaaattctcgaatggcatgacagagtagatgttttagttaacaatgctggtgttgcagattttggttcaatagagacgacagactttaagcgatggaatgaagtaatgaaaacaaatttagatggtgcttttatgtgctcacaaaaagcaatcaattatctaaaactcactaaaggaagcattatcaatatagcatctatatctggacttagagcatcgacattaagagttgcatatggaacatcaaaagctgccataatacaactcacgaagcaacaggctgcagaattaggtgaatatggaatccgagttaattgcgttgcgcccggaccagtaaaaacaaaactagctatggcagttcatactcaagacataatagatgcatatcatgatgcaattccattgaacagatatggaactgaaaatgaaatagctaatgctatttactttttagcatctgaaaaagcatcatacattaccggtcaaatcttagctgtagatggaggttttgaagctactggtgttggacttccttctttaagaaaataa

SEQ ID NO: 199955 - DNA, 1954 bp, Unknown
  Bacterial polypeptide expressing nucleotide sequence isolated from the Sargasso Sea
atgaaaactacccaacaatataaatcattactttctccattcaaaattaataagcttgaatttaaaaataggattttacttgctcctatgggtgataatctttgcaataaagatggttcgatttcaaaaaaacaagaaggttattttctagctagggctaaaggaggatgtgcaggaatcatccttggttcagtgggtgtaagcagaccagcaggacaagctactccattagagttatcgcttgcatcagatagtttaattaaaaaatataagaaatttgtgaatttgatgcataaaaatgattgcaaagtcattgctcaaattaaacatggaggctctaaagcagcatatgccgcatcaattggtgtcccatttctggttccatcattaaaagaaatgtcttctaaagatatcgagcatggaaaaagtatggttgaaaaattaactcctgaagaaatgaatgcgtttgtatcaaatcttaagggcgcaggaaactttaaagttatggatctagatgacatcaaaaaggtagttgagcaatttaaagatgctgctgaaagagcatttaaagcaggtattgatggaatagaaatacatgctggacatgggtacataatttcaagctttctttctaaggcaacaaatcttaggacagatgaatatggaggctcattaaaaaatagaatgagacttttagatgagattattgatgcaataagaacaaaagtacctagaaactttccaataattgttcgacttgatggagaagaaatcaatattaaaaatggcctaacttcgagtgaagtatgcaaaattgcaaaacatatagaatcaaaaatagatgcaattcatgtaagcagctatgcaaatccaacctctggcccagatttcacaaaagcccctttgaatcataaaaaagaaggttttattaaggtaactaacttaattaaaaatatcgtaaaaattccaattatagctgtagggaggatagagcctgaaaaagcggagaaatacatatctgagggaaaatttaattttcttgctatgggaagaaagttgttagcagaccccaatctgccaaataaattaaaaaataatgagcaagataaaattaaaccatgccagtactcttatgaatgcgtaagtagaatctttctaaatggacaaatggtatgcgtatctgatgttggtttagggaaaaaagataagaattattctaaaaaaaatcttatcatcattggagctggtcctgctggattggagctctcacttcaggctgcaaaaagaaatataaatgtatcaatatatgaaaagcaagaattcattgggggcaatttaattggagcatcattaatatatgagccatatagaaaattattaaattactatcaagcttctattaaaaataaacttattgatgtgcatttaaataaagaaatcatactagatgatattgaaaagaaattttcagattgtcaaaatgttgttatcgcctcgggaggagtgccgtcctcctctattcctaatgcaattaatgttcaatcttggttaaatccatttattgaaaataatggtggtgaaatagattctataaaattagatttaaaaaaagaaaaatatggtaactgtgccatctttggaacagataccatccagcttcatctagcttcttttttaagctcaataggggtcaacgtttcattggttagaagcaataaaactatcggaagctcaatgccagttgttttaagatggaggattcttgatgaattagcaaatcaagtccccgtcatttatgaagaggattacttatcaagaaaatttgacataacgcttgatgctacttttgaatcaaaacctaatttaaaaaagcttgaaagcattggtgattcaaagcacggattggcatacttacctcaaactgctaaagatgcagtgggatattttaaataga

SEQ ID NO: 199956 - DNA, 1459 bp, Unknown
  Bacterial polypeptide expressing nucleotide sequence isolated from the Sargasso Sea
atgtatattaatggtgaatgggttgactcatcttgtggaaaaaaaatagaaacacttaatcctgagactaatgaagtttgggctagtgtacctgaagctaatgaacaagacgttgatttagctgtaagtagtgcgcaaaaagcttttgatagttcatggtcaaatttacatcctagagaaagagctaaatatttaagacgtatagctaatgaattaagacataatgcagaacatcttggtaaaatagagacaattgatactggtaaactatttcgtgaaacaaagactcaagcaaattatattgctgagtactatgattactttgcaggattagcagacaaagtagaaggaactgttattcctattgataaagaagacatgcaagttactacaactagggtacctataggagtagtggctgcaattattccttggaactcacaaatgttgcttactgcagtaaaacttgcaccagcacttgctatgggaaatactgtagttatcaaagcatctgaattagctccagtaacactattggagtttgctaaaataattgaaaaaacagaaatacctaaaggagttgtaaatattattactggtttaggtgatccttgtggaaaagcattaacaaagcacaatttaattgaaagaattgcttttacaggcggaccagaaacagcaagacatattattaaaaattcttcaaataatttatcacaagttagtttagagcttggagggaaaagccctgtagcagtttttgatgatgctgaccaagaaaatgcacttaatggcataaccgccggtatatttggagcaagtggtcaaagttgtattgctggctcacgattatatattcaatcaaatatatatgaagaatttcttaataagcttgttgaaaaagctaaaaatataaaattaggccctccaatgtctgaagaaactcaaatgggacctcttaatagtcttaagcagttagaattaattgagaaaaatataaatgcaacagagtcccaaggtggaaaaattagatgtggaggtaaaagatccaatttttctaataaaggttattactttccagcaacaattattgaatgtgataatcataatttaccttcagcagaaaatgaattgtttggaccaatattatcagtaatgaaatttgaaaaagaagaagaattaatatctctaatgaatgataataaatatggtttatcatctggagtttacacaaaagatttaggaagaggaatgagagtttctaaagcaatcagagcaggtatagtatttgtaaatacttatagattaatttctcctatggcaccatttggaggtatgaaagatagtggatacggtaaggaagctggtcaggagtcaataaaagaatatacaagagtaaaaactacttggtttaatgcatctcaaaaaccaatgagtgatccttttactatgggataat

SEQ ID NO: 199957 - DNA, 928 bp, Unknown
  Bacterial polypeptide expressing nucleotide sequence isolated from the Sargasso Sea
aatgccaaaaattcaaaattttaaaatgtatataaatggtgagtgggtagactcctcatcgggtaaaaaaatacaaactcttaacccagaaaacaatgaggtgtgggcaacagttcctgaagctaatgagaaagatgtagataaagctgttcaatcagcacaaaatgcttttgaaaatagttggtcaatacttcacccaagagatagagcaaaatacttaagattaattgcagatcaactaagagaaaatgcagagcatctaggaaaagtagaaactatagatactggaaaaatttatagagaaacaaaaacccaggctaattatattgcagaatattatgattattttgctggactggctgacaaagttgaggggactgtagttccaattgataaacctgaaatgcaagttactacaacaaggataccgattggtgttgtagcagcaattattccttggaattctcaaatgctattgactgctgtaaagcttgctcctgcacttgctatgggtaatacagtagtaataaaagcatcagaacttgccccagtaacccttttagaatttgcaaaattaatagaaaaaactggaatacccaaaggagtaattaatataattaccggattaggagaaccatgtggtaaagcactaactacacataatcttgtggaaagaattgcattcactggtggccctgaaacagccaaacatattgtaaaaaattctgctgaaaatttatcacaagtaagtttagaacttggtggaaaaagccctgtcgtagtgtttgatgatgctgatcaagaaaatgctttaaatggaattactgcaggaatatttggtgctagtggtcaaagttgtatagctggatcaagactctatttacaatataaaatctataatgaatttttagacaaattgaataactaa

SEQ ID NO: 199958 - DNA, 1469 bp, Unknown
  Bacterial polypeptide expressing nucleotide sequence isolated from the Sargasso Sea
gatgcagcagtttaaaaattatatcaacggtgaattcactgaatctaaatcaggtaaatcttttaagtctgttgatccatcgactgaaaaggaatttgcagaaatttcactcgcggaagagtatgaagtcaattcagccgtagaagcagcacataatgctttttacggagaatggtcaaaaatttttcctagtaagagagcaaactatttaagagcaattggtgatcaacttaaagagaaagcagaattactcggaacaatagaaacaaaagatactggaaaattatttaaagaaacaagatttcaggcaaattatatcgctgaatattattattactatgctggattggttgacaaaattgaaggatcaacgcttccaatagataaagaagatatgcatgttttcaccaccagagttcctgttggggtagttgctgcgataataccgtggaactcacaaatgtttctcactgcagtcaaacttgctccagccttagcaatgggtaatactattattattaaggcatcagaaattgcccctactccattattagaatttgctaaaattattgataaagttggaataccaaaaggtgttgtaaatataataactggttttgcagatacttgtagtaagttgcttacttcccatccaaaaattaataaaatagcatttacgggaggtgtccatacagcaaaacatattgttagaaactctgcagaaaatttatcgcaaatatctttagagcttggtggaaaaagtccagtggttgtttttaaagatgctcgtaaagataatgcaattaatggaattatggcaagtatatttggagctagtggccaaagttgtattgctggttccagactttatttgcaagaagatatttataatgaatatttagaggaattaaaaagtagagttgagggaattaaaattggtgatcccttatcaactacaactcaactaggacccctcgctactttaactcaattacaaaatattgaagaaaaaattaaacaaacaatagaacaaggtggtaaaataattactggaggaaataaggttagtgaatttaaacatggttattattttgagcctacaataattgagtgtgctaatcataatttgcctgttgcagagaatgaattatttggtccagtattatctgtaatgagatttaaagatgaagaaaatgcaattaaattgatgaatgataatagttttggtctcgctgcaggaatttttactgaaaataatggaatagcaatgagagtctcaaaagctgttcaagcaggaattgtatttgttaatacttatcgattaatttctccagttgctccatttggtggatttaaaaatagcgggtatggtagagagtcaggattagaggtaatgaaagattattctaatacaaaaactacatggattagcacttcaattgaacctttaagtgatccattaacatcga

SEQ ID NO: 199959 - DNA, 1126 bp, Unknown
  Bacterial polypeptide expressing nucleotide sequence isolated from the Sargasso Sea
atgaaaataaaggcagcagttttacgccaatcggggctacccagaccttacacagaaagcaaaccactctctattgaagaagtcgagctagatccacctaaatcaaacgaagtaatgattaaagtcaaagccgttggtctttgtcattccgatcttgtcgcaattagtggcgagcgtggaaagcctatgccgatcgtgttgggacatgaagcggctggtataattaccgaaattggtaacaatgttgagggcttcgaaattggtgaccatgtggtgccctcctatgttgcaagctgtggcctctgtgaaatgtgtagctctggccgaccagccctctgcgaacctgctacagttgcaaatgcgaaagcagttttgagagatggaacaacaaggctgagccaaaaaggtaaatcgatccaccaccattccggtgttgctgggtttgcggaatactcggtgttgtcaaaagaagcattggttaagattgacaaatcgatcccgtttgagcaagcagcactttttggttgtggagtggtaaccggcgtaggctcagtgattaatactgctgacgccaaagctggtcagttcattggtgtcgttgggcttggtggtgttgggctgagtgctgttttagcatctttggctttgggagcaggcaaagtaatagcaatagatttaagtgaagaaaaacttgaatttgcaaaagaacttggagttcaccatactgtaaatgcagctgacggagacgctgttgatcaagtgcacaaaattactaacggaggagtgcatgttgcggttgaaaccgcagggtcgggccgtgcattacagacagcatacgaaataaccagacggggcggaacaaccgttgcagcaggcatgccaggacctgaggctgaaataaatttatcacatctcaaaatagctgcagaagaaagatgccttcgaggttcatatatggggagttgcgtcgccaaacgcgatatacctcgctatttaaatatgttccaaacaggtgttctaccagttgataaactcatgtctcgtaaaattaactttagcgatctaaatgaggcgatggaccgtcttgatgatgcaaaaacaatccgggaagtacttataccctaaa

SEQ ID NO: 199960 - DNA, 856 bp, Unknown
  Bacterial polypeptide expressing nucleotide sequence isolated from the Sargasso Sea
tacccgctggatctttaatttagtaaatggcatgggtcctgttgttggtgcctcaatgtctgaacacaaagatatagatatgatgcattttactggttcaacacgagctggagttgctgttgctcaagcatcagcctcaacagtgaagagagttgctcaggagctaggtggcaaatctgccaatatagttcttgacgatgcagacattgaaaaggctgtatctgctggtgtctcttcatgtttcctaaatacaggacaatcatgcaatgcaccaacaagaatgcttgtgtcatctaagaactatgaaaaagcagttgaagttgctattaatactgcaaatgctatgaaagtaggagatccttttgatgctgatacaaagatgggcccaatctctaataagacccaatatgagaaagttcaaaggatgattcagattggcattgatgaaggagcaacattatctgctggtggcgttggtcttccagatggttgtgagagaggttattacgtaaaaccaactatattttctgatgtaactaatgatatgacaattgcaagagaggaaatttttggtccagttttatgtttaataaaatatgaaactgaagaagaggctatcgaaattgcaaatgatactccatatggtcttgctggatatgttcaaggtgaacaagctcatgcagtagaagttgcttcaaaaataagagctggccaagtcactattaataaaggagctagagttagatcagcaccctttggtggttatggctcttccggtaacggaagagagcatggcacacatggccttgaagaatgtctggagactaaagctgtaataggtgctttagtcgaataa

SEQ ID NO: 199961 - DNA, 574 bp, Unknown
  Bacterial polypeptide expressing nucleotide sequence isolated from the Sargasso Sea
atgctagttcaaagatcaatttatgatagagcagtaaaagaagctgtagatgaagcaaataaaattaaagtagatgtggcatctaaaaaaggtgatcatattggacctttagtatccaaagttcaatatgataaagttgtaaatcttataaatgagggaattaaagaaggtgcaactttagctgccggtgggcctgatctaccaaatggtcttaataaggggtattttgttaaaccaacaatttttactgatgtaaacaacgatatgaaaattgctagagaagaaatatttggtccagtactttcaattattccatttgatactgaggaagaggcaataaaaatcacaaacgatacatcttacggattaggtaattatttacaaactgaggataaagaaaaagcaaaaagagtggctagaaaagtaagagcaggaacagtttatatcaatggccaaggagccgaaactggagcaccttttgggggatttaaacaatcaggaaatggtcgagagggaggactatggggatttactgaatacctagaggttaaagcaattactggttggaattaaa

SEQ ID NO: 199962 - DNA, 835 bp, Unknown
  Bacterial polypeptide expressing nucleotide sequence isolated from the Sargasso Sea
aatggacaattttagtggtaagaatgtgcttataacaggggcatcttcgggaattgggctagctatggcaaaagattttgcaaacagaggggcaaatttaattctcactgcaagatctgaagataaattaatgcaattagctaaggatttaagtggtaagggcataaagacacatgtcttcattgaagatataagtttgcctaattctgctcaaaaactttttaatcaagtaaatgctgctgaattagaggttgatgtacttgttaataatgcaggttatggtcgttggggaaattttgatgaatgtcctatggaagactatgagaatatggttcacttaaatgttacatctttaactgaattgagctacttattcgttgatcagatggtaaaaagaggttcaggcgggattattaatgttgcttcaacagcagcattctttccaataccctattcggccgtatatgcagctacaaaagcctatgtattaagcctaagtgaagctttaaattttgaatactctaaaaagggtgtgcatgtgatggcagtatgtcctggtgcgactgaatcgaagttcataaatgtagcaacagagaattcagaaagattaaagcaaagattaattaatgtagatagagttaaaaataaattgacaaccagcaaaatacagactgctgaagattgctcaaaagaggctttagatgcttatttaaaagggaaaatatacgtaattacagggcaaaataatagaaacctttacacaatgtctcgttttttctctagaaaaacgagcttaaactggtctggaaaagtatttaaaaagattgcaggttag

SEQ ID NO: 199963 - DNA, 406 bp, Unknown
  Bacterial polypeptide expressing nucleotide sequence isolated from the Sargasso Sea
aggtgctaacttagttgctggaggtttaaatagaccagcaggtttgaataggggttattttgttaaaccaacaattttttcagatgttaacaataatatgaaaatagctagggaagaaatatttggcccagtagtctctataataccattcgacactgaggaagaagcaattagtattacaaatgacactgattatggattgacaaattatgttcaaacacaagacaaagaaaaagcaaagagagttgctaaaaatcttagatctggtggtgtagaaatcaacggttttggagtttcaggaggcacgccttttggaggattcaaacaatctggtaatggtcgtgaaggtggtaaatggggccttgaagagtatttggaagttaaagctattagtggatggaaataa

SEQ ID NO: 199964 - DNA, 1246 bp, Unknown
  Bacterial polypeptide expressing nucleotide sequence isolated from the Sargasso Sea
atgcgtaagactttattggcgtccgctgcgcttctcgccctgggatgcagcggctacgcgatggcgaatccatgcagcagcaatgccagttcgacgtgcagccagaaagcggatgacggatcgaacacgctcagcaattcggtcagctcaagccagaccagcaccaccgggtccaatgcaaatgaagtctcgcctggcgcgagcgtctatcaggattcctacaacagcaccaagatcgtcgcgatcagcaaactcgacgggtacgtgagcaatgtccaggtctggggcatcggcaacaacgcgaccaattcgggcagcgcggccggcggaagcggtggcaagggcggcaacggctacggctacggcggcgcgggcggtaacggcggcagcggcggcgcgggcggcggcggcgggaaaggcggcagcgcgcataacggcagcgccacggccggcaacgccagcaacggcagcgcgacagccggcaccggcaacggcggtagcggcggaaccggcggttcacctgacgccagcggcggggctggcggcaaggccacggcgagcggcggctatggctccggcaagggcggcggcgccatcgcggcttcggtcggcgtaggcggctccggcagcggcaccggcaccggctggggtggcggcggcggtacggccgatgcaggttccgcgtgggccaagaatcatggcagcggaagcgcgtcggcatcggccggcagcggtaccggcacgggcacgggcaccggcagcggttcgggtagcggcacgggtggcgcagggtcggcgggtgcgtcgacggcttcgggcggatcgggctcgggtaccggcggcagcggtgcggccgcgggcggcaccggcggcgcggcgacggccgcggcgggcaacggcggagccggcggcgcgggcacgggcggcggcgcgacgaacggtggcgcgacgacgacggccagcaacggcagcgctaccgcgggtagcggcgcggtgggcgcgatgggcggcgcgggcggcgcaggcggcacgggcaacggcggcgtcggtaacggcgcggtcggcggcgcgggtggcgcaggcggagccaatacggtcaatgcggggacattcaacatgtccaacgcaatggcgagcgttggccagaccgcggcgggcatcatggtcgccaaccagaacagcggcatggcgtcgctcgttcagcaggccgtgaccgtgcaggcgaacctgtcggtaggacgttaga

SEQ ID NO: 199965 - DNA, 710 bp, Unknown
  Bacterial polypeptide expressing nucleotide sequence isolated from the Sargasso Sea
cggtccgctcgaactaggcggtaagtcgccacaaatcgttttcgccgacgcggatctcgatgcggccctgcccgtgctggtctcggcgatcgtgcagaacgccgggcaaacctgctcggcgggcagccgcgtgctgatcgaccgggccatctacgagccgctgctcgatcggctgagcggcgcgtttcacgcgttgcgggtcgggccgtcgcatgccgatctcgactgtggtccgttgatcaatgcgaagcagcaacagcgcgtgtgggactttctctctgacgcgcaacacgacggcatccctatggctgcgcacggcgaagtgattccggaagcgcccgaaagcggcttctatcaggcgcccacgctgctgcgcgatgtgcccgcgagccaccgtctggcacgcgatgaagtgttcggaccggtgctcgccgccatgtcgttcagcgacgaagacgaagcgctctcgctcgccaacggcacgcagtacggcctcgtcgcggggatctggacgcgtgacggcgcccgtcagatgcgccttgcgcggcgcctgcgttccggtcaggtattcatcaacaactacggtgcgggcggcggcgtcgagttgccgttcggcggcgtgaagcattcaggccacggacgcgaaaagggtttcgaagcgctgtatggcttcacggtgctcaaaaccatcgccattcgtcacggctagg

SEQ ID NO: 199966 - DNA, 787 bp, Unknown
  Bacterial polypeptide expressing nucleotide sequence isolated from the Sargasso Sea
tatgaaacgttttctaaacaaaaaagccctggtaacaggaggagcatccggaatcggaaaggccatctgtcagagacttgttgaggaaggagccgacttggtcttcatcgacaggaacattgatgctggaaaagcatttgagcaggaactttccaaccaagaatcttcaagtttctttattgccactgatttgactattcaagccgaagttgaaaaagcattcgcagagaccaaaaattttctgtctcacattgatgttcttgtaaacaatgctggtgacgcatttgctgaaaactttggggatacaactatagaaaactggaacgcagatctggctttgaaccttacttcacactacatgctcacaagtctcgtacttccagaaatggagaaacgcgaaaaaggtgtggtaatcaatatttcctctgtgaacggcatccaggcattaggttgtccggcctatagtgctgcaaaagctggtttgatttcatttacccagactgtcgcaactgagtacggacccaaaggaattcgctgcaatgtagtactgccgggcacggttgaaactccggtttggaaaaacagagtagaagcccgacctgatgtcttcgaaaaagtcaaaagctggtatcccgtgggtcgtatcggaagacctgaggatattgctgctgcggtggcctttctgagcgcggatgaagccggtttcgtgaacggggcatcccttgctgtcgatggaggattgaccgcaggaagtttcaaaatgatcaaagatatgattggaaaataa

SEQ ID NO: 199967 - DNA, 1012 bp, Unknown
  Bacterial polypeptide expressing nucleotide sequence isolated from the Sargasso Sea
gcttttacagcagttaagttagcgccagctcttgcaatgggaaatacggttgttattaaagcttcagaattagcaccagtaacccttctagaatttggaaaactaattgaaaaggctggaatacctaaaggagtaataaatattataacaggactgggtgagccatgtggtaaagcattaactactcataatcttgtagaaagaattgcttttacaggtggaccagaaactgcaaaacatattgtaaaaaattctgctgaaaatttatcacaagtaagtttagaacttggtggtaaaagcccagtagtagtttttgatgatgcagatcaagaaaatgctttaaacggtattaccgctggtatattcggagcaagtggacaaagttgtatagctggatcaagactttacttacacaaaaaaatttatgatgaatttttaaaaaaattaattgataaagctgaaaaaataaaattaggaagcccaatggaagaagatgctcagatggggcctcttaatagttttaaacaattagaaaatatagaaaaaaatattaaagccacagtagaacaagggggaaaaataagatgtggaggtaaaagatcctcaatttcaaataaaggttattattttcctgctacaataattgaatgtgaaaatcataacttacctgttgctgaaaatgaattatttggtccaattttatctgtgatgaaatttgaaaatgaaaaagaagtaatagaaaaaatgaatgacaataaatatggtttatcttctggagtttatacatctaattttgcaagaggacttagggtttcaaaagctattagagctggaatagtttttataaatacatatagattaatatctccaatggcaccatttggtggattaaaagatagcggttatggaaaagaggcaggtatagaatctattaaagaatacactagaataaaaacaacatggtataattcctctgacaaaccaatgtcagatccttttactatgggataat

SEQ ID NO: 199968 - DNA, 571 bp, Unknown
  Bacterial polypeptide expressing nucleotide sequence isolated from the Sargasso Sea
ttcattaattgatctagtagtttttggaagagcagctgcaaaaagagctgcagagctagtaaaacctggaacacctcacgaagaaatttcagatgctgaaacagataaatgccttgaaagatttgaaaaattaagaaatggaaatggatctaatagaactgctgatctaagattgtcaatgcagaaaactatgcagtctaaatgtgcagtttttagaactgaaaaaactttaaaagaaggtgttgaagaaattagaaaaccatacgaaggaatggactcgatctctgtaaaagataaatctttaatatttaatactgatcttgttgaaactttagaatttgataatttaatcagacaagctattgttaccttagactcagcatatgaaagaaaagaaagtagaggagctcatgcgagggaagatcatccaaatagggatgataataaatttatgaaacatactttgtcatggtgtgaaggaagtaaaacaaagatttcttacagagatgtgcacaaatcaacactctctaatgatgttcaatattttccgcctcaagaaagagtttactaa

SEQ ID NO: 199969 - DNA, 1963 bp, Unknown
  Bacterial polypeptide expressing nucleotide sequence isolated from the Sargasso Sea
aggtgatggttcagggcttactggcattactgcttctgttatgaaatcagatgatatttctcaaggagatgcagcagtgaccatcagcacttcatcaggagctgttaatattaatccagcatctggttcaccgattcttttagataatacgatcaacattgatggagcaatcataggccatacggacgatacggatctcatgacgttagcaaatggaagtgtgacttttacgggttctactgtgatcccaacagcggatgtgaatgggggtgcgatcgatgcagtcacactagggaccaacagtgcggtgacccaggcggtcatcgataatgtgaatatcaatggggcagagattggtcatacttctgatacagaccttatgacccttgcagatggtagtgtgaccttcaccggttctacagtaataggtaccgtggatgtgaatgggggtgcgattgatgcggttacattagggaccaacagtgcggtgacccaagcggtcatcgataatgtgaatatcaatggatctactatagggcatacggatgacacggatctattgaccttggcgaatggcgttgctactgttgcgggtgaggtgtcactcacaacattagatataggaggaacagatgttactgctacggcagcagagttaaataaattagatggtgtcacagccacaactgctgaattgaactatatggatgtgaccactttgggtacatcagaagcttcaaaggtagtcacggtggatgcaaatggcgatctgcttgtaccagatagtgataaatataagtttggaaccgggtcagatatgcagctttaccatgacgggacaaactcattcattacgaatgctacgggtacaatgaaggtagcaacagaaacctctggtattgcagtgacgattggtcattctacatcagagaccacagttggtgataatcttacagtaggtggcgatgctgcggtaacaggcgatgttaccattactggtaatgatatcacatttggaaatggtgagaccatttccaatgccacagatggagattttctgtttactacaggaacgcaaacaggtgcattgacggtgaagaattctaatacaacggatggtattgcttcattagagcttgtatctgataattcaggcgatgcaggagatggttatgaattgaaatctttgaatggaacattcactgttacttccgaccattctacgaaagggacatacgaggatacatatataactatcgtaggtaattcaaccccagcttcttctagtacaactattgctggagacctcacaatttcaggtgatgatctaaccatgggaacaaatactagtggagctgctctaataggcgatggaacaaattacaatccggttgtgatatctggcgatctttcaattggagcgaacggtgtagccgcaattggttcaggtgtaattgtcaatgcggatatcaatgcaacggctgccatagcagattctaaacttgctactataaccacagccgataaggtatctggagctgcactgcaagtggatggtgcgacaagcggtacaggtataactatagctgatgatgataagtttttggtggatgatggagggacaacaaaatatgtcaacgcgtcacaggttctttcttacgctagtgctacttcatccactgatattaacggaggtactattgatggtgtcacgctaggtaccaatagtgcagtgacccaggcagttatagatgacatcaacttgaatggtgcaacgattggtcacacagatgatacagatcttttaaccttggccgatggtagtgttactttcacgggttctactgtgatcccaacagcggatgtgaatggaggcgcgatcgatgcagtgacgctaggtacgaacagtgcagtgactcaagcggtcattgataatgtgaatatcgatggagctgtaataggt

SEQ ID NO: 199970 - DNA, 1275 bp, Unknown
  Bacterial polypeptide expressing nucleotide sequence isolated from the Sargasso Sea
tacgatcacgaccacgggttcagtactaccggcttcagtagatggagctggtctaggttcatcctctgcagaattttcagacgtttatcttgcagatggcgcagtgattaatctgggtaataatcaggatgtgacccttacccatatagatgatgaagggataagattaaatagtgtgaatcaacttcagtttggagattcaggtacaaaaatttcccaaagtgcggatggagtattagatctggtatcagataatgaagttgagatcaatggaacaacaatcgatataaatggtaatgtagaactagagaatgcaacaattgattatgtaaagatcgatggcacttacattggtcacgcagacgatacagatctaatgaccttggcaaatggaactctcacggtttctgggacacttgcagcaacaacattaataggggatggttcaaatttaaccggtatatctgcatcctcgatcatggcagatgatattagtcagggtaatgcagcagtgacaatagggacgtcttcaggtgcaataaatatcaatccggcagctggttcaccgattcttttagataacacgatcaatgttgatggtagtttaatcggccatgcagatgatacagacctcatgacgttagcaaacggaagtgtgacctttacgggttctactgtgatcccaacagcggatgtgaatgggggtgcgatcgatgcagtcacattaggaacgaatagtgcggtgacccaggcggtcatcgataatgtgaatatcgatggagctgtaataggtcatacatctgatacggatcttatgacgttggcagatggtagtgtgacctttacgggttctactgtgatcccaacagcggatgtgaatgggggtgcgatcgatgcagtcacattaggaacgaatagtgcagtgacccaggcggtagtagatgatatcaatttaaatggcgcaacgattggccacacagatgacacagacctcatgaccttagccgatggcagtgttacttttacgggttctactgtgatcccaacagcggatgtgaatgggggtgcgatcgatgcagtcacattaggaacgaatagtgcagtgacccaggcggtagtagatgatatcaatttaaatggcgcaacgattggccacacagatgacacagacctcatgaccttagccgatggcagtgttactttcacgggttctactgtgatcccaacagcggatgtgaatggaggtgcgatcgatgcagtgacgctaggtacgaa

SEQ ID NO: 199971 - DNA, 760 bp, Unknown
  Bacterial polypeptide expressing nucleotide sequence isolated from the Sargasso Sea
tatgggaaattcttttgctaggtatccaagtttgtgcggcaaaaatattcttattactggtggtgcatccggtattgggaaagaacttgtaaaggggtttgctgaacagggatctaatgttgcgttcttagatttgaatgataaagctggagagcggctttccttagatactggggaaaatgttttttttcaaaaatgcgatttgaaaaaagttgataatttaaaatcgtcaattgaaaaactgagagctaaaattggattatttgatgtattggtaaataatgctgctcatgatgatcgacataattggcaagaagtgacagaagcctactgggatgagcgttttgccactaacttaaggcatcaattttttacaattcaatctgtggctaaagatatgatccaaaaggggggcgggtctattgtaaatattggttctaattcatggatggaggcagttggaaattttccggcatatgcgactgcaaaatccgcagtccatggattatccagaacattagcaagggatctaggccaacatagaattagggtaaatacagtcgtgccaggatggattatgacagatcgacaaaaagaactatgggtgacgccagagggtctggaaaatcaatataaaaggcaatgtttaccggatttaattgaacctgtttatgtagctcgtatggtcctatttttagcatcagatgatgcagcgatgtgtacagctaataattatatggttgaagctggatctatatag

SEQ ID NO: 199972 - DNA, 646 bp, Unknown
  Bacterial polypeptide expressing nucleotide sequence isolated from the Sargasso Sea
atgtcaagagcatatttacctaaatcaaaatgggcagaaattcacgaaaaactagtaagtgaaatcgaaacaattgatgttggaccgcctgaagattttaaaaacttcgtaaatgctgtcattgatgaaacagcatttgataaaattgcatcgtatttagactttgcaaaatcaagtaacgattgtgaagtgctttgtggaggcggatatgataaatctaagggatactttgtagaaccaactgttattttggcaaaagatccacactttaaaactctagaagaagaaatttttggtcctgtacttaccatttttgtttatgaaaacgaaaattgggataaaacattggagttgattgataatacttctccatatgcgcttacaggctgtgttttttctgaagatagagatatagttgatgaagttagatctaaattgagattctcagctggaaatttctatattaatgacaaaccaactggtgctgttgttggtcaacaaccgtttggaggaagcagagcatctggtacaaatgataaaggtggctcaatgttaaacttattgagatggacatctccaagaaccatcaaagaaacctttgaacctcctcataattacagatatccatttatggatgaagagtaga

SEQ ID NO: 199973 - DNA, 865 bp, Unknown
  Bacterial polypeptide expressing nucleotide sequence isolated from the Sargasso Sea
ctgggttttgcagatacttgtagtaagttgcttacttcccatccaaaaattaataaaatagcatttacgggaggtgtccatacagcaaaacatattgttagaaactctgcagaaaatttatcgcaaatatctttagagcttggtggaaaaagtccagtggttatttttaaagatgctcgtaaagataatgcaattaatggaattatggcaagtatatttggagctagtggtcaaagttgtattgctggttccagactttatttgcaagaagatatttataatgaatatttagatgaattaaaaagtagagttgagggaattaaaattggtgaccctttatcaactacaactcaactagggcccctcgctactttaacccaattacaaaatatagaagaaaaaattaaacagacaatagaacaaggtggtaaaataattacaggaggaaataaggttagtgaatttaaacatggttattattttgagcctacaataattgagtgtgctaatcataatttgcctgttgcagagaatgaattatttggtccagttttatctgtaatgagatttaaagatgaagaaaatgcaattaaattgatgaatgataatagttttggtcttgctgcaggaatttttactgaaaataatggaatagcaatgagagtctcaaaagccgttcaagcaggaattgtatttgttaatacttatcgattaatttctccagttgctccatttggtggatttaaaaatagtgggtatggtagagagtcaggattagaggtaatgaaagattattctaatacaaaaactacatggattagcacttcaactgaacctttaagtgatccatttaacattcgataac

SEQ ID NO: 199974 - DNA, 792 bp, Unknown
  Bacterial polypeptide expressing nucleotide sequence isolated from the Sargasso Sea
attcaggttgtgactatatcgttttcactggatctccagaagttgcatcagaaattttaaaagaaacagctgatagaattatacctacgcattttgaattaggtggtaagtctgcagctattatttatcctgacgcggatattgataaagctgttgatagtactgttaaaggaatttttaaacctaatgcaggacaaatatgtgtagcaatgtcgagggtaattgttcatcctaaaataaaagatgaatatatgacaaagcttgtagctaaaactcaaaaattaaaagttggtgctggtgatgaagatggtacgcaagtaacaccacttatttcaactgatcaaatgcaaagagtttcgaattatgtaaaatcaggaatacaatctggtgccaccctaacattaggtggagataaagctgatagagatgatggtaatttttatcaaccaacaatttttgataatgttaatgttgaagcaacaattgctcaagaggaaatctttggtccagttacatcaatttttgattttgaagatgaagaagaagctataaatattgcaaattcaacaaaatatggattagcttctggtgtgtttactgctgatgatcaaaaagcaaaatggacagcagataggattcaggctggtatcatttggcataatgactggtttgttgatggtaaaaatctacctggaggtggttataaaagatcaggctacggaagagatggtggagtagatggtgtatatagccatggacaaacgaaaagaatcagtaaaagactctactagt

SEQ ID NO: 199975 - DNA, 845 bp, Unknown
  Bacterial polypeptide expressing nucleotide sequence isolated from the Sargasso Sea
agatcacgtttaccttaaattagatcacttaggacctgagattgttcataaaagacttccaggcataacagaactttctaaaacatttgctcacgttgatcccgttgaacaccctattcctgtagtaccaacttgccactatgcaatgggaggaataccaaccaatgttcatggtcaagtactcactcaagcaacagacggaactgacaatgtagttcacggtctctatgcagcaggagaagcagcttgcgtctctgttcacgggggcaatagactaggcgggaactctctcttagatcttattgtctttggaagatctgctgggcttcatatcgagaatgcactcaaagatggaataactttatctaaagctaccaatgacgatattgaccaagctttggttaatttaaatagggtaaatatcagttcaactggtgaggatgttgcaactgtaaaagctgagttacaaaaaaatatgcaattaaactttggtgtatttagaaccggggacttaatggaaaaggggttagttgagttagagaacattagagagaaaacacaaaacatacacttaacggataaatcgtctaggtttaatacggctagagtcgaggcattggagcttctgaacttaatagaagttgcccaagctactgctgtgtgtgctaatgaaagaaaagaaagtagaggcgctcacgctagggatgacttccaagaaagagatgatgagaattggttgaaacactctatttattttgctgatacaaaggaagtgactaaaagagacgtcaatttccgtcctaaaactgttcaggcctttcagccaattgtgagaagttattaag

SEQ ID NO: 199976 - DNA, 1444 bp, Unknown
  Bacterial polypeptide expressing nucleotide sequence isolated from the Sargasso Sea
tatgagtgataattataatatacaaaattatataaatggaagtttttctgtttctgtaaatacggaagagattaaaaatataaatccttctgactcaaatatcattaattccttcaaagaaacttcaatagaggatgtagaaagtgcaattgatgtagcaaaaaaatctcaatctaaatggtctaaaactccggctatagaaagagcctcttatttaaaaaaaatagcagaaggtattagaaaaaatgaagacgaatttgtaagaataattgttgaagaacaaggaaaaataaaagatttagcaaaaggtgaggtgcaaggagctgctaattatttagattatacagctgagtgggccagaagaatagaaggagaaattgtcactagtgattcacctgatgaaaatatttttatttttaaaattccaatgggagtagtttcaggtattttaccatggaattttccattttttttaattgttagaaagctagcacctgctttagtcacaggtaatacaattgttataaaggctagtgaagaaacatctaataacgcttatatgttctctaagctcttagatgaagcaggagtgcctaagggggtagttaattttgtctatggaagaggtcaaacagttggtaaattattaagttctagtaaaaaaattgacatgattagctttactggaagtgtagaaacaggttcagcaattatgactgaagctgctaaaaatattaccaaagttaacctggagttgggaggaaaagccccagcacttgttttagctgatgcagatattgatttagctgtttctaaaattcgtgatgcaagagttattaatagtggtcaagtatgtaattgtgttgaaagagtatatgtagataaaaaaattgcagatgaatttacagaaaaattaactaaagcaatgcaaaacactaagtttggaaatcctaatacaaaaactgatatagattatgggcctttaatcaatgaagatggctccaagaaagtaagtgaattagtgaattcagcaaaaggttctggagcagaaatcttaactggtggaaacagagatgaatcatctgaaggaatttattatcatcctactgttatagctaattgcaaacaagatatgagaattatacaagaagaaatttttggtccagttttacctttagttgaatttgaagatttagaccaagcgattgaatatgcaaatgattctgattatggtcttacttcttctatttttactaataatttaaaaacagctttaaaagcttgtaatgaaatacggtttggagaaactatgatcaatagagataacatggaaatcttccaatcttttcatgcaggattaagaaagtcaggtattggcggcgctgatggtaagcatggactatatgaatatatgcaaacacacgcagtatatatgagagcgtaa

SEQ ID NO: 199977 - DNA, 1354 bp, Unknown
  Bacterial polypeptide expressing nucleotide sequence isolated from the Sargasso Sea
atgttacaaaaaaaaaatttttatataaatggagcatgggtcaaacctaaaaaagaaaataatatagaagttattaatcctgctaccgaaaaaagttgtgcagttatctctttgggaggaaaagaagatataaatgatgcagttttagctgctaaagaggcttttagaacttggggtttctcaaccaaagaagaaagagtagctttattagaaaatttttatgaattatataaaaaaagatggaacgatataactgatgcaataattctagaaatgggtgcaccaaaggattttgcatcaaaacttcaaactggcacaggagcaagtcatacaaaatcttttataaaatacttaaaagaatttgaatttgaaaaaactttaggagatcatgcaaaaaatcaaagaattttatatgagccaaaaggtgtatgtgcattaattaccccttggaattggccaatgaatcaagtttgtttaaaagttattcccgcattatctgcaggttgtactatgattttaaaaccatctgaattagctccactttcatcaatgatacttgctgaactaattgatgaagctaaatttccaaaaggtgtatttaatttagttaatggtgatggtgctgttactggagatgctcttacaagccatcctgatgtaaatatgatttcatttacaggctctacaagagctggagcattaatttctcaaaatgcagcaaaggattttaaaagagttagtttagagctaggtggaaaaggtgcaaatattatattcaaagatgcagatgctgaagctatagagagaggagctttaagatgttttagaaactcaggtcaatcttgtaacgcgccgacaagaatgttagttgaaaaacctatatacgatgaagctattgaaagattaaaaaaatatgctactaattttaaagttgatgatcccaataaagaaggagatcatattggccctgtaatttcagaaacacaatttaataaaattcaaaatttaattcaaaaaggtattgacgaaggagcaaagttagttgctggtggtcccggaaaacctgatggtattaaagaagggtattatgtaaaaccaactgtatttgcagatgtaaataacaatatgaaaattgctagaacagaaatatttggaccagttttatctgtaattccttttgaaacagaagaagaagcaattcaaattacaaatgatactgattatggtttaacaaattatattcaaactcaagataataataaagttcaaagggtagcaagaaaactaagatcgggaatggttgatgttaatggagcaggtattgcggtagatgctccttttggtggtttcaaac

SEQ ID NO: 199978 - DNA, 1459 bp, Unknown
  Bacterial polypeptide expressing nucleotide sequence isolated from the Sargasso Sea
atgcgaatcgaacatctgatcaacggcaaatcgagcgccgcaaaagactacttcgagacagtcaatcccgcgacgcaagaggtgctcgccgaagtcgccagcggcggtgcgcaagaagtcgacgccgccgtgcgcgcggctaaagaagcgttcccggcatgggccggcaagccggcgacggagcgcgcaaaagccattcgcaagctcggcgagttgatcgcgaagaacgtgccggaaatctcggagaccgagacgaaggacaccggccagacgatctcgcagacgcgcaagcaactcgtgccgcgcgctgccgacaacttcacctatttcgcggagatgtgcacgcgcgtcgacggccatacgtatcccaccgacacgcacctgaactacacgctgttccacccggtcggcgtctgcgcgctgatctcgccgtggaacgtgccgttcatgacggcaacatggaaagtcgcgccctgcctcgccttcggcaatactgccgttctgaagatgagcgaattgtcgccgctgaccgcttcgatgctcgggaatctcgcgctcgaagccgggattcccgccggcgtgctgaacgtcgtgcacggcttcggcaaggaaaccggcgaaccgctggtggcacacccggacgtgcatgcggtgtcgttcaccggttcgacggcaaccggcaaccgtatcgtgcaaacggcaggcctgaagaagttttcgatggaactgggcggcaagtcgccgttcgtgattttcgacgacgccgacttcgaacgcgcgctcgacgctgccgtgttcatgatcttctcgaacaacggcgagcgctgcacggcgggttcgcgcattctggtgcaacgctcgatctacgcgcgctttgccgaacgtttcgtggaacgcgcaaaacgtctaacggtgggcgatccgttggcggacagcacgatcgtcggcccgatgatcagccagggacacctggccaaggtgcgcagctacatcgaactcggtccgaaagaaggcgccacgctcgcctgcggcggcctcgacgcacccgacttgccgcaagccatgcgcaaaggcaacttcgttcagccaacggtgttcgtcgacgtcgacaaccgcatgcggatcgcgcaggaagagatcttcggcccggtcgcgtgcctgattccgttcgacgacgaagctgacgcgatcagactcgccaacgacatctcttacggcttgtcgagctacatctggaccgagagcaccggacgcgcgttgcgcgttgccgcggcggtccaggccggcatgtgtttcgtcaacagccagaacgtgcgcgatctgcgccagccgttcggcggcaccaaggcatcgggcgtgggccgtgaaggcggcacatggagctacgaagtgttcctcgaaccgaagaacgtgtgcgtatcgctcggctcgcatcatattccgcactggggcgcctgac

SEQ ID NO: 199979 - DNA, 1438 bp, Unknown
  Bacterial polypeptide expressing nucleotide sequence isolated from the Sargasso Sea
tatggagttaagaaattttatagacggtaaatttgttgattcattatcaaaaaaaaatattcctgttctaaatcctgcaaatcaaaaaattgtaggaaatattgatgaagcattagatcaagaaattgatttagcttttgaagcagcaaaaaaagcattcgataaaagaattttagtcgatatggattcaaaagataaatcaaatatgatgagagctattgctcaaaaattacgtgagcgaaaagatgaaggtggaaaacttctaagtcaagaaaatggaaaaactataaaacaatgtgtagatgaatttaaaggtgctgcagacacctttgatttttatgcaggattaacagataaaatagaaaataaattaattccctctggtcatgatactttaaactatgttgttttagaaccgtttggagttgcgcttcaaatagttccatggaattatcctgtttccatattctcaggaatggttgcgcagaattggatcgtgggaaatacaattgtaataaaacctcctgaactttgccctatatcttctaatttttatggtcaaatatttgaagatgtcggtgttccaaaaggaattataaatattgttcatggttatggagaaacaactggtcgaaaattagttcaacatcctggaagtgattatattgtctttactggatcgcctgaagttgcttcagagatattaaaagagactgcagatagaattgtcccaacacattttgaattaggtgggaaatctgcagcaataatttatcctgatgctgacatagacaaagctgttgatagtacagtaaagggaatttttaaaccaaatgccggacaaatatgtgtagcaatgtctagagttattgttcatcctaaaattaaagatgagtatatgacaaagctagtcgcaaaaacgcaaaaattaaaaataggtgcaggtgatgaagaaggaactgaagtaacacctttaatatcaactgatcaaatgcaaagagtctcaaattatgtaaaatctggcgtacaatctggcgccaccttaacaataggcggagataaagctgagagagacgatggtaatttttaccaaccaactatttttgacaatgtcaaagttgatgcaacaattgctcaagaagaaatatttggcccagttacatcaatatttgattttgaagatgaagaagaagcaataagtatagcaaattcaacaaaatatggtcttgcttctggagtatttacttcagatgatcaaaaagcaaaatggactgctgatagaattcaggctggtataatttggcaaaacgattggtttgttgatggaaataatcttccaggtggtggttacaaaagatcaggttatggaagagatggcggcgtagatggtgtttatagtcatggacaaacaaagagaataagcaaaagactctactag

SEQ ID NO: 199980 - DNA, 1474 bp, Unknown
  Bacterial polypeptide expressing nucleotide sequence isolated from the Sargasso Sea
aatgcaaaaatttaaaaattatataaatggggaatttgttaattcaaagtcaggttcttcttttaaatcaatcgatccatcaaatgaaaaagtatttgcagaaattaatcttgctgaagagtttgaagtagattccgctgttgaagcagcttacaaagcatttcatggagaatggtcaaaaatattaccatctaaaagagctcagtacttaagagcaattggtgatcagttaaaagataaagctgagctgctaggaacgattgaaacaaaagatactggtaaattatttaaagaaacaaagtttcaagcaaattacatagctgagtattattactactatgcaggtttagttgataaaattgaaggctcaacacttccaatagacaaagaagatatgcatgtttttactacaagagtacctgttggtgttattgctgcaatcataccctggaattctcaaatgtttctaactgcagttaaacttgcaccagctttagcaatgggcaacaccatagtaattaaagcatcagaaattgcccctactccattattagaatttgccaaaataattgacaaagttggactgccaaaaggagttgtaaatataataactggttatgcagatacgtgcagtaaaatacttacttcacatcctaaaattaataaaattgcctttacaggtggcgttcatacagcaaaacatattgtaaaaaactctgcagaaaatttatcccaagtatctcttgagcttggaggaaaaagtccagtagtagtctttaatgatgcgcgcaaagacaatgcgataaatggaattatggcaagtatttttggtgccggtggccaaagctgcattgcgggctcaagactttatttgcaaaagaatatatacgaagaatatattgaagagttaaaaactaaagccgaagcaattaaaataggtgaccccatgtccactacaacgcaattaggacctttggctactttaaatcagttacaaaacatagaagataaaatcaaacaaaccttagaacaagggggtagaataataactggcgggaatagagtaaatgattttaaaaatggtttttattttgagcctaccatcatagcatgtgatcatcatagtttgcctgcagcagagaatgagttattcggtcctgttttatcagtaatgaaatttaccgatgaagatgaagcaattaaactaatgaatgataatacttttggcttagcagcaggaatctttactgaaaacaatgggattgcaatgagagtgtctaaagctgttcaagcaggagttgtttttgtgaatacttacagattaatttcgcccatggccccttttggtggctttaaaaatagtgggtatgggagagagtcaggaattgaagtgatgaaagattattctaatattaaaactacttggattagtacttcaaaagagcctttaagtgatcccttcaatttgcgttga

SEQ ID NO: 199981 - DNA, 1474 bp, Unknown
  Bacterial polypeptide expressing nucleotide sequence isolated from the Sargasso Sea
gatgcagcagtttaaaaattatatcaacggtgaattcactgaatctaaatcaggtaaatcttttaagtctgttgatccatcgactgaaaaggaatttgcagaaatttcactcgcggaagagtatgaagtaaatgcagccgtagagtcagcgcataatgctttttatggagaatggtcaaaaatttttcctagtaaaagagcaaactatttaagagcaattggtgatcaacttaaggagaaagcagaattacttggaacaatagaaacaaaagatactgggaaattatttaaagaaacaagatttcaggcaaattatatcgctgaatattattattactatgctggattggttgacaaaattgaaggatcaacgcttccaatagataaagaagatatgcatgttttcaccaccagagttcctgttggtgttgttgctgcgataataccatggaactcacaaatgtttctcactgcagtcaaacttgctccagccttagcaatgggtaatactattattattaaggcatcagaaattgcccctactccattattagaatttgcaaaaattattgataaagttggaataccaaaaggtgtagtaaatattataactggttttgcagatacttgtagcaagttacttacttcgcatccaaaaattaataaaatagcatttacaggaggtgtccatacagcaaaacatattgttagaaactctgcagaaaatttatctcaaatatctctagaacttggtggaaaaagtccagtagtagtttttaaagatgctcgtaaaaacaacgctattaatggaattatggcaagtatattcggggcaggtggtcaaagttgtattgctggttcaagactttatttgcaagaagaaatttatgatgaatatttagaggaattaaaaaatagagtagaagaaattaaaattggcgatcctttatcaactacaactcaactaggaccccttgctactttaaatcaattacaaaatatagaagaaaaaattaaacaaacaaaggaattaggaggtaaaataattactggaggaaataaagttgataaatttaaaaatggttattattttgagcctacaataattgagtgtgcaaatcataatttgcctgttgcagagaatgaattatttggtccagttttatctgtaatgaaatttaaagatgaagaaaatgcaattaaattaatgaatgataatagttttgggcttgccgctggaatatttacagaaaataatggaatagcaatgagagtttcaaaagctgtacaagcaggaattgtatttgttaatacttatagacttatttctccaattgctccatttggtggatttaaaaatagtgggtatggtagagagtcaggattagaggtaatgaaagattattccaatacaaaaactacttggattaatacctcgacaaaagaaattgatgatccttttataatcagataa

SEQ ID NO: 199982 - DNA, 1417 bp, Unknown
  Bacterial polypeptide expressing nucleotide sequence isolated from the Sargasso Sea
tatgacattaccggttcttatcaataaccagtggcaagaaggcaacgggccttcgctatcttccctgaacccggccatgggagaagtgttctggcagggtaatgcggccgatgaggcccaggtggcgagtgccgtagaggccgcccgggcggccagcaccggttggtcccgggccgggtttgagcatcgggtggccatagcccgccgctttggcgaactgctgggcgaaaataaagaagccatggcccgctgcattgcttcggaaaccggaaagcccttctgggaagccctgaccgaagtggcggccatgatgggcaaagtcgaaatttcggtgaaagcctacaatgagcgtaccggccagcgcagtaccgatatgccgggcgcaaaggccgtacttcggcacaagccccacggcgtggttgcggtatttggcccctataacttccccggccacctgcccaacgggcatattgttccggccctgattgccggcaacacggtggtgttcaagcccagcgagcagacgccggccgtcgccggcaaaacggccgagctgtggcttgaagccgggctgcctgccggagtcctgaacctggtgcagggagccagggaaaccggcatcgccctggccaatcatccggatattgatggcctgttctttaccggcagctccccgaccggtgaaattctgcaccggcaattcgccggcaatccgggcaaaatcctggccctggaaatgggcggcaacaatccgctgatcgtggatgacaccgtagacgttaccgccgccgtgcatgaaaccatccagtctgcctacattacttctggccaacgctgcacctgtgcccgacggctgatggtgccggcaggagagtggggcgacaacttcctggatgccctggcccgggccgtggaagcgatccaggtgagtggcgcctttgacgagccggcgccgtttatgggcagtgttatttccgaggcggccgcgcagggtgtgcttgaggcccagagccggctgctggaactgggtggccgtgcactggtagcgagccagcacctgaaacccggcacaggcctgctgtcaccggggctgattgatgtcacctctgctgtgaatgtgcccgacgaagagatcttcgggccggtacttcaggtataccgctaccaggactttgacgaagcgattcgacaggccaacaacacccgtttcgggctgtctgccggtttattcagtgaaagccgggagcgctttgaagatttctacgaccggattcgggcaggtatcgttaactggaacaaacagctgaccggtgcctccagtgccgcgcccttcggtggcatcggcgccagcggaaaccaccgtgccagtgcttactacgcggcagactactgctcgtatccggtggcgggtatgagg

SEQ ID NO: 199983 - DNA, 346 bp, Unknown
  Bacterial polypeptide expressing nucleotide sequence isolated from the Sargasso Sea
cgcccgacggtgttcggcaatgtcacgccgaacatgacgatcgcgcgcgaggagattttcgggccggtgctgtcgatcctcggctacgactccgaagacgaagcggtcgcgatggccaacgacagtctctacggtctcgcgggctatgtgcaatccgcgtcgatcgagcatgcgtatgcggtggcgaaacgcctgcgtaccggcacgatctatctgaactacgcggactacagtcccgatgcgccgttcggcggcttcaagcaatcgggcaacggccgcgagtatggtgagttcggtctcgaggacttcctggagatcaagggcgtggtcggctacgcgagttgag

SEQ ID NO: 199984 - DNA, 538 bp, Unknown
  Bacterial polypeptide expressing nucleotide sequence isolated from the Sargasso Sea
tgcagcaaaaagggcagctgaattagtaaaaccaggaaaacctcattcagaaattgacagcgtagaaactgaaagatgtttagatagatttgataaaattagaaactctaaagggaaaaccaaaacttctgaactcaggttgtctatgcaaaaaacaatgcaaagtaagtgtgctgttttcagaacagaaaagactttaaaagagggcgtagacgcaataagagaaccttttgcaggtatggaggatttatcaattaaagatcaatcacttctttttaatactgatttagttgaaactttagagtttgataatcttatacgtcaagccatgaccacaatggattctgcttatcacagaaaggaaagtcgaggagctcacgctagagaggacttttctaaaagggatgataaaaactttatgaaacacaccttagcttggcaaagaggcaaagaagttaatgtaaaatatagggatgtacattcaagaactttaactaatgatgttcaatacttcccacctaaggaaagagtatattaa

SEQ ID NO: 199985 - DNA, 1495 bp, Unknown
  Bacterial polypeptide expressing nucleotide sequence isolated from the Sargasso Sea
gatgaatttaatacaacattacgtaaatggtaaaatttttcctggttcatccaaaagaagcggaaaagtttttaatcccgcaacaggatcacaagaaagcgaagtctcacttggaacaaaaaatgacttagaccaagctgttgatatagcatcaaaagcttttgaaacatggtcactaaaaccaccaatacaaagagcaagagtcatgtttaaatttaaagaattgatagaaaaaaattcagatgaactaacaaaattaatcgtttctgaacatggtaaagtttacgaggatgcaaaaggttcactgacaagaggtttagagatagttgagtttgcctgcggtatacctcaaatgttaaaaggggaatttacagaaaatgttggcactgagattgatagctggtcaattagacagccacttggtgtttgtgcaggtataaccccatttaattttccagctatggtaccaatgtggatgtttccgatggctatcgcatgtggaaatacatttattttaaaaccgtcagagaaagatccttcatgttcaataaagttagcagagctattttcagaagctggtttacctgatggagttcttaatgttgtcaatggagataaagaggtagttgatgcaattttaacaaataaaaaaattcaagcagtaagttttgttggatcgactccaatagcaaaatatatttacgaaaatgctgcaaaaaatgaaaaaagggtacaagctttaggaggtgcaaaaaatcattgtgttgttatgcctgactgtgatttagatcaagctgttaacggattaatgggagcagcatacggatctgcaggagaaagatgcatggcccaatcagtagcagttgctgttggaaaaattggtgatgaattagtaggaaaactatcaaaaaaagtcgaggctttaaaagttggtcctggaatggataaaagttcagagatgggtcccctagttacaaatgaacatcttgaaaaagtgaaaggatatgtagatttaggtgtgaaagagggcgctaagttagttgtggatggtagaaatataaagttacaaggttatgaaaaaggattttttattggaggatgtttatttgatcatgtgagtaaagatatgagaatttacaaagaagagatcttcggtccagttttatcagttgtaagagctaaagattttaacgaggcaattaatttaattaacgaacatgaatttggtaatggaacaagtatttacacacgtgatggtgatgttggtagaacttttgcaagcaaaattaaagttggcatggttggtataaatatacctatacctgtgccagtcgcattccacagttttggaggatggaaaagatcactttttggagatcaacacatgcatggacctgagggtgtaagattttatacgaaattaaaaacaattacatctaggtggccttcaggtgttagatcaaacccagagtttataatgccaacaatgaaatag

SEQ ID NO: 199986 - DNA, 781 bp, Unknown
  Bacterial polypeptide expressing nucleotide sequence isolated from the Sargasso Sea
atgaacggattcgactacagcggcaagacggtgctcgtgacgggcggcaccaagggcatcgggcggcgcatcgccgaacggtttctcgcggcaggcgcgcgcgtgttcgtgtgcggacgcagcgcgcccgacacgccgccttctgccggcggccgcacggcggcgttcgtcgcggccgacctgcgcgacatcgaacaggtcgacgcgatgctcgcgacgattcgcgctgcggcaggcggcctcgacgtgctcgtcaacaacgccggcggctcgccgttcgcgctcgcggccgatgcgtcgccgcgcttcaccgaatcgatcgtgcgcctgaacctgatcgcgccgctgcaactcgcgcagcgcgtaaacgcgatcatgcagccgcagcccgaaggcggcgtgatgctgttcatcgcgagcgtcagcgcgtcacggccctcgccgggcacggccgcatacggcgccgcgaaagcgggcctcgtcaacgcggtcacgtcgctcgccgtcgagtgggcgccgcgcgtgcgcgtgtgcgcgatcagcccgagcctcgtgcagacggaatcggccaccgaaggccactacggcgacgccgccgcgctcgacgccattcgcgcgacgattcccgccggacggctcgcgacgcccgacgacgtcgccgccgcgtgcctgttcctcgcatcgcccgcagcctcgtacacgtcgggcgcgaacctgcggctcgacggcggcggcgaacggcccgcgttcctgtcggccgcgcaggccgccgcacgctgat

SEQ ID NO: 199987 - DNA, 829 bp, Unknown
  Bacterial polypeptide expressing nucleotide sequence isolated from the Sargasso Sea
tatgagagatcgtttcgattttcacggaaaaacagcactcgtcacgggcgcatcgtcgggtatcgggcgcgcgtttgcctatgcattggccaaacgtggtgcgagacttctgctggtcgcgcgctctcgcgacaagctgcacgatctggccgcggagctgcgacgcgactatgcgtgcgacgccgatttcctgaccgtcgacctgagcacagccgatgccgtacacacgatcgattgccacttgaaggtgaccggcaaagtcgtcgacgtactcgtcaataatgcgggctttgcggcttacgggcgcttcgaaacgattccgtggacgcgccagcgcgacgaggttcttgtgaactgcatggctgcaatcgagctgactcatcttctgctgccggggatgcaggcgcgttccgctggcgcggtcatcaacgtcgcgtcgacagccgcattccagcccgatccttatatggccgtctacggcgcaaccaaggcctttctgttgtcattttcagaagccgtttgggccgagaaccggcatcgcggcatccgggtcgtcgcgttatgtcccggggcgacgcaaaccgcgtttttcgatgtcgttggcgcgcaggaggcggccgtcggcacgccgatgcctgtcgcgagtgtggtggaggatgcgttgtgggcgctggatcgcaatcggagccatcggattgtcggaacccggaaccggctgcttgccaatttgcagagactgttgagccgcgagacatcggcacggctggttgagaaaatccttcggccgagaggcggtcaggacccggtgacgcgagagaccaacgcgtag

SEQ ID NO: 199988 - DNA, 841 bp, Unknown
  Bacterial polypeptide expressing nucleotide sequence isolated from the Sargasso Sea
gatgtcggtgctggacttcttgcatctgggcagctcgctgtcgctgcggagcttcacgcgcgcgggcagcgcggtgtcggtgcgcgggctgagccggttcgggtcgtcgatgtcggtgttggatttcttgcacttgggcagctcgctgtcgctgcggagcttcacgcgtgcgggcagcgcggtgtcggtgcgcgggctgagccggttcgggtcgtcgatgtcggtgctggatttcttgcatctgggcagctcgctttcgctgcggagcttcgcgcgagttggcagctcgctgtcggtgcgtgggggtgtgctttcgttgtctgtgcgcgggctgagccggttcgggtcgtcgatgtcggtgctggacttcctgcacttgggcagctcactgtcgctgcggagtttcacgcgtgcgggcagcgcggtgtcggtgcgcgggctgagccggttcgggtcgtcgatgtcggtgttggatttcttgcatctgggcagctcgctgtcgctgcggagcttcacgcgtgcgggcagcgcggtgtcggtgcgcgggctgagccggttcgggtcgtcgatgtcggtgctggacttcctgcacttgggcagctcgctgtcgctgcgtagcttcacgcgtgcgggcagcgcggtgtcggttcgcgggctgagccggttcgggtcgtcgatgtcggtgttggatttcttgcacctgggcagctcgctgtcgcttcgcagttttgcaaggcttgggagttctctctctgtggcgggaacgacgttgcttggatctgaagtcaagtttgattcggataatggtgtgaacatcattggttcggcggcgtcggaggtt

SEQ ID NO: 199989 - DNA, 1024 bp, Unknown
  Bacterial polypeptide expressing nucleotide sequence isolated from the Sargasso Sea
acagacctatcaacacctttttcaaacaaccttttcaaacaaggatatcaacaaccttatgagcaaactataagtagacctacaacatatgaggtcacaattcctagacctacaacatatgaacagactatacctagacctactcaagtacaaaatagtagacctactaactatcaaactagtagaccatcatcttatgaagtcacaattcctagacctactaactatcaaactagtagaccagcatcttatgaagtgactatacctagacctactcaagtacaaaactcaagacctgcgtcttacgaggtgactatacctagacctactcaagtacaaaattctagaccagcatcttatgaagtgactatacctagaccaacacaggtacaaaattctagaccagcatcttacgaggtgactatacctagacctacaacttatcagattcagaatcatagaccacaacaatataactatcagattcaaaatcatagaccacaacagtataattatcaaacacagaatcatagacctgctcagtataattatcagatacagaatcatagaccacaacagtataactatcagattcagaatcatagaccagcaaattatcaaactactggtcacagtcatagaccagttaataatcaacaaacttatcaagtgcaagtttatattgcagctaatcctaaatttggtatagctgcatctcagactcaaacacctaatgcacagttgtattgggcaggtatttcatggcctcaatatcaaccagaaggcccttgggagccaaaccaagtaaatactcaacaaccttataattatcaaatacaaaatagtagacctactaactatcaaactactggtcatgcaactagaccacagaattatcaaactcaaggtcatgcaactagaccacagaattatcagacacagaaccatgcaactagaccacagaattatcaaactcaaggtcatgcaactagaccacaaaattaccaaacaactggtaatagac

SEQ ID NO: 199990 - DNA, 511 bp, Unknown
  Bacterial polypeptide expressing nucleotide sequence isolated from the Sargasso Sea
cttgcttcttgttacttgcttcttgcttcttgcttcttggctcttgcttcttgcttcttgcttcttgcttcttgcttcttgcttcttgctttgttgcttcttgcttcttgttacttgcttcttgcttcttgcgtgttgcttcttgcttcttggttcttgcttcttggttcttgcttcttgttacttgcttcttgcttcttgttacttgcttgttggttcgtgcttcttgcttcttgcttcttgcttcttgcttcttagttgttgcttcttgcttcttgcttcttgcttcttgcttcttgcttcttgcttctttgcttcttggttcttgcttctttttacttgcttcttgcctcttgcttcttgcttcttgcttcttattacttgtttcttgcttcttgcttcttgcttcttgcttgttgcttcttgcttgttgcttcttgcatcttgcttcttgcttcttgcttcttgcttcttggttcttgcttcttgttttgttgcttcttacttctag

SEQ ID NO: 199991 - DNA, 528 bp, Unknown
  Bacterial polypeptide expressing nucleotide sequence isolated from the Sargasso Sea
gaacccccccaaaaaacttaacggaccaattacaaacgtgtccatcgttgccgcagccgataatgatgaaacgcacgtcaacgccaccaaaggttgtatcaggcagtctgggcttaccccgttcaaagagtactcctactatgcgaagttttgcactattgcgggttgcacaacaagcaagaccgcagccggaaagtcgggtgaagccgcgcctgaggatcagcctgccccaagccttgagcgcggagcggatggcctctcggtgacggtaacgtggacgccgcctgatgttccaaatggggtgctcacagcctaccgagtcgactatcatcggcaaaagcggagcagggcccgccgctcgcttctcgagccgaactctgacagcgtcgtcacacggtatcgccgtcaagatgacggcggtgctggtgctggtggtgctggtgccggtggtgctggtgctggtgctggtgctggtgctggtggtgctggtgccggtggtgctggtgccggtggtgctggtgctggtgc

SEQ ID NO: 199992 - DNA, 744 bp, Unknown
  Bacterial polypeptide expressing nucleotide sequence isolated from the Sargasso Sea
aatgccaaagatagagaatgatcctaagctagatttttcgagtgtgttaataagacccaaacgttctgagctttcaagtcgttcgttagtaaatttaaatagaaaaataacttttaaacatgctaaaatagagcgatgcgatccaaatcacagtagggctttttgcgaagagagaagttgggaaggtgttcctatagtttctgctaatatggatacaacaggaacatttgaggtttataacaccttgaaggaccataatattgttacagctattcataagttttattcagtagaagattttaaaaaagcaaatcaagaatatacattaaatcccgatttatttatggtttctactggtatttctagtactgattataataaattaataactatattaagtgtagtaaactgtaattggatttgtgttgatattgctaacggctatattaaacagtttgtggaattttgtagaaaagtaagacaaacatatcctgataaaataattgtagcaggaaatgtagctacaagagagatggttgaggaattaattttaaacggtggtgttgatgttgtaaaggtaggaataggtcctggtagtgcttgtacaacacgtataaaaacaggagttggtataccacaattatctgctattttggaatgtagtgatgctgcacacggtgcgggaggccgaattattgctgatggaggaataacatgtccaggtgatatggcaaaagcctttgg

SEQ ID NO: 199993 - DNA, 3127 bp, Unknown
  Bacterial polypeptide expressing nucleotide sequence isolated from the Sargasso Sea
gatgggacacaatctgaaattgacgggtgtagcgctgtcggtcgcgacggtgttcggggtactggcttcgggttccgcgatggcgggggcccttgatgcgctgccgattccgcaagtgatcgtcaacccgccgacgaacagcgtgtcggtcgggttggtcgcgacgggtacgtcgccgctgggctcggtcaccgtggcggcaggcggggcgggcgcgatccagacgtcgctgggcgatcccggccaagtactgtcgggcgccgtgggggcggtgaccggcgcactcggcggtggcggcggcacggtgcagccgctcgcgccggtccagggtgtgctgaatcaggtgacgggtgcgttgggcggcggcaacccggcgggtgcgttgaccggtgcgctgaatacggcgacggggacgctgagcaatgcggttggcacggtgacgggtgcactgggcggtatcggcggtggctcgaacccgctggcgccggtgcaaggcgtcgtcaatcaagtaacgggtgcgctcggtggcggcaatccggctggtgcactgactggcgcgctcggcacggtcacgggtgcgctgggtggcatcggcggtggctcggatccgctggcgccggtgcaaggtgtggtcaatcaagtaacgggtgcgctcggtggcggcaatccggccggcgcgttgaccggtgccctcggcacggtaacgggcgcgctgggcggtatcggcggcggttcaaacccgctggcgccggttcaaggcgtcgtgaaccaggtaacgggtgcgctcggtagcggcaacccggctggtgcattgactggtgcgctcggtacggtgacgggcgcactgggtggcatcggcggtggttcaaacccgctggcgccggtgcaaggcgtggtcaatcaagtaacgggtgcgctcggtagcggcaacccggctggcgcactgactggcgcgctcggcacggtgacgggcgcgttgggtggcatcggcggtggttcggatccgctggcgccggtgcaaggtgtggtcaatcaagtgacgggggcgctcggtggcggcaacccggccggcgcactgaccggtgcactcggcacggtgacgggcgcgttgggtggtattggtggcggctcgagcccgctggcgccggttcaaggcgtcgtgaatcaagtaacgggtgcgctgagcggaggcaatccggcaggtgccctgaccggtgcgctgaacaccgcgaccggggcactgagcagcgcgctcggtacggcgacgggcgcactgggcggcatcggcggtggctcgaatccgctggcgccggttcaaggcgtcgtgaaccaggtcacgggcgcactcggtagcggcaatccggctggcgcactgactggcgcactcggcacggtgacgggcgcattgggcggtatcggcggcggctcgaacccgctggcaccggttcaaggcgtcgtgaatcaagtaacgggtgcgctcggcagcggcaatccggcgggtgcactgaccggtgccctcggcacggtcacgggtgcattgggaggcatcggcggcggctcggacccgctggctccggttcaaggcgtcgtcaatcaagtgacgggcgcattgggcggcatcggcggtggctcgaatccgctggcgccggttcaaggcgttgtgaaccaagtcacgggcgcgctcggcagcggcaatccggcaggtgcactgaccggcgccctcggcacggtgacgggtgcactgggcggtatcggcggtggctcgaacccgctggcgccggtgcaaggcgtcgtgaaccaggtcacgggcgcgctcggcagcggcaatccggcaggtgcactgaccggcgccctcggcacggtgacgggtgcactgggcggtatcggcggcggctcgaacccgctggcaccggtgcaaggcgtcgtgaaccaggtcacgggcgcactcggtagcggcaacccggcaggcgcactgaccggcgcgctcggcacggtgacgggtgcattgggcggcatcggcggcggctcgaacccgctggcgccgatccagagcgtcgtcgaccaggtcacgggtacgctcggcagcggcaatccggccggcgcactgagcaacgcggtcaacacgatcacgggcacgctcggcaacgtcggcggcgcgggaagcccgctggctccggtgcagggcgtcgtcacgcagctcgccggtacgctcggcggcgcgggaagcccgctggcgccggtgcaaggcgtcgtgaaccaggtcgtcggcacgctgtccggcgccggtggcggtagcccgatcacgccgatcacgaacctcgtcaacggcctgcagaatgcgctgccgacgggcggcaacgcagccggcgcgctgaccggcgcactgggctcggtgacgggcgcactcggcaacctcggtggctcgaacccgctggcaccggtgcagggcgtcgtgaaccaggtcgtcggcacgctcggcagcagcaacgcggtcggcacggccacgaacgcactgggtaacgcggtcggctccgtcgtgggcgcactcggcaacctcggcggctcgagtccgctggccccggtacagggcgtcgtgaaccaggtggtcggcacgctcggcaacctcggcggctcgaacccgctggcgccggtgcaaggcgtcgtgaaccaggtcgtcggcacgctgtcgggcgcggcgggcagcaacccgatcgccccgatcacgaacctcgtgagcggtctgacgggcggcagcaacccggccggcgcactgaccggtgcgctcggttcggtgacgggcgcactcgcgaacggtccggtagccctcgggcaggcggccggcgcgctgtcgggcgcggccggttcgacggcggcagcgggcggcagcctgctcggctcgggtgcgaacgcggccggcggcacggcgggcgcagtcggctcgctgctgacgacgggcgccaacgcgacggcgacggtcgtcaacgcggtcggcacgacggtgggcacggcgctcggctccgcgccgggcctgtcggtcacgccgcattcgggcaacagcgcgccgggcaacccgctcgcgccggtgtcgtcgctgctccagtcgctcacgggcgcactgccgaagtaa

SEQ ID NO: 199994 - DNA, 8152 bp, Unknown
  Bacterial polypeptide expressing nucleotide sequence isolated from the Sargasso Sea
atgaaccgcacataccgctcgatctggaacgaatccctcggcgcgtgggttgctgcatcggaacacgactcggcacggggcaagccaaacaagtcggccgtcgtgaaggccgtcgcggccgcgatcatggtcgccggggcggccggcggcaacgtcgcctacgcgcagtgctcgacatccggctatagcgccgggggcggcaattcgaccagctcgacgtcgatcgccatcggctccggctccttcggctcgtgcgtgccgggccaaagcccgaccgcctccgccggcggcgcgattgctatcggcgcgaactcaccgaccaacacggtcgccagcgggtccaactcgacggcattcggtacggggtcatcggccaccaacaccgcatcgtccgcattcggccaaggtacgtcggcaaccggtcagttcgccaccgccgtcggcagcggcacgaaggcaaccggcaactacgccaccgcgatgggtagcaccagcgcggtcaacggcatccagacactcgcgtccggcgccggctcgacggcgatcggcagcaactccaccgctggcgcgcaggcgaccgcacaggattcgatctcgatcggcggccaatcgtcggtcacctcgagcgcaacgtccggcatcgcgatcggccgcggtgcgacgacgaacggcgcatacggcatcgctcagggcgatggcgtcgtttccggtgcaaccggccagaacgtcgccatcggctcgtcgggcacgaccgccgacagcggttccgcgacgggcggcgccgtggcgatcggtcgttcgcagacggccagcggcgacggcgcggtcgcgctcggcaccagcaactcggcaagcggcacgggcgcggtcacgctcggcagcggcaactcggcaaacggcaccggcgcggttgcattgggcagcgccaacagcgtgacgggggcgggttcggtcggtatcggcagcagcgccaagtcgacttacgcgggctcgaccgcgatcggcgcttcgtcgtatgcgggcggcgcttcggcaccggcttccgcttacggcaacggcagctccgcgacggcgaactatgcgaccgcgatcggtgtcaatgccagcgcagctggcggcggcagcgtggcgcttggcgtggccaccgcaagtgcgctccagagcgtggcgatcggccagcaatccacggcttcccaggccggaaacatttcgatcggttcgtttgcgacggccagcggcaacggcaatgcggtcgcgatgggttaccagtcgacggcttcggccggcaacgcgatggcgctcggctacctgtcgacggccaacgtggccaattccgttgcccttggcaacaactcggcaacgattggtgcggcgaacacggcgaccggcggcaccggttcggtcagctccgccacgatcggcagccagacgttcggcaactttgccggcgcaagcgctgccaacggcgtcgtcagcgtcggtacggcgggcaacgagcgccgcatccagaacgtggccgctggtctcgtcacgtcgaccagcaccgatgcgatcaacggcagccagctctactcggtagcaagcacgacgacgtcgagcatcacgagcctgtcgacgtcggcttcgaccggtttgtcgtcggcgaatagctcgatcacttcgctgtcgacttccacgtcgacgggtctgtcgtcggctaccagctcgatcggttcgttgtcgaccggcctctcgtcgaccaatagctcggtcacgtcgctgtcgacttccacgtcgacgggtctgtcgtcggctaccagctcggtcggctcgctgtcgactggcctctcgtcgaccaatagctcggtcacttcgctgtcgacttccacgtcgacgggtctgtcgtcggctaccagctcgatcggttcgttgtcgactggcctctcgtcgaccaatagctcggtcacttcgctgtcgacttccacgtcgacgggtttgtcgtcggctaccagctcgatcggttcgttgtcgaccggcctctcgtcgaccaatagctcggtcacttcgctgtcgacttccacgtcgacgggtctgtcgtcggccaccagctcgatcggctcgctgtcgactggcctctcgtcgaccaatagctcggtcacttcgctgtcgacttccacgtcgacgggtttgtcgtcggctaccagctcgatcggttcgttgtcgacgggtctttcgtcgaccaatagctcggtcacctcgctgtcgacttccacgtcgaccggtctgtcgtcggccaccagctcgatcggctcgttgtcgacgggcctttcgtcgaccaatagctcggtcacctcgctgtcgacttccacgtcgacgggtctgtcgtcggctaccagctcgattggctcgttgtcgaccggcctgagctcgaccaacagctcggtcacgtcgctgtcgacctccacctcgacgggtctgtcgtcggctaccagctcgattggctcgctgtcgaccggcctcagctcaaccaacagctcggtcacttcgctgtcgacttccacgtcgacgggtttgtcgtcggctaccagctcgattggttcgttgtcgaccggcctgagctcgaccaacagctcggtcacgtcgctgtcgacctccacgtcgaccggcctgagcacgatcacgaccaagacgaacaacctgggcaccagcacggcggcggcactcggcggcgggtccacgtacgacccgacgaccgggacggtttccgcgccggcgtacacgacctataacgcgaacggcacgacgtcgaccgccaacagcgtcggctcggcgatcaacaacatcaacagccagggcatcaagtacttccacgcgaactcgacaggcgccgacagcaccgcgaccggcaccgacgctgtcgccatcggcaccggcgccgtcgccggcacgaacaactccgtcgcactcggcgccaactcggcgacggccgcggccaaccccacgagcagcgcaaccgtcaacggcgttacgttcagcggatttgccggcgccacgccggtcggcaccgtcagcgtcggcgacctcaacaaagaacggcagatcaccaacgtcgccgccggtcgggtgaccgggaccagtaccgacgcgatcaacggtagccagctctattcggtcgcccaagcggttggtagcgcgaccagcgccatttcatcgctgtcgacttcgacctcgacgggtctgtcatcggccaacagctcgatcggctcgctctcgaccggcctctcgtcgaccaatagctccgtcacgtcgctgtcgacctcgacctcgacgggtctgtcgtcggctaccagctcgatcacctcgctgtccacgtcgacctcgacgggcctgtcgtcggctaccagctcgatcggctcgttgtcgacgggcctttcgtcgaccaatagctccgtcacttcgctgtcgacctcgacctcgacgggtctgtcgtcggccaacagctcgatcacctcgctgtccacgtcgacctcgactggcctgtcgtcggctaccagctcgatcggctcgttgtcgacgggcctttcgtcgaccaatagctcggtcacctcgctgtcgacctcgacctcgacgggtctgtcgtcggctaccagctcgatcacgtcgctgtccacgtcgacctcgacgggtctgtcgtcggccaacagctcgatcacgtcgctctcgaccggtctctcgtcgaccaatagctcggtcacttcgctgtcgacctcgacttcgacgggcctgtcgtcggctaacagctcgatcacctcgctgtccacgtcgacctcgacgggtctctcgtcggctaacagctcgatcacgtcgctctcgacttcgacttcgaccggcctctcgtcggctaccagctcgattggctcgttgtcgaccggcctttcgtcgaccaatagctcggtcacttcgctgtcgacctcgacctcgaccggcctgtcctcggcgaatagctcgatcacctcgctgtcgacgtcgacttcgacgggtctctcgtcggctaacagctcgatcacgtcgttgtccacctcgacttcgacgggcctgtcgtcggctaacagctcgatcacctcgctgtccacgtcgacctcgacgggtctctcgtcggctaacagctcgatcacgtcgctctcgacttcgacttcgaccggcctctcgtcggctaccagctcgattggctcgttgtcgaccggcctttcgtcgaccaatagctcggtcacttcgctgtcgacctcgacctcgaccggcctgtcctcggcgaatagctcgatcacctcgctgtcgacgtcgacttcgacgggtctctcgtcggctaacagctcgatcacgtcgctgtccacctcgacttcgacgggcctgtcgtcggccaacagctcgatcggctcgctctcgaccggtctctcgtcgaccaatagctcggtcacctcgctgtcgacctccacgtcgacgggtctgtcgtcggccaacagctcgatcacgtcgctgtccacctcgacttcgacgggcctgtcgtcagccaacagctcgatcggctcgctctcgaccggtctctcgtcgaccaatagctcggtcacctcgctgtccacctcgacttcgacgggtctgtcgtcggccaacagctcgatcacgtcgttgtcgacctcgacctcgaccggcctgtcgtccgctaacagctcgatcacctcgctgtccacctcgacttcgacgggcctgtcgtcggccaatagctcgatcacgtcgttgtcgacttccacgtcgaccggcctctcgtcggctaccagctcaatcggttcgctgtccacgggcctcagctcgacggatagttcggtgacatcgctgtcgacttccacgtcgaccggcctctcgtcggcgaccagctcgatcggttcgttgtccacgggtctcagctcgacgaatagttcggtgacgtcgctgtcgacctcgacctcgacgggcctctcgtcggctaccagctcgatcggttcgctgtccacgggcctcagctcgacggatagttcggtgacgtcgttgtcgacttccacgtcgaccggcctctcgtcggctaccagctcgatcggttcgctgtccacgggcctcagctcgacgaatagttcggtgacttcgctgtcgacctcgacctcgacgggtctctcgtcggcaaacagctcgatcacgtcgctgtccacgtcgacctcgacgggcctgtcgtcggctaacagctcgatcggctcgctctcgaccggtctctcgtcgaccaatagctcggtcacgtcgctgtcgacctcgacctcaacggggctgtcgtcggccaacagctcgatcacctcgttgtcgacctcgacctcgacgggcctgtcttcggccaacagctcgatcacgtcgctgtccacgtcgacctcgacgggcctgtcgtcggccaacagctcgatcacgtcgctgtccacgtcgacctcgacgggtctgtcgtcggccaacagctcgatcacgtcgctgtcgacctcgacgtcgacgggcctgtcttcggctaacagctcgatcacctcgctgtcgacttcgacctcgacgggcctgtcttcggccaacagctcgatcacgtcgctgtccacgtcgacctcgacggggctgtcctcagctaacagctcgatcacgtcgctctcgacttcgacctcgacgggcctgtcgtcggccaacagctcgatcacctcgctctcgacgtcgacctcgacgggcctgtcgtcggccaacagctcgatcacgtcgctgtcgacttccacgtcgaccggcttgtcgtctgccaacagctcgatcggttcgctgtccacgggcctcagctcgacggatagttcggtgacgtcgctgtcgacctcgacctcgaccggcctctcgtctgccaacagctcgatcggttcgctgtccacgggcctgagctcgacggatagttcggtgacgtcgttgtcgacctccacgtcgaccggcctctcgtcggcaaccagctcgatcggttcgctgtccacgggtctcagctcgacgaatagttcggtgacttcgctgtcgacttcgacctcgaccggtctctcttcggcgaacagctcgatcacttcgctgtcgacttcgacctcgaccggcctctcgtcggccaacagctcgatcggttcgctgtccacgggcctcagctcgacgaacagttcggtgacttcgctgtcgacctcgacctcgacgggtctctcgtcggccaacagctcgatcacctcgctgtcgacctcgacgtcgacgggcctgtcttcggccaacagctcgatcacctcgctgtcgacttcgacctcgacgggcatcaactcgctgtccaccggcctgagcagcacgaacagcacgatcctgtcgctgtccacgtcgacgtcgaccggcatcggctcgctgtccaccggcctgagcagcacgaacagctcggtgtcgtcgctgtcgacctcgacctcgaccgcgatcaatgacgcgaaaacgcactactacagcgtcaacgacaacggcgtgcagcaagccaactacgacaacaagggcgcgacgggcatcaacgccctcgcagccggcgtgaacgctagcgcggcaggcaacagcagcgtggcagtcggcgacggttcgaacgcgcagtcggcaggcgcggtcgccatcggccagaacgcatcggcaacgggcggcaaggccgtgtcgatcggctccggcaacacggcaaccggcgacggcgcggtcgcgatcggcgacccgagcatcgctacgggtaccggcgcggtggcgatgggcgcgaacgacacggcgaccggcaacggcgcagtggcgctcggcaacgcgaacacggccaacggcgcgagcgcacttgcactcggcagctcgaaccaggccaccgcggacaacacgatcgcgctcggcaaccaggccacggcaagcgccaccggcgcgcaagcgtacggctcggcagcgcaggcaaccgcggccgacgcactggccttcggcacgaacgcacaggccaacgtcgccaactcgatcgcactcggcgcgaactcggtcacgagcgccgcgaacccgacgtcgagcgccacgatcggcggcgtcacgtacccgttcgcaggcggctcgccggtcggcgtggtgagcgtcggcgcaccgggggcggaacgccagatcacgaacgtcgccgcgggccggatctcggccagcagcacggacgcgatcaacggcagccagctcaacgcgacgaacaacgcgatcaacacgctgtcgacgtcgaccgcgtcgaacgtcgcatcgctgtccacgggcatcaactcgctgtccaccggcctgagcgcgacgaacagcaacgtggcctcgctgtccacgtcgacctcgaccgcgatcaactcgctgtcgacgggcctgagcacgacgaacagcaacgtcaactcgctgtcgacgtcgacctcgacgggcatcggttcgctgtccaccggcctgagcacgacgaacagcaacgtggcctcgctgtcgaccggcgtgacgaacatcaacaaccagttgaaccagttgtcgacgacactcaacaacaacacgacgcgtgcggcgaacaacaacggcgtggcggccgacatgaatggcaccggcaccgaccacccgaccgtcaccgccggctcgaactcggtggcgatcggcgcgaattcgacggacggcggccgctcgaacgtggtgtcggtcggtagcgacacgcagcagcgccagatcacgaacgtcgcgccgggtacgcaaggcaccgacgcggtgaacgtgaaccagctgacgcaggtgcagacgacgctgtcgacggcactgtcgggccagcaggcgcagatcaactcgctgggttcgcaactgcagcagaccgaccagatggcgaagcagggtatcgcggccgtcggcgcgatggcatcgatcccgcagctcgatcgcgatgccaacttcgggatgggcgtgggtacgtcgaccttcctcggccagaaggcgatggcggtcaacatgcaggctcgcatcacggagaacctgaaggcgtcgatcaacggcggcttcagcggcggtcagaaggtgatcggcgccggcatgctgtaccagtggaagtaac

SEQ ID NO: 199995 - DNA, 1471 bp, Unknown
  Bacterial polypeptide expressing nucleotide sequence isolated from the Sargasso Sea
cttggaacttgtatcagataattcaggcgatgtgggagatggatatgaattaaaatctgttaatggaacttttacagtaacctcagatcattctacaaaaggtacctatgaagatacctatttgactatcgtcggtaattcaacacctgcttcttcgtccactaccatagcaggtgatttgactattgcaggtgacgatttaataatgggaaccaatacaagcggagcggctcttataggcgatggtacaaattataatcctgttgtgatttcaggagatttatcaattggcactaatggaacagcagctatttcatcaaatgtcattgttaatgccgatattaatgcttctgctgctatcgcagattctaaacttgcaaccataacaacagctgacaaggtatccggagcagcaatacaagtagatggtgcaacaagtggtacgggaattactcttgccgatgatgataagtttttggtagatgatggcggcacaaccaaatatgtaaatgcatctcaggtcttattatacgctagcgccacttcatccactgatattaatggtggtacgattgatggtgttaccttaggtactaacagcgcagtgacccaggctgttatagataatgttaatatcaatggagcggagattggtcacacatcagatacggatctcatgaccctggcagatggcagtgtcacgttcacaggttcaactgttatcccagttgcagatgtaaacggaggttcagttgatggtgttacacttggtacgaatagtgcagtcacccaagcagttgtagacaatattaatctaaatggaacaactattggacatacagatgatacagatctcatgaccctggcagatggcagtgtgacgtttacaggttcaaccgttgtccccaatgcagatataaacggaggagcggttgatggtattacacttggtacgaatagtgcagtcactcaggcggtaatagataatgtgaatattaatggagtagagattggtcatacattggacacggacctcatgacattggcaaacggcagtgtgacttttactggttctaccgtaattgcttctgcagatgtgaatgcaggtacgattgacggtgttaccttaggtactaacagcgcagtgacccaggctgttatagataatgttaatatcaatggagcggagattggtcacacatcagatacggatctcatgaccctggcagatggcagtgtcacgttcacaggttcaactgttatcccagttgcagatgtaaacggaggttcagttgatggtgttacacttggtacgaacagtgcagtcacccaagcagttgtagacaatattaatctaaatggaacaactattggacatacagatgatacagatctcatgaccctggcagatggcagtgtgacgtttacaggttcaaccgttgtccccaatgcagatataaacggaggagcg

SEQ ID NO: 199996 - DNA, 1723 bp, Unknown
  Bacterial polypeptide expressing nucleotide sequence isolated from the Sargasso Sea
ggcagctgggtcgccgattcttttagataacacgattaacattgatggtagtttaattggccatgcggatgatacagacctcatgacccttgcaaatggtagcgttactttcacgggttctactgtaatcccaacagcggatgtagatggtggtgctatcgatgcagtcacattaggaacgaatagtgcggtgacccaggcggtcattgataatgtgaatatcgacggagctgtaataggtcatacatctgatacggatctcatgaccttagcagatggcagtgttactttcacaggttctactgtgatcccaacagcggatgtaaatggaggcgcgatcgatgcagtgacgctaggtacgaacagcgcagtgacccaggcggtcatcgataatgtgaatatcgacggagctgtaataggtcatacatctgatacggatctcatgaccttagcagacggcagtgttactttcacaggttctactatgatcccaacagcggatgtaaatggaggtgctattgatgcggtgacactaggaaccaacagcgcagtgacccaagcggtagtagatgatatcaatttaaatggtgcgaccatagggcatacggatgatatagaccttatgaccttagcagatggcagcgttactttcacgggttctactgtaatcccaacagcggatgtaaatggaggtgctatcgatgcagtcacattaggaacgaatagtgcggtgacccaggcggtcattgataatgtgaatatcaatggagtagaaataggacatacatctgatacggatctcatgaccttagcagatggcagtgttactttcacaggttctactgtgatcccaacagcggatgtaaatggaggtgctattgatgcggttactctagggacaaatagcccggtgacccaagcagttattgataacgtgaacattaatggagcccaaataggccatactacagatacagatctcatgacgctctcgagtggcactgtaaccgtagcagggactgttgcagcaacagccgttacaggtgatggttcaggccttactggtattactgcatccgttatgaaatcagatgatatttctcaaggagatgcagcagtgaccattagcacatcatcaggggctgttaatattaatccagcatctggttcatcgatccttttagataatacgatcaatatcgatggagcagaaataggtcatacggatgatacggatctcatgacattggcaaatggtagcgttactttcacgggttctactgtaatcccaactgcggatgtaaatggtggtgcgatcgatgcggtgacactaggaacgaatagtgcggtgacccaggcggtcattgataatgtgaatatcaatggagcagagataggtcatacctctgatacggatctcatgacccttgcagatggaagtgtgacctttactggctctacaataatagggacagtggatgtaaatggaggcgccatcgatgcagtgaccttaggaacaagtagtgctgtcactcaggcagtaatagataatgtgaacattaatgggtctaacatagggcatacagatgatactgatttattaacctttgcggatggaattgctactgtagcgggtgagatgtcgttgacaacattagatataggaggaacagatgttacagctacggcagcagagttaaataaattagatggtgtcactgcc

SEQ ID NO: 199997 - DNA, 775 bp, Unknown
  Bacterial polypeptide expressing nucleotide sequence isolated from the Sargasso Sea
aatgaaagcgatagatctattttcgggtgctggcggcttatctcttgccgcacatcaatgtggcattgatgtcatcgcagctatcgaactagatacagccgctaccgttacttatcaacgtaacctcattgaacgcctaaaagcgccaactaaattaattaatggcgatattaatgctgtcgacttgcccgccttaatgacagagttaaagctcaaaccaggaaaattggatttgctccttggtggcccaccatgtcaaggcttctcgactcatcggattaacggtgcaggtattgatgatccccgaaatcagcttctgttgaagtattttgattttgttgatggtttacgaccaaaagcgttcttgattgaaaacgtggcgggacttttatggaaacgccatgaaaactatctcaatcagcttctagccctcgcagaaacccatggctataccattcatttttgcgacattctcaatgctaaagactatggcgtgccacaaaaccgtaaacgtgtttttatctttggtacacgtaaagacctaaatattgatgctgctaattttccgccagcagcgacacacttctcgccgtctagtaataaatcaccttactggaaaacggcctcaactgtatttgaaaaaataccagcagaccttatcgagcaatatattgaagagtattttcgaccaaaaactaagcttgcagatgatgaagcaagagatctcatactcaacctagaatatggtgaagccgtaaaagagggtgatccttga

SEQ ID NO: 199998 - DNA, 969 bp, Unknown
  Bacterial polypeptide expressing nucleotide sequence isolated from the Sargasso Sea
ggcttatctcttgccgcacatcaatgtggcattgatgtcatcgcagctatcgaactagatacagccgctaccgttacttatcaacgtaacctcattgaacgcctaaaagcgccaactaaattaattaatggcgatattaatgctgtcgacttgcccgccttaatgacagagttaaagctcaaaccaggaaaattggatttgctccttggtggcccaccatgtcaaggcttctcgactcatcggattaacggtgcaggtattgatgatccccgaaatcagcttctgttgaagtattttgattttgttgatggtttacgaccaaaagcgttcttgattgaaaacgtggcgggacttttatggaaacgccatgaaaactatctcaatcagcttctagccctcgcagaaacccatggctataccattcatttttgcgacattctcaatgctaaagactatggcgtgccacaaaaccgtaaacgtgtttttatctttggtacacgtaaagacctaaatattgatgctgctaattttccgccagcagcgacacacttctcgccgtctagtaataaatcaccttactggaaaacggcctcaactgtatttgaaaaaataccagcagaccttatcgagcaatatattgaagagtattttcgaccaaaaactaagcttgcagatgatgaagcaagagatctcctactcaacctagaatatggtgaagccgtaaaagagggtgatccttgtaacatcacaatgcggccaacacccaaaatgattaggcaatttgaagccacacctttaaatggaagccgcgaagacgctggcgaagaatttaggctgccctgtcattcaaatggatataaaggtcataaagacgtatatggccgagtaatgatccacttacccagtaataccatcactaccggatgtaacaatccctctaaaggccgttttgttcatccttggaaaaac

SEQ ID NO: 199999 - DNA, 877 bp, Unknown
  Bacterial polypeptide expressing nucleotide sequence isolated from the Sargasso Sea
tagcaacatcaatggcatggtagtgacacgcggagacaagcataactacgatcgctggagagatgcaggttgttcgggttggggatatgaggatgtgttgccaatctttaagcgcattgagaaatttcgtaataaaggcaattcatcaagagggacaaagggtcccattgatgttatggagattgcgcacaaagatattctctctgaggcatttatgcatgcttgttctgacatcgacatacctattgcagatgattacaacggggggaactatgaaggtgcgcactatgcgcagatgtctcagacgaatgcgaagcgatgcagcacagaagtcggctatcttcgaggagcgcgtcaacggcctaatcttactgtcgtcacgagagcgcttgtcgagaagctaacaataaaaaacgatcaggtaagggggctcaaatatcttgagtttgactcctccggtcatcgtggagacgcgcatgaagtcacagtaagtggagaggtgattttaagtgccggtgcgatatgttcaccaatgattctcgagcgatcgggcgttggtaaagctgagtttctagaagaaaaaggaatcaaagtaattactgatctgccgggggttggagagaatcttcaagaccatcttaatgttcggacaacttatgagtgtacaaagcccattacggtaaatgatctgttcactaaacgagcattcgcgatacgatcagggatacagtattttgttctgcgtcgtggtcttatggctactccaacgataacctgttttgctcatgtcaagactgatcacgagttggagactccggatctcaaactggggatcgcccatgtaagcggcaaagatcggttcgctatggcggacggg

SEQ ID NO: 200000 - DNA, 583 bp, Unknown
  Bacterial polypeptide expressing nucleotide sequence isolated from the Sargasso Sea
aatgcaagaaaaagataaaacaagaagaaaggttttgattggcctaacaagtgctgtaggtttatcgggtctgccttttgctgcaacaccttttatagctgcatggaacccaagtgcaaaagctaaagcagctggagcaccagttaaattagatgtatcaaagatgcaatatgggcaacaaatacaagttgcatggagaaaacagccagtgtttattgttaggcacaccaaggaaagtttagctagtttagatttaagtgtatccaaattagctgatccaaattcagatcaaattgaagagccttacaaaggtctaaatgcttcaagatctcgaagtcctgaatattctgtcttttctggtatatgtactcatttgggctgtgcgccaaaatattttcctgaggttgaatcaaaaccatgggatgcaacatggaatggtggctttttttgtccttgtcatggatcaatgtttgatatagttggaagagtttttaagggtgttccagcacctacaaatttaatagtacctccgcatatgtttgaaggaagtatattaacaattggagaggataaggagttataa

SEQ ID NO: 200001 - DNA, 980 bp, Unknown
  Bacterial polypeptide expressing nucleotide sequence isolated from the Sargasso Sea
tttataccctagaggtaaaggattaggaggatcctctcttttaaacggtatgatttacatgagaggcgctccaggtgattttaataggtggagacaaaagggcttagagggttggtcatataatgatgtattaccatatttcaaaagatctgcttcagctttccatagagaaaaaaatgaatatcactcacactcaggtcctttaaaacttacaccagctggtaactacaattctatcgataaagcatttattgatgcatgtgttgaagctggggcagaaattaataatgatttttataatggcaatctaaatggagtaggtcgatatgatgttaaagtatggaacggaaaaagacaatcatctgcagaagcttatttaaaatttaaacctagcaacttaacaatttataaaaatacatctgtaataaaaattttaattgagaaaaataaagctaagggattacttttatcaaatggtgaagtttatgcatcatcagagataatattatctttaggagcattcggtagtcccaaatgtttaatgttgtcaggaattggcccagaagaacatttaaaagaaaaaaacatagaattactaattaacttacctggagtcggtgaaaaccttcacgatcatcctgttatgccaatgaattgggcttttcaaaacaacaatttaagtttctctaaatatcaaaggattgatagagctattattgtgggattaaaatatattttatttaaacagggattagccgcagctcctttttggtcaacaaatctatttcatgcaataagagaaaaagatatgcctgaaatacaagtgttcatgacacctatgtgttttaaagaagaaaaagataattggtctatgagtttagacaatttattaaattttggttcattatttttttctagaggtaaaaaagcttttccaggattacactttcaaattaatttattaagaccaaagagcacag

SEQ ID NO: 200002 - DNA, 250 bp, Unknown
  Bacterial polypeptide expressing nucleotide sequence isolated from the Sargasso Sea
atgaacaaaatttatgatatttttattataggtggtggaattaatggcgctggaatagcgcgagatgcatcaggtagaggcttaaaggtagctcttgcagataagggaaaggttggcaaggcaacatcttcatggtctacaaaactaattcatgggggtttgaggtatctagaaaattatgaatttagattagtaaatgagtcattaaaagaaagaacgataataaataatattgcccctaaaattactg

SEQ ID NO: 200003 - DNA, 235 bp, Unknown
  Bacterial polypeptide expressing nucleotide sequence isolated from the Sargasso Sea
atgaatataaaaaatgttgttgtcattggctcaggaacaatgggtagtggtattgctgcgcaattatgtaatgcaaacattcctgtgacattattagatcttaaaactgaaatttcagaaaaagcaaaaaagagaatttttgaatctaggcctcctttgctagttgataagagcaaaattgaaaacataaaagttggaaacatagatcaaaattttgatgttataaaaaagctga

SEQ ID NO: 200004 - DNA, 640 bp, Unknown
  Bacterial polypeptide expressing nucleotide sequence isolated from the Sargasso Sea
gttgacagcggagggagatgcgtctcaacaaaaagaagagcgcgcatcttatttatcagcggaggttaacttaggtaggcggtatttcataattggtgcgacaggcggggtggcttctgttggtgtggttggagctgccattccgtttcttcagtactggcagcccagtgccaaggctaaggcattgggagcaccagtcaaaatagatataagcaagcttcggcccggagagatattgagtccgattctttcttatcgagggcaaccagttttcgtgatttatagagatcaagagtctttggcacttctagaagaggacagtggaaggttggccgatccaaattcggaaagttcggaacagccagaatttgctttgaacccctatcgctcaagccgtccagagatcggtgtctttttgggaatttgtactcatttaggttgctcaccaaagcatcaagttgcgaatatttttccggactcagagcagggagggtttttctgtccgtgccatggctcgggatttgatttggcaggaagggtcgcagctggggtccctgcacccacgaatctaatcgtgcccccttaccgattttcttcagatacggaaattattgttggtgaattggaggctgacgcctga

SEQ ID NO: 200005 - DNA, 617 bp, Unknown
  Bacterial polypeptide expressing nucleotide sequence isolated from the Sargasso Sea
tatgagctttaacaaacaaatatatgatatttttattattggtggtggtattaatggggcaggtatagctagagatgctgctggtagaggattaaaagtttttttagcagaaaaaaataaagtgggatctgctacttcttcatggtcttcaaaattgatacatggtggattaagatatcttgaaaactatgagtttaaattagttaaagaatcattaaaagaaagagaagtcattacaagtattgccccaaccattacaaaacctctcccttttgttattccacattcaaaaaaattaagatcgaaattattaattagattgggtttatttttatatgataatcttggaggcaaaacaaaaataccaaaatcatcaaaaataaattttaataaaaaatatagtaatattttgaaatcacattttaaagttggttttcaatactatgatgttcaggtcgatgataaaaaacttgtagagatgaatattgaggatgcaaagaaaatgggcgctcaaattgtagaaaatagaaaagttataaacgcaaatagatcaaaaaaaggttgggaaatttttcttgataatgatgatgtagttaattctaaaattttaattaatg

SEQ ID NO: 200006 - DNA, 394 bp, Unknown
  Bacterial polypeptide expressing nucleotide sequence isolated from the Sargasso Sea
atgtcagaagataaaaaagtaaaaagaagagattttatatttacagcatcttatgcgcttggggcagtaggggtaggcgctgcagcatggccactaattgatcaaatgaatcctgatgcatcagaaagagctttagctagtactgaagttgacattagtggaattgaaagagggcaatcaattacagtcttgtggagaggtaagcctgtttttataaaaagaagaacggaagaagaaatacaaaaggctagacaagttgatcttaaggaattacccgatccagaaaaagacgaagatagagcaaagaatcccgaatggttagtgatgctgggtatgtgcacacacttaggatgtgttcctcttggaaacaagggcgaatacgaaggatggtttt

SEQ ID NO: 200007 - DNA, 865 bp, Unknown
  Bacterial polypeptide expressing nucleotide sequence isolated from the Sargasso Sea
aatgaataaatattatgatttgtttatcattggaggtggaattaatggtgcagggattgcaagagatgcaagtggtagaggcttaagcgtttatcttgcagaaaagggcaaagttggttctgcaacatcttcatggtcttctaaattaattcatggtggtttaagatatctcgaaaattataattttaaactagtaagagagtctttgaaagagagagaagttattacaaacattgcaccaaccattacaagacctttaccttttataataccttatacaaaaaaattaagatctaaattattaataaggttaggattgtttttgtatgataatcttggaggtaaatctaatatacctaaatcatcaaaaattaatttaaataaaaaatattctaaaatattacatcaaaaattttcatttggatttcaatattatgatgttcaagttaatgataaaaaattagtggaaatgaatattgatgatgcaaaaaaattaggagcaactattattgaagatagaaaagtgattaatgcttttagaattgatgatggttggaaaattattcttgataataatgaaataataaaatctaaaatacttataaatgcagcaggtccatggattaatgaagtagtcaataatgttattaaaattaatgctaataagtctataagattagtaagaggaagtcatataattataaacaagttgtatgaagaagaagttgcctttacattacaaaatgaggacaatagaataatttttgttatcccttataagaaaaaatattcacttattggaacaactgaagtagatgttaagacagctgacaatccatcaatttctgttgaagaaaaatatatt

SEQ ID NO: 200008 - DNA, 549 bp, Unknown
  Bacterial polypeptide expressing nucleotide sequence isolated from the Sargasso Sea
gcgtgggaggcgtagccaccgtcatacctttcgcggcgtcgcttgcgccgtccgcgaaagcgaaagcggccggtgcaccggtcgaagtcgacatcagcgggctgaagcccggtgaaatggtgaccgttccgtggcgcggcaagccggtgtggatcctgaaccgcaccgacgcaatgctggccgacgtggtcaaggccgacaaggaagtggccgatccgaccaccgaaaagccctatacgatgccgttgcccgcgtattgcgcgaacgaatatcgcgcgcgggccgatcgcaagaacattctcgtcgtgatggccgtgtgtacgcacctcggctgcacgccaagccaacgcttcacgccgggtccgcagccgaacctgccggacgactggccgggcggcttcctctgcccgtgccatggttcgacctacgacctcgccggccgtgtgttcaagaacaaaccggcgcctcagaatctcgacatcccgccctacatgttcacgtcggcaacgaccctcgtgatcggcaaggacgagaaaggagaagcgtgat

SEQ ID NO: 200009 - DNA, 765 bp, Unknown
  Bacterial polypeptide expressing nucleotide sequence isolated from the Sargasso Sea
tatgtcgtcaaagatgttgaaattcgtttcaaccgaaaaagcgatgcctgaaaaacgtttggccaaaaaccgcgtaggggatttcgaagagatttatgatgagtttgataagagcgaggccgaaacgcaggcgtcgcgttgttcgcagtgcggggttcctttttgtcaagtcaattgcccgttacacaataacatcccagactggctgatgatgactgcggaaggtcggatgcgggaagcctacgagttgtcttcgcaaacgaataattttccagaaatttgcggtcgaatttgcccacaagatcgattgtgcgaagggagttgcgtgattgaaaaggggtttgaatcggtaacgattggcgcggtcgaaaaacatatcaccgaaatcgccttttctgagggctgggttaaaccagtcgcgccacgcaacgagcggagggagacagttggtatcattggggccggtccggccggtttgtcggccgctgagatgctgcgtcatcgtggctatcaggtccatgtctatgaccggtatgatcgagttggcggcttgctgatgtatggtatccccggtttcaagcttgaaaagtcaatagtggagcggcgtggcaagcttcttcgtgatagtggtgtccacttccacctaaatgtggacgttggtgctgaaataagctttgaggacatttgggctgagcatgatgcgattcttttggctactggtgtttacaaggcgcgcgatattgccgctccgggaagcagccttaa

SEQ ID NO: 200010 - DNA, 395 bp, Unknown
  Bacterial polypeptide expressing nucleotide sequence isolated from the Sargasso Sea
attgtcagaaaaacaagtcacacgaagaaattttctttatgttaccacgggtgcatttgcagctgcgggagctgcttcattagcatggcctttcgttgaccaaatgaatcctgatgcatcagtcaaagcattagcatcaactgagattgatttaaggcccataatacctggacaaagcattactgtaatgtggaggggtaaaccggtatttattcgaaggcgaacacaggctgaaattgatgaagcaaagaaagtgaatttagctgatttaccgcacccagaagaagatagcgatcgagcacaaaatcctgagtggcttgttatggttggcatttgtacccatcttggatgtgtgccgcttggacaaaaaggtgactataatggttggttttgcc

SEQ ID NO: 200011 - DNA, 708 bp, Unknown
  Bacterial polypeptide expressing nucleotide sequence isolated from the Sargasso Sea
atgtgtggcgccacttggaaatactgggtggggttggaatgatgttttgccgtattttttaaaatctgaaaacaacgaactaggaaaaagtgaattccataatgatagtggaccaatatcagtagcaaataaaaaaataaatttaaaattacttgatgagtttcaaaatgctgctgaggaagttggaattcctaaaacaatagattttaacaaaggtgataattttggagttggtttttttcaatttacaacaagctacagcaagtttggtcttaaattaagatgtagtgctgctaaaggttacttaaatccagtaaaaaaaagaaaaaatttaaaaattttagttaatgctcatgttcaaaaactcaattttaataataaatctgttgagagtgtaagttttttcataggggataaattaaatcatattaaagtaaataaagaggttatcttatcagcaggcgcaataggatctccacatttattacaattatcaggcattggagatagtgataaaatcaaaaagcatggaatagaagttgtacacgaactaaaaggtgtaggaaaaaatttacaagatcatctaatgtttcgaccagtttataaattaaaaaatataaaatcactcaatagagatgttgagagtttatattcaaagtttttaatgggtcttcagtatattttaaaacaaagtggccctataacaat

SEQ ID NO: 200012 - DNA, 793 bp, Unknown
  Bacterial polypeptide expressing nucleotide sequence isolated from the Sargasso Sea
tttgagtaaaaagattgggattattggcgggggcatatccggactagtggtcggtatttttctagctaaagagggacatcaagtttctatatttgaaaaaaaatcacttctaagtgaaacaagttcaaaaacaaccaaattgctgcatggtggtcttaggtatctagaaaattttcatatcaaagaagtgcaaaaaggacttcatgacagatattggtggttaaaaaattttcctcaacacactaataaaattaagattttaataccatttaaaaatttattttctttagaattattcaaattttatataggtataaaattttatggctttttggcgggtaaaaagaaactaggaaaaagtaaactatctatacggaaggtttctcaagatataaatcttgataataattttaaagggcatctttctttttttgatggagtaatggatgatgaattacttggaaaagatttaattcatctagccaaagaattaaaaattaatttgtatgaaaataacgaggtatctaatttcgatatttatggaaatattgataataaaaaatttgataaggtaatattggctgttgggccttggacaaaaatattacttgagaagaataaaataaaaagtttgaaagatatcgattatattaaaggaagccaccttattcttaataagaaaataaaatcaggattaatgtttaaaggtgtttgtaaatccaggtatgtatttgcatttgcctataaaagattcactttattgggcacaacagaaggtaaaggtaaaatcgcc

SEQ ID NO: 200013 - DNA, 874 bp, Unknown
  Bacterial polypeptide expressing nucleotide sequence isolated from the Sargasso Sea
cgcctatttccagatgaccaaaagacgaggcgtcagatggaatgccacaaaagcatacttgcgcccagtggaaaatcgtcccaatttaacagtgctctctgatgtcttagttgagaaagttgaaatcgaagattcaagtcaaggagcaagagctaccggtgttaaagtttgtcgcaccgaagggtcaatgatatttaatgccgatagggaagtcatactctccgcgggagcaataggttctccgcaaatacttcagctatcaggggtcggaaattcagagcttttaagtaacagtaatattcctgtcaaagttgatctgccgggtgttggcgaaaatctgcaggatcaccttcaagttcgaagtgtttatcgagtcgaaaacacggtgaccttaaaccagaaggcaggctctctgattggcaaggcgcttatgggtctggaatatttcttatttaagactggccctcttactatgcctccatcacaactgggtgcatttgctaaaagcaatcccaatcgacctacaccaaatatagaatggcacgtgcaacctttatcgctcgacaaattcggcgatccgttgcacacgtttaacgcgatcacaccctctgtttgcaaccttcgtccaaccagcagaggacaagtaaaaatcagatcaaataatccggaagagcatccaacaatacaactgaattacctatctacccctgaagacgagcaagtagccgtagaagggctaagatttacaaggcaaatcatgcaggcgaaagccctgaaaaagtttgatccgattgaattaaaacccggaacagaaatacgaaccgacacacaactgctcgacgcagcgagagacctcgggactacaattttccat

SEQ ID NO: 200014 - DNA, 556 bp, Unknown
  Bacterial polypeptide expressing nucleotide sequence isolated from the Sargasso Sea
atgaaagcgatagatctattttcgggtgctggcggcttatctcttgccgcacatcaatgtggcattgatgtcatcgcagctatcgaactagatacagccgctaccgttacttatcaacgtaacctcattgaacgcctaaaagcgccaactaaattaattaatggcgatattaatgctgtcgacttgcccgccttaatgacagagttaaagctcaaaccaggaaaattggatttgctccttggtggcccaccatgtcaaggcttctcgactcatcggattaacggtgcaggtattgatgatccccgaaatcagcttctgttgaagtattttgattttgttgatggtttacgaccaaaagcgttcttgattgaaaacgtggcgggacttttatggaaacgccatgaaaactatctcaatcagcttctagccctcgcagaaacccatggctataccattcatttttgcgacattctcaatgctaaagactatggcgtgccacaaaaccgtaaacgtgtttttatctttggtacacgtaaagacctaaatattgatgctg

SEQ ID NO: 200015 - DNA, 850 bp, Unknown
  Bacterial polypeptide expressing nucleotide sequence isolated from the Sargasso Sea
attctggtcagcgctttcgggacacgtttcggcatccccatcctggtgatcttccttggcgtcggcatgctcgccggcaccgacggccctggcggcatcatcttcaacaactaccccctggcctatctggtcggcaacctggcgttggcggtgatcctgctcgacggcggcatgcgcacgcgggtctccagtttccgtgtggccctgtggccctcgctgtcgctggccaccgtgggggtgatgatcaccgccggcctgaccggcctggcggcagcctggctgttcgacctgaccctgctggaaggcctgctgatcggcgccatcgtcggctccacggatgcggcggcggtattctccctgctcggcggccgtggcctcaacgaacgggtcagctccaccctggagatcgaatccggcagtaacgacccgatggcggtgttcctcaccatcaccctgatcgccatgctcgccagcggccagaccggtttcagctgggacctgccgatccagctggtgcagcagttcggcctcggtaccctgctgggcctgggcggcggctggctgctgctcaacctgatcaaccgcatggagctggccaccggcctgtatccgctgctggtggtcagcggcggcctgatcatcttcgccatcaccacggcggtggggggcagcggcatcctggccatctacctgtgcggcctgctcctgggcaatcgcccgattcgctcgcgccacggcatcctgcacatgctcgacggcctcacctggctggcacagatcggcatgttcctggtactcggtctgctggtcacgccgcacgagttgctgcccatcgcgttgccggcgctgg

SEQ ID NO: 200016 - DNA, 780 bp, Unknown
  Bacterial polypeptide expressing nucleotide sequence isolated from the Sargasso Sea
aatgaaagcgatagatctattttcgggtgctggcggcttatctcttgccgcacatcaatgtggcattgatgtcatcgcagctatcgaactagatacagccgctaccgttacttatcaacgtaacctcattgaacgcctaaaagcgccaactaaattaattaatggcgatattaatgctgtcgacttgcccgccttaatgacagagttaaagctcaaaccaggaaaattggatttgctccttggtggcccaccatgtcaaggcttctcgactcatcggattaacggtgcaggtattgatgatccccgaaatcagcttctgttgaagtattttgattttgttgatggtttacgaccaaaagcgttcttgattgaaaacgtggcgggacttttatggaaacgccatgaaaactatctcaatcagcttctagccctcgcagaaacccatggctataccattcatttttgcgacattctcaatgctaaagactatggcgtgccacaaaaccgtaaacgtgtttttatctttggtacacgtaaagacctaaatattgatgctgctaattttccgccagcagcgacacacttctcgccgtctagtaataaatcaccttactggaaaacggcctcaactgtatttgaaaaaataccagcagaccttatcgagcaatatattgaagagtattttcgaccaaaaactaagcttgcagatgatgaagcaagagatctcctactcaacctagaatatggtgaagccgtaaaagagggtgatccttgtaacat

SEQ ID NO: 200017 - DNA, 500 bp, Unknown
  Bacterial polypeptide expressing nucleotide sequence isolated from the Sargasso Sea
gcgcgtggcggcagcctgccaatttgtctcttattggtcccccagtgaaaaagcaaaggctttgggagcgccggtcaagattgatgtttcaaaactccaaccaggagaaatgttgacccctgtcgttgcatggcgaggaaagccagttttcatagtaaggcgaacagaagctatgctgaaatcactcaaagagacaactctctccttagccgatccgaattcagaaaacgcggaaatgcaacctgactttgcagtcaacccatggcgttcctcaaatcctgaatttgctgtactacttggcctttgtacgcacttggggtgctctccgaaactagtgagtgttgcgaattttgaagacgcgtctggagggttcttctgcccttgccatggatcaaagtttgatctagcgggcagagtggtagctggagtcccggctccaacaaacatggaggttcccccttaccggtttgagtctgagaacgtcatcgtagttggctaga

SEQ ID NO: 200018 - DNA, 376 bp, Unknown
  Bacterial polypeptide expressing nucleotide sequence isolated from the Sargasso Sea
tttgtcagacaaacctgttacaagaagaaactttttgtacatcacaaccggaacatttactgccgctggagctgcttcattggtatggccttttgtagatcaaatgaatccagatgcatcagtaaaagctctggcttcaacggaagttgacttaagacctattgcgctaggccaaagtattacggttttgtggagaggtaagcctgtttttattagaagaagaactcctgaggagatatcagaagctaaagctgtatctctagatgaattaccggatcctcaagatgattcagcaagggctaaaaacccagagtggctggtaatggtaggaatatgtacccatttgggatgtataccactttggtcaaaagggtga

SEQ ID NO: 200019 - DNA, 523 bp, Unknown
  Bacterial polypeptide expressing nucleotide sequence isolated from the Sargasso Sea
tatgtcagaagaaaaaacaattccaaatgcagctgttggctcatcgccagagaatgcgtttaaagtccctgatagcgatagacgtagtttcctaagctggttatctgtaggttggttagcatatattggtgttacaggaggtttttttactatcatcgttagattcttatttcctaatgtcctttttgagccacctcaaacatttaaaattggattccctgatgatttttcaacaaattccgtggatataaagttcaaaaaacaattcaatgcttggattgttagggatgaagaatctatttttgctctttcgacagtttgtacacaccttggttgcactccaaactggttgcctgtggaatcaaaattcaaatgtccttgccatggtagtggatttcggatgacaggtatacatttcgaaggccctgctccaagacctttggaacgttttaaaataagcctagcgaatgatggtcaaattttagttgataaaacaaaaagttataaatggggaaaaaggtga

SEQ ID NO: 200020 - DNA, 797 bp, Unknown
  Bacterial polypeptide expressing nucleotide sequence isolated from the Sargasso Sea
agaagttgtaaaggcttatgctgatagggaagtaattgtatgcggaggtgctattaactcgcctcaaatattacaactatcaggtatcggcaaaggggattacataaaaaaatggggattaaaagttgtagcagatctaccaggagtaggtgaaaacctacaggatcatttagatgtattatctcactacgagtgtacgcagccagtaactgaagcgaaatatacagcgggtggacttgctgtttttagaatggccgcaattttagctcaatggatgataactaaaaaagggccaggaaatgatattggtttatcaggtgtatcatttttaaaaacagatgacacgcttgaccttccagacattcaaatgcactttattggatcacttttaaaagaccatggaaagacaagacctgattcacatgcttttagtaatcacgtgtgcatgcttagacctgaaagtaggggctacattgccctaaaatctcttgatccgacagtacctccgattatacagccaaattattttgcaactcaaaaagatcgagacactcttataaaaggtgtaaaaatgtctcgagaaatcatgaaccagtctgcttttgatgaataccgaggtaaagaaatgacacccggtgttcatgttcaaacggatgctgaaattgaagaatttataagaaatgctgcagaaacaatttatcatccagttggtacctgtaaaatgggcagtgatgaatttgcagttgtagacgataaattaagggttagaggagtcgaaaatttaagagtgatcgatg

SEQ ID NO: 200021 - DNA, 556 bp, Unknown
  Bacterial polypeptide expressing nucleotide sequence isolated from the Sargasso Sea
aatgaaagcgatagatctattttcgggtgctggcggcttatctcttgccgcacatcaatgtggcattgatgtcatcgcagctatcgaactagatacagccgctaccgttacttatcaacgtaacctcattgaacgcctaaaagcgccaactaaattaattaatggcgatattaatgctgtcgacttgcccgccttaatgacagagttaaagctcaaaccaggaaaattggatttgctccttggtggcccaccatgtcaaggcttctcgactcatcggattaacggtgcaggtattgatgatccccgaaatcagcttctgttgaagtattttgattttgttgatggtttacgaccaaaagcgttcttgattgaaaacgtggcgggacttttatggaaacgccatgaaaactatctcaatcagcttctagccctcgcagaaacccatggctataccattcatttttgcgacattctcaatgctaaagactatggcgtgccacaaaaccgtaaacgtgtttttatctttggtacacgtaaagacctaaatattgatgct

SEQ ID NO: 200022 - DNA, 229 bp, Unknown
  Bacterial polypeptide expressing nucleotide sequence isolated from the Sargasso Sea
atgaaagatatttacgatatatttataataggtggaggcataaatggtgctggtatcgctagagatgcttctggaagaggacttaaagtatatttagtagacaaaggtaaagtaggaagcgctacttcttcttggtctaccaagttaattcatggaggtttaagatacttagaaaattatgaatttaaactagttagagaatcattaatgaaagagaagtcattcgtaa

SEQ ID NO: 200023 - DNA, 795 bp, Unknown
  Bacterial polypeptide expressing nucleotide sequence isolated from the Sargasso Sea
gatcattggcgtcaattagggaattcaggatggggctgggacgatgcattaaaattctttaaaaaatctgaactgcattttggcggtggagatgaggttcatggtgccgatggtgaatggcgagttgaggaacaaaggttatcatgggaaatattagacgctttcagagaagccgccgcccaaacaggaataccaaaaattgatgactttaaccggggcgataacgaaggctgcggttacttctcggtcaaccaaaataaaggcgttagatggagtgcggccgacgcatttttacatcctgttaaaacgcgctctaacttaacaattttgacgcaggcacatgttgaaaaaataaaatttcatgaacaccaagccaaggagattaattttctactaaaggggcaacgttctttagccgcggtcaaaaaggaaattattcttgcatcaggagcagttggatctccacaaatcttgcaaacatctgggattggtccaggtgaacttttaagagatcttgatataaaacctgtaagggaactccccggggttggagaaaatttgcaagatcacctgcaaatgcgactggtattcaaagtgaaaaataccagaacgctcaacttgagggcaaatagtttaattggccgcattgggatgggaatggaatattttatattcaaacgaggtccaatgacgatggctcctagccagctaggcggttttgctaaatctgatccatctatagaatccgcaaacttgcagtatcacattcagccactatcgactgaaaagcttggc

SEQ ID NO: 200024 - DNA, 185 bp, Unknown
  Bacterial polypeptide expressing nucleotide sequence isolated from the Sargasso Sea
gatggaaacacaaaatattaaatatgatatttttataataggtggtgggataaatggcgctggaatcgcaagagatgccagtggtagaggtttaaaagtttatttggcagaaaagggaaaggtaggttctgcaacatcttcttggtcatctaagctaatacatggtggtttaagatatttagaaa

SEQ ID NO: 200025 - DNA, 394 bp, Unknown
  Bacterial polypeptide expressing nucleotide sequence isolated from the Sargasso Sea
ctgaaccgcacggacgcaatgctggccgacgtggtcaaggccgacaaggaagtggccgatccgaccaccgaaaagccctatacgatgccgttgcccgcgtattgcgcgaacgaatatcgcgcgcgggccgatcgcaagaacattctcgtcgtgatggccgtgtgtacgcacctcggctgcacgccaagccaacgcttcacgccgggtccgcagccgaacctgccggacgactggccgggcggcttcctctgcccgtgccatggttcgacctacgacctcgccggccgtgtgttcaagaacaaaccggcgcctcagaatctcgacatcccgccctacatgttcacgtcggcaacgaccctcgtgatcggcaaggacgagaaaggagaagcgtgat

SEQ ID NO: 200026 - DNA, 509 bp, Unknown
  Bacterial polypeptide expressing nucleotide sequence isolated from the Sargasso Sea
aatgatacctaacgctgctgttggatcatctgcggagaacgcctttaaaggtcctgagacagatagacgaggatttttaagttggctttcagttggttgggtagcctatcttggagtgactggtggattttttacaatcatcgttcgcttccttttcccaaatgtgctatttgaaccgccacaaactttcaaaattggatttccagaagatttctcaaaaaattctgttgatatcaaatttaagaaatcctttaatgcatggattgtaagggacgaagaatcaatttttgccttatctacagtatgtacgcatcttggatgcactccaaactggttacctgtcgaatcaaaatttaaatgtccatgccatggcagtggttttagaatgactggagtacattttgaaggacctgctccaagaccgcttgaaagatttaagataggacttgccaatgacgggcagatcctcgttgataagactaaaagttataaatgggaaaaaggcgagt

SEQ ID NO: 200027 - DNA, 687 bp, Unknown
  Bacterial polypeptide expressing nucleotide sequence isolated from the Sargasso Sea
atgggtaatattggttggggatggaaagatgttttaccttattttttaaaatcagaaaacaatgaattaggaaaaagtgaatttcataatgataatggcccaatatcagttgtaaataaaagaataaaattaaaaattttagatgaatttcaaaatgctgctgaagaaaaaggtattcccaaaactgaggattttaataaaggagataattttggatgtggttattttcagtttacaaacaaaaaaagtggttttaggtgtagtgcatcagtaggttatttaaatcctgttaaaaaaagaaataatttgaaaattattgtaaatgcacatgttcaaaaaattaattttgaaggtaaaaaagctataggattatcttattataaaggagaaaagttaattactgtaaaagctaataaagaagttattctttctgcgggcgctataggttcgccacatattttacaggtatctgggattggtgagtcaaataagttaaaagatcaaggtataaaaattgttcatgaattaataggtgttggtaaaaaccttcaagaccatttaatgtttagaccaatttataaagtaaaaaatattaaatctttaaacaaaaaaattaacagtatatttggcaaattactaataggaatggaatatgtttttaaaagaagtggccctatgactatgggt

SEQ ID NO: 200028 - DNA, 568 bp, Unknown
  Bacterial polypeptide expressing nucleotide sequence isolated from the Sargasso Sea
atgaatgaaatttttgatattttagttattggagggggtattaatggcgctggaattgtaagagacgcctcaggaagaaatttaaaagtttgtttggttgaaaaaaatacagttggctcagccacttcgtcttggtctacaaaattaatacatggtggattaaggtatcttgaaaattatgaatttcgccttgtacgtgaatctctaaaagaaagagaagtaattaaaaaaattgccagtaatataacaacaccattgccttttattataccacatcaaaaatctttaagacctaaatggttaattaaattaggattatttttatatgataatattggtggcaaaatgactataccaaaatcttcaactataaatattaaaaaggaaattcctaatattttaaaagatcaatttaaaattggtttccaatattatgatttacaagttgatgataaaaaacttgttcagttaaatgtagaagatgcaaagaaaaaaggtgctatgattattcaaaatagaaaagttatagatgcaaaacgaaataaaaatatttgggatataacttgag

SEQ ID NO: 200029 - DNA, 904 bp, Unknown
  Bacterial polypeptide expressing nucleotide sequence isolated from the Sargasso Sea
aaaggtattccaaaagttaatgattttaataaaggtgataattttggttgtggttattttcaagttactgaaaaaaatggccttagatgtagtgctgcagtaggttatttgaaccctataaaaaatagaaaaaatttaaaaattcaaacgaattgccttgttcaaaaaattaattttgatggtacaaaagctataagtgtatcatttttaaaaaataatcaattaattactgtaaaagttaataaagaaattatattaagtgcaggctctattggatctacacaaattttacaaacatctggtgttggtgatggaaacaaactatcaaaacttggaattaaaataattaaagatttaaaaggtgttggtcaaaatttacaagatcatttaatgtttaggccagtatttaagataaaaaatatcaaatccttaaataaaaaaataaatagtttgtttggaaatctattgattggattggaatttatttttaatagatctggaccaatgacaatgggggcaagtcaactttgcttgtttgcaaaaagtgacacatcaagagaaactcctaatttacaatttcatgttcagccaattagtacagataagttgggtggagctgcacttcataactttcatgcttttacccctactgttgcaaatataaggcctacaagtcggggtgaaataaatgtagtcagcagtgatagtagagaaaaaccaaaaattaagatgaattacttatctacagaagatgatcgaaaagttgctgcagatggattgaggttagttagagatattgtgttcaagactcaaacatttaaaaaatatgatccagaagaattaagacctggacctcaatttcagtctgatgaggaactcgtgaagaaggaagtaaattactcaa

SEQ ID NO: 200030 - DNA, 760 bp, Unknown
  Bacterial polypeptide expressing nucleotide sequence isolated from the Sargasso Sea
atgaaaaatttatatgatctttttattataggtggtggaattaatggtgctggaatcgctagagatgctgcaggaagagggctaaaagtttgtcttgttgataagggattagttggaagcgcaacttcatcatggtcctctaaactaattcatggaggtttgcgatatttggaaaattatgaatttaaacttgtaagagaatcattaatagaaagagaggtcattaaacgtatagcttctgaaataacaaaaactataccttttattattccatataattcacaaattagatctaagttattaattaagattggtttggcattatatgataatttaggaggtaaaacatcaataccaaaatcatctacaatcaatttaaatgaaaattatcaagatatattggaaaatgagttttctgtaggttttaaatattttgatttgcaggtagatgataaaaaattaactgaaatgaatgtggctgatgctaaaaaaaatgatgcagtaatttttgaaaatactaaagtcatctcagcttctagaaacaaaaataattggattataaaacttaataataataaaataatagaatcaaaaattttaattaatgcttcaggcccatggattaacgatgttattaaaaatgttattaagatcccatcaaaaaaagatattcgtcttattaaaggaagtcatataataacaaaaaaattatatgaccatcaagtagcttttactcttcaaaattttgataaaagaatca

SEQ ID NO: 200031 - DNA, 550 bp, Unknown
  Bacterial polypeptide expressing nucleotide sequence isolated from the Sargasso Sea
tggcgtgggaggcgtagccaccgtcatacctttcgcggcgtcgcttgcgccgtccgcgaaagcgaaagcggccggtgcaccggtcgaagtcgacatcagcgggctgaagcccggtgaaatggtgaccgttccgtggcgcggcaagccggtgtggatcctgaaccgcaccgacgcaatgctggccgacgtggtcaaggccgacaaggaagtggccgatccgaccaccgaaaagccctatacgatgccgttgcccgcgtattgcgcgaacgaatatcgcgcgcgggccgatcgcaagaacattctcgtcgtgatggccgtgtgtacgcacctcggctgcacgccaagccaacgcttcacgccgggtccgcagccgaacctgccggacgactggccgggcggcttcctctgcccgtgccatggttcgacctacgacctcgccggccgtgtgttcaagaacaaaccggcgcctcagaatctcgacatcccgccctacatgttcacgtcggcaacgaccctcgtgatcggcaaggacgagaaaggagaagcgtga

SEQ ID NO: 200032 - DNA, 574 bp, Unknown
  Bacterial polypeptide expressing nucleotide sequence isolated from the Sargasso Sea
gctgattgcgacatccgtagcaggtggcgtgggaggcgtagccaccgtcatacctttcgcggcgtcgcttgcgccgtccgcgaaagcgaaagcggccggtgcaccggtcgaagtcgacatcagcgggctgaagcccggtgaaatggtgaccgttccgtggcgcggcaagccggtgtggatcctgaaccgcaccgacgcaatgctggccgacgtggtcaaggccgacaaggaagtggccgatccgaccaccgaaaagccctatacgatgccgttgcccgcgtattgcgcgaacgaatatcgcgcgcgggccgatcgcaagaacattctcgtcgtgatggccgtgtgtacgcacctcggctgcacgccaagccaacgcttcacgccgggtccgcagccgaacctgccggacgactggccgggcggcttcctctgcccgtgccatggttcgacctacgacctcgccggccgtgtgttcaagaacaaaccggcgcctcagaatctcgacatcccgccctacatgttcacgtcggcaacgaccctcgtgatcggcaaggacgagaaaggagaagcgtga

SEQ ID NO: 200033 - DNA, 912 bp, Unknown
  Bacterial polypeptide expressing nucleotide sequence isolated from the Sargasso Sea
acgaaatctattaccaataagcttttatttgatggaaataaatgcgttggtttagaatatttaaaaggtaaaaacataaataaagtttttgcttataaagaggttattgtttgtggtggtgctattaattcaccacagatattacaattatctggaattggaaaaggtgattacataaaaaaatggggcttaaatgttgtagctgacttgccaggagtaggtgaaaatcttcaagatcacttggatatattatcgcattatgaatgtacacaaccggtaactgaagcaaaatataccgcaggcgggttagcaatatttagaatggcatctattctaggacaatggttagtgactagaaaaggaccaggtgttgacattggactttcaggcctatcattcttaaagacagatgatagtttagacgtaccagacattcaaatgcattttgttggttctttattaaaagatcatggaaagacaagacctgactctcatgcgtttagtaatcacgtatgtatgttacgtcctgaaagtagaggctatattgcattaaagtctctaaatcctaaagttcagccaattattcaacctaactattttgcaacgcaaaaagatagagatactatgatcaagggtgtcaaaatgtctagggaaattattaatcaaaaggcttttgatgaatatcgtggtaaagaaattaatccaggtgatcatgtacagactgatcaagaaattgaagaatttattaaagggcacgctgaaacaatctatcatccagttggaacctgtaagatgggtagtgatgaatttgctgttgtcgatgatcgacttaaagtcagaggtgttgaaaacttgagagttgtagatgcaagcgtaatgcccactctgattggcggaaacactaatgctccg

SEQ ID NO: 200034 - DNA, 634 bp, Unknown
  Bacterial polypeptide expressing nucleotide sequence isolated from the Sargasso Sea
gatgagcaatgtatctgtagatgcaacagagtctgcacacaatgaaaaccagccagaaaacaacactcgtcgtcggttcttgaccgttgccacgtcggtagttggtggtgtaggtgtcgttggtgctgctgtgccttttattgcgtcctggaatccaagcgccaaagcgaaagccgccggtgctgacgttgaagtagatatcagcgggattgagcctggacagttagtacgtgtgatgtggcgaagcaagcctgtgtggattgtacgtcgtacgcctgaaattcttgaagaactaggcgcgcacgaagataagctgaaagatcctaactctgaagctgagcagcagcctgcctttgctcaaaaccgtttccgttcaatgaaggaagagtaccttatccttgttggtatctgtactcacctgggttgttctccacagcatcttaaagacggtgcatttgaagaagtggttgaaggcgttccagatggattcttctgcccgtgccacggttcgaaattcgacatggctggacgtgtattccaaaacgttcctgcaccgttgaacctggttgtaccgccatatcaattcgttgatgacaataacatcatcatcggttcagaagcggaggccgtgtaa

SEQ ID NO: 200035 - DNA, 442 bp, Unknown
  Bacterial polypeptide expressing nucleotide sequence isolated from the Sargasso Sea
ctgggctttgctgctgcaactggcggtttttttacggttattattcggtttctttttcctaatgttctatttgagccacctcaaacttttaaaattgggtatccagaagaatttgctccaaataccgtagacactagatttaaaaaggaatttaacgcgtggatagttagagatgatgaatccttatttgcgctatctactgtttgtactcatttagggtgtacaccaaactggcttgcaactgacaataaatttaaatgcccttgccacggtagtggtttcagaatgacaggtatccactttgaaggtccagctcctagacccctagaaaggtttaagataggtattgcaaatgatggacaggtgcttgtggataaaaccaaaagcttcaagtgggaaaaaggtgagtgggaaaataaagactcttatctgaaagtttaat

SEQ ID NO: 200036 - DNA, 889 bp, Unknown
  Bacterial polypeptide expressing nucleotide sequence isolated from the Sargasso Sea
actaatagaagcaggggggtcaggaaaaagtttattcactcaaatgcccggtggtaacggatacatttttggaaaccctaaatttgattggtgttttgaatcaatacctcaaccttctctaaataatagaaaaattttataccctagaggtaaaggactaggaggatcatctcttttaaatggtatgatttacatgagaggtgctccaggtgattttaatagatggagacaaaagggcttagagggttggtcatataatgatgtattaccatatttcaaaagatctgcttcatcttttcatagagaaaaaaatgaatatcactcacattcaggtcctttaaaacttacaccagctggtaattttaattctatcgataaagcatttattgatgcatgtgttgaggctggggcagaaattaataatgatttttataatggcaatctaaatggagtaggccgatatgatgttaaagtatggaacggaaaaagacaatcatctgctgaagcttatttgaaatttaaacctagcaacttaacaatttataaaaatacatctgtaataaaaattttaattgagaaaaataaagctaaaggattacttttatcaaatggtgaagtttatgcatcatcagagataatattatctttaggagcattcggtagccccaaatgtttaatgttgtcaggaattggcccagaagaacatttaaaagaaaaaaatatagaattattaattaacttacctggagttggtgaaaactttcacgatcatcctgttatgccaatgaattgggcttttcaaaacaacaatttaagtttctctaaatatcaaagaatcgatagagctattattgttggattaaaatatattttatttaaacaaggatta

SEQ ID NO: 200037 - DNA, 796 bp, Unknown
  Bacterial polypeptide expressing nucleotide sequence isolated from the Sargasso Sea
aaattggatttgctcctgtggtggcccaccatgtcaaggcttctcgactcatcggattaacggtgcaggtattgatgatccccgaaatcagcttctgttgaagtattttgattttgttgatggtttacgaccaaaagcgttcttgattgaaaacgtggcgggacttttatggaaacgccatgaaaactatctcaatcagcttctagccctcgcagaaacccatggctataccattcatttttgcgacattctcaatgctaaagactatggcgtgccacaaaaccgtaaacgtgtttttatctttggtacacgtaaagacctaaatattgatgctgctaattttccgccagcagcgacacacttctcgccgtctagtaataaatcaccttactggaaaacggcctcaactgtatttgaaaaaataccagcagaccttatcgagcaatatattgaagagtattttcgaccaaaaactaagcttgcagatgatgaagcaagagatctcctactcaacctagaatatggtgaagccgtaaaagagggtgatccttgtaacatcacaatgcggccaacacccaaaatgattaggcaatttgaagccacacctttaaatggaagccgcgaagacgctggcgaagaatttaggctgccctgtcattcaaatggatataaaggtcataaagacgtatatggccgagtaatgatccacttaccaagtaataccatcactaccggatgtaacaatccctctaaaggccgttttgttcatccttggaaaaaccaaggtatgacacta

SEQ ID NO: 200038 - DNA, 523 bp, Unknown
  Bacterial polypeptide expressing nucleotide sequence isolated from the Sargasso Sea
atggctgaggcaaaagaaaaaaaagaatcagaagtagatactatttggtcacggcgtgattttttctctttagctggatggggaagtttcatggcagctctaggtctatcatctctctatttcgcaagacttttatttccccgtgttctttttgagccctctccaatttttaaggcgggttaccctagtgactataccgtaggcgctgtcagcacaaaatatattaaagatcagcgagtttggattgttcgcgatgaagaaggaatttatgttatttatggattatgcactcatttaggttgtacccctagatggcttaatacagagcgtaaatataaatgtccttgtcatggaagtggttttactcaagagggaattaatttcgagggaccagcgcctcgacctttggaacgtttgaaaatttcattagcccccgatggacagataatcgttgataaaagtaaaaagtttctttgggaaaaaggtcaatggggacaaccaggttcaaaacttctggtttaac

SEQ ID NO: 200039 - DNA, 835 bp, Unknown
  Bacterial polypeptide expressing nucleotide sequence isolated from the Sargasso Sea
gattatgataactggagacagcaaggaaatactggatgggggtgggatgatgtgcttccatatttcttaaaatcagaagataatgaattaggaaaaagtgaatttcataatgataaaggtccaattacagtatctaacaaacaaataaatttagatatgttggaagaatttcaaaatgctgcagaagaaataggtataccaagaactaatgattttaataagggtgataattttggaattgggtattttcaattcactaccagtcgtcaaaagttattaaaattgagatgcagtgctgctaaaggatatttaaaccctgtaaaaaaaagatcaaatttaaaaattattgttaatgctcatgttcaaaaaataaattttgaaggaaaaaaagcagttggagtaagttattacactggagataaattaaattcagtaaaaacaaaaaaagaagttttgttatcagctggttcaatcggatctccacatattttacaagtttctggtctaggtgacgggcaaaaattaaaaaaacacggtatagatgttattcatgaattaaaaggcgttggtaaaaatttacaagatcacttaatgctaagacccgtttataaagttaaaaatttaaaatcattaaatagtaagattaatagtttgtttggaaattttttaataggattagaatatgtctttaaacaaagcggccctatgacaatgggcgcaagccaagtatgtggttttgtaaagagtgatccatcaagagcaacacctaatttgcaatttcatgtccaaccaattagtacagatattttaggcgcaactaaaatgcatgactttg

SEQ ID NO: 200040 - DNA, 244 bp, Unknown
  Bacterial polypeptide expressing nucleotide sequence isolated from the Sargasso Sea
tattttattgccgtctgtatttgtacccacctaggatgttcaccaacttatttaccagattcatttggtgagcaagttcaaggcgtgacttctggtttcttctgtccatgtcatggttctaagttcgatatggcgggccgcgtattccaaggcgttccagctccattgaacctagttatccctccacatcaatacgttgatgatggcaccgttatcatcggtgtagataaaggagtggcgtaat

SEQ ID NO: 200041 - DNA, 556 bp, Unknown
  Bacterial polypeptide expressing nucleotide sequence isolated from the Sargasso Sea
atggcagaagaaaaaatagtaccaaaagctgcgataggatcatccgcggaaaatgcatacaaaggtcctgagactgatcgaagagggtttatcagctggctttcatttggttggctagcttacttaggcgtcacaggtggcttttttacaatgattgttagattcttattcccaaatgttttgtttgagcctcctcaaacatttaaaatcggttacccggatgacttttcaaagaattctgttgatattaagtacaaaaagcaattcaatgcctggattgttagagacgaggaatcaatatttgcattgtctactgtttgtacgcaccttggatgcacgcctaattggctgccggtggaatcaaagttcaaatgtccttgtcatggtagcgggttcaggatgacaggaatccactttgagggtcctgctccaagaccattagaaagatttaaaattggactcgcaaacgatggtcaaatccttgttgataaaaccaagagtttcaaatgggaaaaaggtgaatgggagaatccagagtcctttctcaaagtttaaa

SEQ ID NO: 200042 - DNA, 523 bp, Unknown
  Bacterial polypeptide expressing nucleotide sequence isolated from the Sargasso Sea
atgaacgttgataaacaaatatatgatatttttattattggtggtggaattaatggggcaggtatagctagagacgcttcaggtaggggattaaaagtttttttagctgaaaaaaataaagtaggatctgcaacttcttcatggtcttcaaaattaatacacggtggattaagatatctagaaaattatgagtttaaacttgtaagagagtcattgatagaaagagaagtgattactaaaattgcaccaaaaattaccaaacccataccttttataattccacatacaaaaaaattaagatcaaaattgttaattaggttaggtttgtttttgtacgataatcttggaggtagaacaaaaatacctaagtcatcaaaaataaatttcaataaaaaattcacaaatatcttacaatctcattataaagttggctttcaatattatgatgtgcaagttgacgataaaaaactggttgaaataaatattaatgatgcaaaaaaattaggtgcaaacgttatagaga

SEQ ID NO: 200043 - DNA, 958 bp, Unknown
  Bacterial polypeptide expressing nucleotide sequence isolated from the Sargasso Sea
attaaaatgtctaaaatattcgatttattcataataggtggcggtataaacggtgcaggtattgcaagggatgctgcaggtagaggtttatcagtttgtttagctgacaaaggtgagattggtggagcaacttcatcctggtcaacgaaattaatacatggtggtcttcgttatttagaaaattatgaattcaaattagttagagaatctttaaaagaaagagaaattgtttataaaattgctaaacatatttcaaaacccattccttttataattccttatgcagataaaattcgaccagcctggttaattaaaattggtttatttttgtacgataatttaggtggcaaaagtaatataccaaaatcaaaaacatttgatcttagaaaaaaattttcaaatattcttaaagaaaaatacaaaaccggttttcaatattttgatatacaaattgacgataaaaaattaacgaaattaaataccaaagatgcaaaaagaaataacgctaaaatactagaatacaacaaagttaaaaaagctgaaattattggcaatgaatggattattagtcttgaaaatggtgaaaaagtaaagtcaaaaattttgattaatgcatctggaccgtggataaatgaaaccttaaataaaaatataaaaattaaatctaagaaaaaaattagattggttaaaggaagtcatattattacaaaaaaattgtacaaagaaaatgttgcgttcacatttcaaaatactgataaaagaataatatttgtaataccttataaagggaagttttctttaattggaacaactgaagaagaggtgaaatcacctgaaaataaaggaatatcaaaaaaagaaattagatatttaattagttcagtaaataattacttaaaaaaacaaataacatcaaaggacatcgtagatacatattctgggataagacctctaatga

SEQ ID NO: 200044 - DNA, 253 bp, Unknown
  Bacterial polypeptide expressing nucleotide sequence isolated from the Sargasso Sea
gaagagtttttagtagtaattggaatttgtactcatcttggatgctcaccaagttttgtattgaaaggtgaaggtgcgagcatttccgtggattggaaaggcggatttttttgtccttgtcatggctcgagatttgacctagctgggcgtgtatttaaaggcgttcctgccccacgaaatttagtaatccccccttataaatttatttcgccaactcgcttattaattggcgatgatagtgaggctgtttaat

SEQ ID NO: 200045 - DNA, 730 bp, Unknown
  Bacterial polypeptide expressing nucleotide sequence isolated from the Sargasso Sea
cggcttatctcttgccgcacatcaatgtggcattgatgtcatcgcagctatcgaactagatacagccgctaccgttacttatcaacgtaacctcattgaacgcctaaaagcgccaactaaattaattaatggcgatattaatgctgtcgacttgcccgccttaatgacagagttaaagctcaaaccaggaaaattggatttgctccttggtggcccaccatgtcaaggcttctcgactcatcggattaacggtgcaggtattgatgatccccgaaatcagcttctgttgaagtattttgattttgttgatggtttacgaccaaaagcgttcttgattgaaaacgtggcgggacttttatggaaacgccatgaaaactatctcaatcagcttctagccctcgcagaaacccatggctataccattcatttttgcgacattctcaatgctaaagactatggcgtgccacaaaaccgtaaacgtgtttttatctttggtacacgtaaagacctaaatattgatgctgctaattttccgccagcagcgacacacttctcgccgtctagtaataaatcaccttactggaaaacggcctcaactgtatttgaaaaaataccagcagaccttatcgagcaatatattgaagagtattttcgaccaaaaactaagcttgcagatgatgaagcaagagatctcctactcaacctagaatatggtgaagccgtaaaagag

SEQ ID NO: 200046 - DNA, 592 bp, Unknown
  Bacterial polypeptide expressing nucleotide sequence isolated from the Sargasso Sea
gatgagcaatgcgcctgtagacaatggccgacgtcgctttttaaccatagctacctctgttgttggtggtgttggtgcggctggggctgctgttccttttattgcgtcttggaatccaagtgagcgagctaaatctgcgggtgcgcctgtagaagtagatataagcaaacttgagccaggacaattaatacgtgtcgagtggcgtggtaaacctgtatgggttgtatcacgaaccccaaaaatgcttgagcaaatgaaagaacacgaaggtcaacttcgtgatccgcaatcgcaagagccacaacaattagaatcatcaacaaatgactaccgttcattacgtccagagatttttgtcgctgtaggtatttgtacgcatttaggatgttcacctagctttttacaaggtggctttggtgaaaaagtggaagggactgatgatggtttttattgtccatgtcacggttctaaatttgatatggctggccgtgtttttcaatcggttccagcaccattaaacttagaaattccaccatatacttttcttgatgaaaccactattttagtgggcgaagaaacaggggtggcctaa

SEQ ID NO: 200047 - DNA, 541 bp, Unknown
  Bacterial polypeptide expressing nucleotide sequence isolated from the Sargasso Sea
ttggaggcagcaagagctggaacgaaaccgggtccgacaagtaaagcggaagccccagctttttcaaaacctactgcgaagcccgcagcaaaaaaagtcgccaaggcccctcctcgccctgttccgccacggccagctcgtgaaaagacagtgaaggcgagcaaagtatcgaaaactgaagaacgaaggggtttcctggcttacacagttggttcattcatggcggttgggttcacggcactgtcggtaacgggtgggcttttcagtatgggcctcgcgaggttcctctttccaaacgtgcttgcagaaccgccaagtagtttcaaagttgggagtaaggaaggatttccttccggagtagttgaaacaaaatttgttgcccagtatggcgtgtgggttgtgaacgcagactttgagggtgtccagcagatatacgccctcaaaactgtatgcacgcaccttggttgcactccaaactggctcgaggctgagcaaaaattcaagtgtccttgtcacggcagtgggtttacaaagacggaat

SEQ ID NO: 200048 - DNA, 418 bp, Unknown
  Bacterial polypeptide expressing nucleotide sequence isolated from the Sargasso Sea
atgaatataaaaaatgtggttgtcattggctcgggaactatgggaagtggtattgcggcacaattgtgtaatgctaatgtaccggtaactttattagatttaaaaacggaaatttcagaaaaggccaaaaaaaggatttttgaatctagacctcctttgctaattgataaaagcaaaattgataatataaaagttggaaatataaatgaaaactttgattctgttacaaaagctgattgggtcgttgaagcagtggttgaaaggatagatataaagcataatctttatgaaaaaatattaaaagctagaaaaaaagattcaataatttcatcaaacacatccacaattcctttaaaagttttgtcagcaaaaatgacagacgaagataaaaaagacttttgtataactcactttttca

SEQ ID NO: 200049 - DNA, 556 bp, Unknown
  Bacterial polypeptide expressing nucleotide sequence isolated from the Sargasso Sea
gcaggtggcgtgggaggcgtagccaccgtcatacctttcgcggcgtcgcttgcgccgtccgcgaaagcgaaagcggccggtgcaccggtcgaagtcgacatcagcgggctgaagcccggtgaaatggtgaccgttccgtggcgcggcaagccggtgtggatcctgaaccgcaccgacgcaatgctggccgacgtggtcaaggccgacaaggaagtggccgatccgaccaccgaaaagccctatacgatgccgttgcccgcgtattgcgcgaacgaatatcgcgcgcgggccgatcgcaagaacattctcgtcgtgatggccgtgtgtacgcacctcggctgcacgccaagccaacgcttcacgccgggtccgcagccgaacctgccggacgactggccgggcggcttcctctgcccgtgccatggttcgacctacgacctcgccggccgtgtgttcaagaacaaaccggcgcctcagaatctcgacatcccgccctacatgttcacgtcggcaacgaccctcgtgatcggcaaggacgagaaaggagaagcgtgat

SEQ ID NO: 200050 - DNA, 442 bp, Unknown
  Bacterial polypeptide expressing nucleotide sequence isolated from the Sargasso Sea
gctgggttttgctgctgcaacgggtgggtttttcacagtaatcattcggttcctatatccaaatgtgctatttgagccaccacaaacttttaagataggatatccagaagagttttccccaaatagtgttgacatcagatttaaaaaagattttaacgcgtggatagttagagatgatgaatctatatttgctctttccacagtatgcacgcacctaggttgtacacccaactggcttgctactgataataaatttaagtgcccttgccatggtagtggttttagaatgacaggtatccactttgaaggccccgctcctaggcccctagagaggtttaagatcggtattgctaacgatggccagatactagttgataaaactaaaagctataaatgggaaaaaggtgagtgggaaaataaagattcttttttgaaagtataa

SEQ ID NO: 200051 - DNA, 255 bp, Unknown
  Bacterial polypeptide expressing nucleotide sequence isolated from the Sargasso Sea
tttgagtaaaaagattggaattattggtggaggcatatctggattagtagttggtatttttctagccaaagagggacatcaagtctctatatttgaaaaaaaatcacttctaagtgaaacaagttcaaaaacaaccaaattgcttcatggtggtcttaggtaccttgaaaattttcatattaaagaagtacaaaaaggacttaatgatagatattggtggttaacaaattttcctcaacatactaataagattaa

SEQ ID NO: 200052 - DNA, 370 bp, Unknown
  Bacterial polypeptide expressing nucleotide sequence isolated from the Sargasso Sea
gggcagcagatatccggtgcaagtgcagtggtactctcgaatcatggtggtcgacaactagacaacgtttgttctccgatctcgcttctgcgtgaagtgaaagaagcggtcggagaccgtatcgaaatagtcttggacgggggtgttcggagaggaacagatgtcctcaaagcgctagccttaggcgcccaagcttgtatgattgggagaccatacttatatggtcttggcgccggtggaaagtacggagttgctcgtgccttacagcttttgcgggcagaaatagaaagagacatggccctgcttggagtaactagtgttgaccagataacggaagcgcatgtaagggaaagaaagagatatgtctagt

SEQ ID NO: 200053 - DNA, 502 bp, Unknown
  Bacterial polypeptide expressing nucleotide sequence isolated from the Sargasso Sea
tgttccttttatcgcgtcttggaatccaagtgagaaggctaaatcggcaggggcgcctgttgaagtcgatatttcaaaacttgaatcagggcaattaattcgtgttgaatggcgggggaagcctgtttggattgtcaaccgaacaacacaaatgcttgatgagttgagtgagcatgaaggtcaacttcgtgatccaaattctgacaagccacaacaacctgagttcgctaaaaacgaatatcgttctttaaaagagaatatattcgttgctgttggaatatgtactcatttaggttgttcgccaacgtttcttaaaggagggtttggcgagaaagtagaaggcaccgaagacggattcttttgtccctgtcacggttctaagtttgatatggctggtcgcgtatttgagggtgtgccagcaccgttaaatttagaaattcctccttatatttttattgatgacaccactattttagtaggtggtgaagaaggagttgcgtaa

SEQ ID NO: 200054 - DNA, 880 bp, Unknown
  Bacterial polypeptide expressing nucleotide sequence isolated from the Sargasso Sea
aaaatgcgttgggcttgagtatttaaaaggaaaagaagttataaaagcttacgctgaaagggaagtaattgtatgtggaggtgctattaactcacctcagatattgcaactttcaggaataggtaaaggagattacataaaaaaatggggattaaaagttgtagccgatcttccaggagtaggtgaaaatttacaagaccatttagatgtattatctcactacgagtgtacacagccagttacagaggcaaaatacacagcgggtggacttgcagtttttagaatggccgcaattttagctcaatggatgataactaaaaaagggccaggaaatgacattggtttatcaggtgtatcatttttaaaaacagatgacacacttgatcttccagatattcaaatgcactttattgggtcacttttaaaagatcatggaaagacaagacctgactctcatgcgttcagtaatcacgtatgtatgcttagacccgaaagtaggggttacattgctctaaaatctcttgatccgacagtacctccgattattcagcctaattattttgcaactcaaaaagatcgagacacccttataaaaggagtaaagatgtctagagaaattatgaaccagtctgcttttgatgaataccgaggtaaagagatgactcctggcgttcatgttcaaacagatgctgaaatagaagaatttatcagaaatgccgctgaaacaatttatcatccagtaggtacttgtaaaatgggaaatgatgaatttgcggttgtggacgataaactaagagttagaggagtagaaaatttaagagtgatcgatgcctcagtaatgccaactctaattggtggaaacaccaacgcaccaacaatt

SEQ ID NO: 200055 - DNA, 757 bp, Unknown
  Bacterial polypeptide expressing nucleotide sequence isolated from the Sargasso Sea
atgaaagcgatagatctattttcgggtgctggcggcttatctcttgccgcacatcaatgtggcattgatgtcatcgcagctatcgaactagatacagccgctaccgttacttatcaacgtaacctcattgaacgcctaaaagcgccaactaaattaattaatggcgatattaatgctgtcgacttgcccgccttaatgacagagttaaagctcaaaccaggaaaattggatttgctccttggtggcccaccatgtcaaggcttctcgactcatcggattaacggtgcaggtattgatgatccccgaaatcagcttctgttgaagtattttgattttgttgatggtttacgaccaaaagcgttcttgattgaaaacgtggcgggacttttatggaaacgccatgaaaactatctcaatcagcttctagccctcgcagaaacccatggctataccattcatttttgcgacattctcaatgctaaagactatggcgtgccacaaaaccgtaaacgtgtttttatctttggtacacgtaaagacctaaatattgatgctgctaattttccgccagcagcgacacacttctcgccgtctagtaataaatcaccttactggaaaacggcctcaactgtatttgaaaaaataccagcagaccttatcgagcaatatattgaagagtattttcgaccaaaaactaagcttgcagatgatgaagcaagagatctccaactcaacctagaatatgggaagccgtaaa

SEQ ID NO: 200056 - DNA, 925 bp, Unknown
  Bacterial polypeptide expressing nucleotide sequence isolated from the Sargasso Sea
ggaatccacggggtgggaattctccacgacttgcatagtcgtgggtggaaagatgtccatcttcttgaaaaaaataagcttggttcaggaactagttctcgttcaactaagctcattcatggtgggcttcgctaccttgcctctccatcacaaatacccttggtgagtgaatgtctcaaagaacgccaactactcttagagcttgttccagaccttgtccatcctattgaaatccttattccaatttataaaaacagtcctgagaaatcatggaaaataaaagcaggtctgagcttatatgactttttagctggtaaaaaaaatatacacaaacaccgtaaactcaataaagttgaacttgaaaaactaaaatcatttattaagactaaagatttatctaatgtttttagctactgggacgcacaaacaaatgataaaaaattagtcacacatatagccttatcagccgaaaaactgggagcacaaatcagtgaaaatactaaagttattttactctcaaaagacaagctaaaatggagaataaaagtagaagacaaagaaaaaaacaagtgcgacattaaagcagactatattataaactgtcttggtccctgggctcatagcatctacgataagaaaataaatatcacaaaattaaactctattaataacaaaggaacccacctagttctaaaagatataggcataaatcacgcatttttattttattctccttttgatcaaagaatattttttcttactccctggcaaggaaaaactcttcttggcacaactgaatctcaatatactgatgacccaagtaatgttgaggtcaagcaagaagaagttgattacctgctcaagagtgttaatacatatttatcagctaaactgactgaaagtgacgtcatcgatagttttcagg

SEQ ID NO: 200057 - DNA, 171 bp, Unknown
  Bacterial polypeptide expressing nucleotide sequence isolated from the Sargasso Sea
tatgcccagaattttagttattggtggaggagcaacaggttgcggtgttgccagagatttagttttaagaggttatcaaacaactttaattgaatcaggaaatttaggttctggaactagttcgcgttcacatggcatgttacaaagtggtgcccgttatgctgttagtga

SEQ ID NO: 200058 - DNA, 439 bp, Unknown
  Bacterial polypeptide expressing nucleotide sequence isolated from the Sargasso Sea
tagcatactctcattaactggggggtttttcacaatgatcgctcgttttttgttcccaaatgtactatttgaaccaccgcaaacatttaaaattggctttccagaagacttttctcgtaacagtgttgatataaaatataaaaaagaatttaacgcctggattgtccgtgacgaagaatcaatttttgctctctccactgtttgcacacatttgggctgtactccaaactggttgcctgttgaatcaaaatttaaatgcccatgtcatgggagtggattcaggatgacaggcattcattttgaagggccagccccaagacctctagagagattcaaagttagtttagctagcgatggacaaattttggtcgataaaactaaaagctacaaatgggaaaaaggagagtgggacaatcctgactcatttttaaaagtttaa

SEQ ID NO: 200059 - DNA, 555 bp, Unknown
  Bacterial polypeptide expressing nucleotide sequence isolated from the Sargasso Sea
catgaatgaaacttttgatatcttggttatcggcggtggaataaatggtgctgggattgttagagatgcatcaggaagaaatctaaaagtctgtttggtcgaaaaaaatacagttgggtctgctacttcgtcttggtctacaaaattaatacatggaggattaagatatcttgaaaattatgaattccgtcttgtccgtgagtctttgaaggaaagagaagtaataaaaaaaattgctagtgatattacaacaccaataccgtttattataccttaccagaaatctttaagacctaaatggttaattaaactagggttgtttttatatgataatcttggtggaaaaatgactataccaaaatcttcaacaataaatattaaaaatgaattccctaatattttaaaagatcaatacaaaactggttttcaatattatgatttacagattgatgataagaaacttgttgagttaaatgtaaaagatgcagagaaaaaaggagctacaattattgaaaatagggaggttataagggcaaatcgaaataaaaatgtttg

SEQ ID NO: 200060 - DNA, 475 bp, Unknown
  Bacterial polypeptide expressing nucleotide sequence isolated from the Sargasso Sea
gctgcagctgaagcagctggtgctccagcagtcgctgatataggaaaattagctccaggagaaatgattatcgtagaatggagaggaactccaatctacgtagttaagcattcagatgagtctataaaggaaatcgataagaatttagagagacttgccgatcctaactcggaaacccaggttcaacctgattatgcaaaaaataaatatagatcaagaaaacccggcatatctgttttatcagcagtttgtacacaccttggttgtgctcctaaatattaccctcaactgggagttgtagattttgattccgagtggcaaggaggattcttttgcccttgtcacggttcaaagttcgatttagccggaagagtttacgcaggagttcctgcccccgataatttagctgtgcccccacactattttaaatctgatgatattttagtcatcggagaagacggagatgtagcgtaat

SEQ ID NO: 200061 - DNA, 175 bp, Unknown
  Bacterial polypeptide expressing nucleotide sequence isolated from the Sargasso Sea
catgaatgaaacttttgatattttagtaattggtggaggtatcaatggtgccggaattgctagggatgcatcaggaagaaatttaaaagtttgtttagttgaaaagaatacagttggttctgctacttcatcttggtctacaaaattaatacatggtggattaagatatctagag

SEQ ID NO: 200062 - DNA, 452 bp, Unknown
  Bacterial polypeptide expressing nucleotide sequence isolated from the Sargasso Sea
ggttcgcgctgacatcagtaagctcgaaccgggccagatggtggtgattgagtggcgcggtaagccagtctatgtgttgcggcggacccccgagcaggttgcggggttggccaccttgaacaacgatctgaaagatccctcttccgaggcatccgcacagcccgattacatcgagggcgacgggagagccatcaatgaagaatttctcgtgatggtagggctctgcacgcacctcggctgtgcccccaaattccggcctgaggtcggcgcggcagacatgggaggggacgagtggttggggggcttcttttgtccctgccacggctccaaatttgacctggctgggcgcgtatacaaaggcgtaccggcgtcagccaaccttgagattcccccttattcctatgagagcgacagcgtgctggtgatcggcgttgacgcggaggcagcctgat

SEQ ID NO: 200063 - DNA, 592 bp, Unknown
  Bacterial polypeptide expressing nucleotide sequence isolated from the Sargasso Sea
aatgaaagcgatagatctattttcgggtgctggcggcttatctcttgccgcacatcaatgtggcattgatgtcatcgcagctatcgaactagatacagccgctaccgttacttatcaacgtaacctcattgaacgcctaaaagcgccaactaaattaattaatggcgatattaatgctgtcgacttgcccgccttaatgacagagttaaagctcaaaccaggaaaattggatttgctccttggtggcccaccatgtcaaggcttctcgactcataggattaacggtgcaggtattaatgatccccgaaatcagcttctgttgaagtattttgattttgttgatggtttacgaccaaaagcgttcttgattgaaaacgtggcgggacttttatggaaacgccatgaaaactatctcaatcagcttctagctctcgcagaaacccatggctataccattcatttttgcgacattctcaacgctaaagactatggcgtgccacaaaaccgtaaacgtgtttttatctttggtacacgtaaagacctgaatgttgatgctgcaaattttccgccagcagcgacacactcctcaccg

SEQ ID NO: 200064 - DNA, 939 bp, Unknown
  Bacterial polypeptide expressing nucleotide sequence isolated from the Sargasso Sea
gatgtattagtaattggtggcggtattaatggtgcagggattgtaaatgacgcagtaaagcgagggttaactgtcgcactgtgtgaacaatatgattttggctacggcgcaagtactgcaacgtctaaattagtgcatggtggattacggtatcttgaaaattatcaatttagactggttaatgaatcaattaatgagcgaaatatattgttaaaaaatgcgccacatttagtaaaaccgttaaaattttatgtgcctttattcaaacattcaaaatggaagatgtggaaaatgcgagctggattaacattatatgattggatgcaaacggatcgattacttccaaaacatgccgttgttaatacattcaatttaagtaaagaaattccgtggctaaatatggatgaattagttggagctgttagctactatgatgcacaaatggaggatcatcgaattattatcgaactattattaatggcacaaaaaaatggtgcagttattcataattattcaaaagtagttaatatagataaaacatcatggggatattcgtgtgatatcaaaaaagaaaatggagaaataaaaccaattcaggttcgaagtattataagtgcaacaggtgcatggagtaaccagttctctgaaaaatcacttgttaagccgacaaaaggtgttcatatcatactcccagatatggacttaacggcatcattattattgatgacaccgcaagataatcgcgtgttttttgttatgccttggaattcatatactttggttggaacaacggatcagtctggtacgttcaattataatgaaccgatagttacaaatgaagaagttcagtatttattggatgcattgaatgcttatacatcaactcgtgaatggcatagtactgatgtaattggtgctttttgtgggtaccgaccccac

SEQ ID NO: 200065 - DNA, 752 bp, Unknown
  Bacterial polypeptide expressing nucleotide sequence isolated from the Sargasso Sea
tatgtcagatatttatgatatttttattttgggaggtggtattaatggagctggtatcgctagagacgctgctggtagaggtttgaaaatttgtttagctgataaaggtgaaataggtggagcaacatcctcgtggtcaacaaaattaattcatggaggtttaagatacttagaaaattatgaatttaaattagtaagggagtctttaaaggagagagaggtaatccatcaaattgcgaatcaaattacaaaaccaattccatttattatacctcacacaaaaaatcatcgacccaaatggctaattgaaattggcttgttcctttatgataatcttggaggtaaaactgttattccaaaatctaaatctatagatctaaaaaaagaattttccaaaattcttaaaagtgaatacaccattggatttcaatattatgatctacaagttgatgacaaaaaacttgcaaagcttaatgcccaagatgcaattaaaaataatgctagaataattgagcataatgaagtgatcaatatagagttaattgatgattattggaaaatttttcttgaagatggcctaataataaaatcaaaaatttttataaatgcatcaggtccttggataaacgaaacaatgaaaaatttgataaaaactgactcgagtaaaaaaataagactagtaaaaggaagtcatattattacaaaaaaactttatgaaaaaaatattgcattcacactccaaaatgatgatg

SEQ ID NO: 200066 - DNA, 841 bp, Unknown
  Bacterial polypeptide expressing nucleotide sequence isolated from the Sargasso Sea
atgtcaaaatcgttcgatttattcattattggtggtggtataaacggcgctggtatagctagagatgctgctggaagaggtttgtctgtatgtttggctgataaaggtgagattgggggagcaacatcatcttggtctacaaaattaatacatggtggtcttcgttatttagaaaattatgaattcaaattagttagagaatccttaaaggaaagagaaattgtttacaagattgctagacatatttcaaaacctattccatttattattcctcatactgataaaattagaccagcatggttaattaaatttggtttgtttttgtatgacaatttagggggtaaaaccaatattccaaaatccaaaacatatgaacttgcaaaaaaatttccgaatattcttaaagaaaaatataaaactggttttcagtattttgacattcaaattgatgataaaaaattaacaaaattaaatgctaaagatgcaaaaagaaataaagccaaaatactagaatataacaaagttaaaaaagctgaaattgttgataatgagtgggttataagtcttcaaaaaggaaaaaaaataaaatcaaaagttttaatcaatgcatctggaccatggataaatgagactttacataaaaatatcaaaatcaaatctaagaaaaaaataagactggttaaaggaagtcatatcattacaaaaaaattgtataaagctgatgtagcattcacatttcaaaatacagacaagagaataatatttgtcattccttataagggcaaattttcattaataggaacaacagaaatagaagtaaaatctcctgaaaacaaaggga

SEQ ID NO: 200067 - DNA, 913 bp, Unknown
  Bacterial polypeptide expressing nucleotide sequence isolated from the Sargasso Sea
aaaagaagtcgaatgccataaccgcgaaattcatttacctaggggaaaagttattggaggatcttcttccattaattctatggtttacatgagagggcatccttttgactataatagctggtcagaaaaccacggattaactgaatggtcatttgacagatgcttgccttatttcaaaaaatgtgaatcatctgacaggggggaaaacgagtggcgaggaggaagtggacctttgggggtgtcaaaaggcaaacttaaaaatcctctgtttgatgctttaattgaagccggcgagcaatcaggtcaaggaacttcagatgatttaaatggatataaacctgaaggcattgctagacttgatagtacttcaaaaaataatatgcggtgtagcgctgccacagctcacttgagaccagcattaaaacgtgcaaatgtcacattaattacaagagcctttgtaactaaaataatcattgaaaataatactgcagttggtgttgagtttgaacatcaaaattctatcaaaactttttattcaaataaatctattatacttagttgtggtgctattaagtcaccacaaattttaatgctttctggaattggggaagctgattatctcaagtcattcgatatagaaccaattattaatttgaaaggtgtaggcaaaaaccttcaagaccatttaaatatcgccataggttatgaatgcaaaaaaaacgtcactttgcataaacttactcaacctcatagaatgttgagtgtaggattaagatggttaatcacaaggggtgggatcgtatcgtctaatatttttgaagttggaggtcaagtttttagtaacgacaaaattaaacaccctaatcttcaatatcacttcaagccagtttatgctgaatatgaaggaagaaaa

SEQ ID NO: 200068 - DNA, 592 bp, Unknown
  Bacterial polypeptide expressing nucleotide sequence isolated from the Sargasso Sea
atgagcaatgcgcctgtagatcatggtcgccgtcgctttctgaccatagcaacttctgtagttggtggggttggtgcgattggagctgctgttccctttattgcttcctggaatccgagtgaaaaagctaaacaagctggtgctgcagtcaccgctgacattagcaaactcgaagacgggcagttaattcgggtcgagtggcggggcaaacctgtatggatcgtcaaacggacgccagctatgctggaaagtctgaccaaagcagtagataaacttcgtgatcctgcctcagaagaaccgcaacaacctgaatacgctaaaaacgatcaccgttcgaaaaagcctgaaatttttgttgctgtggggatctgtactcacttgggctgttctcctacttacctgatgaacgattttgatgcacaggttgaaggcattccttctggtttcttctgtccatgccatggttcgacctacgatatggctggtcgtgtgttctccggcgttcctgcgcctaaaaacctgatgatcccaccttatatgtttgtcgatgacaccaccattttgattggtgaagatgaggggacagcttaat

SEQ ID NO: 200069 - DNA, 589 bp, Unknown
  Bacterial polypeptide expressing nucleotide sequence isolated from the Sargasso Sea
tctgtcagcagaagttaatttaggtaggcggtatttcataatcggtgcgacaggaggagttgcttcagtaggcgttgttggagctgctatcccgtttcttcagtactggcaacccagtgcgaaggctaaagcattgggagcgccagtcaaaatagacataagcaagcttcggcctggggagatattgagtccgattctttcctaccggggacagccagtttttgtgatctaccgggatgaggactctttggcgcttctagaagaggacagtggcaggttggccgatccaaattcggaaagttcggaacagccagaatttgcgttgaatccctatcgctcgagccgcccggaaatcggtgtgtttttagggatttgtacgcatcttggatgttcgccaaagcatcaggtagccaacgtttttcccgactctgagcagggagggtttttctgcccgtgccatggctccggatttgatttggcgggaagggtcgcagctggggtccctgcacccactaatctaatcgtgcccccttaccgattttcttcagatacggaaattattgttggtgaattggaggctgacgcctga

SEQ ID NO: 200070 - DNA, 670 bp, Unknown
  Bacterial polypeptide expressing nucleotide sequence isolated from the Sargasso Sea
gatgtctaaagtatttgatttatttataataggtggtggtataaacggagccgggatagcaagagatgctgccgggagaggtttatctgtatgtttggctgacaaaggagaaataggaggtgcaacttcttcttggtcaacaaaattaattcatggtgggcttcgttatctagaaaattatgaatttaaattagtaagagagtctcttaaagaaagagaaattgtttacaaaattgcaaaaaacatctcaaagccaattccatttattattcctcatactgataaaattagaccagcatggttaattaaatttggtttgcttttatatgataatttgggtggaaaaactaatattccaaaatcaagaacattagatattaataaaaattttccaaatattcttaaagagaaatacaaaactggttttcaatattttgatattcaaattgatgataaaaaattaacaaagttaaatgctcaggatgcaaaaagaaataaagctaaaatactagaatacaacaaagtaaaaaaagctgaaattattaataatgaatgggtcattagtcttcaaaatagaaaaaaaataaaatcgaaagttttaatcaatgcatctggcccatggataaatgaaactttacaaaaaaatataaaaataaaatctaaaaataaa

SEQ ID NO: 200071 - DNA, 1048 bp, Unknown
  Bacterial polypeptide expressing nucleotide sequence isolated from the Sargasso Sea
tttgagtaaaaagattgggattattggtggaggcatatctggattagtagttggtatttttctagctagagaggggcatcaagtttctatatttgaaaaaaaggcacttctaagtgaaacaagttcaaaaacaactaaattgcttcatggtggccttaggtacctagaaaattttcatatcaaagaagtacaaaaaggacttaatgatagatattggtggttaaaaaattttcctcaacatactaataagattaagattttaataccatttaaaaatattttttctttagaattattgaaattttatataggtataaaattttatgattttttagcaggtaaaaagaaactaggaaaaagcaagctatgtataagaaaagttttgaaagatctaaatctttatagtgattataaaggacatctttctttttttgatggagtaatggatgatgtattgcttggaaaagatttaatccatctggccaaagaattaaaaatcaatttatatgaaaataatgaagtatctaattttgatatttatggaaatattgataataaaaaatttgataaggtaatattagcagttggaccttggacaaaaatattacttgagaagaataaagtaaaaagtttgaaagatatagattatattaaaggaagccatctcattcttgataagaagatacattcaggattaatgtttaaaggtatttgccaatccaggtatgtatttgcattgccttataaaggatatactttattaggaacaacagaggtgaaggtaaaatcacctgatataccaaaaattgatatcaacgaagaaaattatttaattgatagcattaatcaggtttttagagatcctgtaacaagaaaagatattgtctcatcttattctggggtgaggccattaataagatcaaaaaatgattttcataaatcttcaagagatttttttattcaaaaagattctaatttaataagtatttttggaggcaagtggacaacatctccttcaattggaagaaaaattgctacaattgtctga

SEQ ID NO: 200072 - DNA, 571 bp, Unknown
  Bacterial polypeptide expressing nucleotide sequence isolated from the Sargasso Sea
aatgccagatgggaaaaatacagtaacaaaacctccagagcctaaagctcctgcagctttaagcaaggcttcaactgataatgctgaattaaatagaaggtctttcttctcatggttatcttttggatggttaggttttgtcgctgcaacaggtgggttttttacaatgttgctaagatttctatttcccaatgttctttttgagcctgttcaaacttttcgtgcaggttttccagatgattatataattggtgaagtaaatacgaattggaaagataaatacggtgtatggatagttcggaatgatcaaggtatttatgccttatctactgtttgtactcatttgggatgcactccaaattggttaggaacatctaaaaaattcaaatgtccttgtcatggaagtggatttaaaatgacaggaattaactttgaaggaccagcgcctagacctcttgaaagatatcgtattgttcttgctgataatggagaaataattatagataagacccaaaagtatcaacaagaaaaggggcaatggactgatccagaagcattcttaacagtataa

SEQ ID NO: 200073 - DNA, 658 bp, Unknown
  Bacterial polypeptide expressing nucleotide sequence isolated from the Sargasso Sea
aatgtctaaagtatttgatttattcataataggtggtggtataaacggcgcaggtattgcaagggatgctgctggaagaggtttatctgtttgtctagctgacaaaggtgagatcggaggagcaacatcatcttggtctacaaaattaatacatggtggtcttcgttatttagaaaattatgaatttaaattagtaagagagtctttaaaagaaagagaaattgtttacaaaattgctagacatatttcaaaacctattccatttattattcctcatactgataaaattagaccagcctggttaattaaatttggtttgtttttgtatgataatttaggtggaaaaaccaatattccaaaatcaaaaacattagatcttaaaaaaaaatttccaaacattcttaaggaaaaatataaaactggttttcaatatttcgatattcaaattgatgataaaaaattgacaaagttaaatgttaaagatgcaaaaagaaataaagctaaaatactagaatataacaaagttaaaaaagctgaaattattggtgatgactggatcattagtcttcaaaatgggaaaaaaataaaatcaaaagttttaattaatgcatctggaccatggataaatgaaactttaaagaaaaatataaaaattaaa

SEQ ID NO: 200074 - DNA, 905 bp, Unknown
  Bacterial polypeptide expressing nucleotide sequence isolated from the Sargasso Sea
tttgaatttaagtgtggttgaaacatttgatattttaatagtaggtggaggtataaatggtgcaggaattgtcagagatgctgcaggtagaaacttaagagtttgcttggttgaaaaaaatagtgttggttcagcaacttcttcgtggtcaacaaagttaatacatggtggattaagatatcttgaaaattatgaatttcgtctggtacgtgagtcattaaaagaaagagaaattattaaaaaaattgctagtgagataacaacaccattaccctttattattcctcatcaaagatctttaagacctaaatggctaattaaattaggattgtttttatatgataatattggtggaaaaatgacagtaccaaaatcttcaactataaatatcaaaagagaaattcctaatattttaaaagacaaatttaaaattggttttcaatattatgatttacaggttgatgataaaaaacttgtgcaattaaacgttgaagatgcaaagaaaagaggtgctacaattattgaaaatagaaaagttgttaatgcaaaacgaaataaaaatatttgggatgtaattctagatgataatactatacttaaatctaaaattcttatcaatgctgccggaccttggataaatgaagttttaagtaatgttattaaattaaattcaaataaatcaattcgacttgtaaaaggtagtcatataataactaaaagtctttacagtcagaaaaaagctttcactttacaaaatgaagataacagaataatttttgtaataccttacaaagatgaatattcacttattggtactactggaacagaagttttctcaccagaaaatcctaaaattgatgaaagtgaaattgattattttattaatttcagtaataaatattttg

SEQ ID NO: 200075 - DNA, 700 bp, Unknown
  Bacterial polypeptide expressing nucleotide sequence isolated from the Sargasso Sea
aatgccgactccattcgcgcaaactagcggcggtagaagcgacgtgaaggaaaaatccaactcagaagtggggcgtgtaatgcgagacaaggaagatgaacgcgtcgacggcggccgccgtgcctggctgatagcgacgaccgtagcaggtggcataggaggcgttgccactgtcgtaccctttgttagttcgtttgcaccatctgaaaaggccaaggcggcaggcgccccggtcgaagtcgatatcagtgatctcaagcccggcgacatgaaaaccgttgcctggcgtggcaaaccggtgtggatcatcaaccgcaccgaccggatgcttaccgatgtccagaaagccgataacgaagtagcggatccccacaccaagaatcctttttcgatgccgttgccggagtactgcaacaacgagttccgttcgcgcaccgaccataagaatcttttcgtcgctgtcgccgtgtgcacccatctgggctgcacgccgacgccgcgcttccaggaggggccgcagcccaatcttccagacgactggccaggcggcttcctgtgcccttgccacggctcgacctatgacatggccggccgcgtcttcaagaacaaacctgcgccgcagaacctcgacatcccgccttacatgttcacgtcggctaccagcctcgtgatcggcaaggacgagaaaggagaagcgtaa

SEQ ID NO: 200076 - DNA, 598 bp, Unknown
  Bacterial polypeptide expressing nucleotide sequence isolated from the Sargasso Sea
atgcaaccaaaatctcctcctaatccaggaagaagaaaatttctaattggtgctacatcggcagttggcgccgttggtatcgcaggagctgcggtaccttttattagtgcattcaatccaagtgctgctgcagaagcagcaggtgctccagctgtagcagatataagcaagttagctccaggcgaaatgataatagttgaatggagaggcaccccaatctatgtggttaagcattcagaagagtcaataaatgaaattgataagaatttagaaagattagctgatccagattctaatactgaagtacaacctgagtatgctaagaataagtatagatccagaaaacctggtatctcagttctatctgcagtttgtacacatttaggatgtgctccaaagtattatccagaattaggagttgtagattttgattcagaatggcaaggaggtttcttttgtccttgtcacggctccaaattcgatctagctggaagagtttacgcaggagttcctgcaccagataatttaactgtgcccccacactattttaaatcagatgatattttaatcatcggagaagatggagatttagcgtaat

SEQ ID NO: 200077 - DNA, 571 bp, Unknown
  Bacterial polypeptide expressing nucleotide sequence isolated from the Sargasso Sea
atgtctaaaatattcgatttattcataataggtggcggtataaacggtgcaggtattgcaagggatgctgcaggtagaggtttatcagtttgtttagctgacaaaggtgagattggtggagcaacttcatcctggtcaacgaaattaatacatggtggtcttcgttatttagaaaattatgaattcaaattagttagagaatctttaaaagaaagagaaattgtttataaaattgctaaacatatttcaaaacccattccttttataattccttatgcagataaaattcgaccagcctggttaattaaaattggtttatttttgtacgataatttaggtggcaaaagtaatataccaaaatcaaaaacatttgatcttagaaaaaaattttcaaatattcttaaagaaaaatacaaaactggttttcaatattttgacatacaaattgacgataaaaaattaacgaaattaaataccaaagatgcaaaaagaaataacgctaaaatactagaatacaacaaagttaaaaaagctgaaattattggcaatgaatggattattagtcttgaaa

SEQ ID NO: 200078 - DNA, 241 bp, Unknown
  Bacterial polypeptide expressing nucleotide sequence isolated from the Sargasso Sea
ttcgtggccgtcggtatctgcactcatctgggctgctccccctcctatctgccggacagctttggcgagcaggtgcagggcgtgacttcaggcttcttctgcccctgtcatggctccaagttcgacatggctggtcgagtgttccagggggtgccagcacccttgaacctggtcattccgccgtacaaatatcttagcgacaccaccatcctggtcggtgccgatggcaaggaggcctgac

SEQ ID NO: 200079 - DNA, 394 bp, Unknown
  Bacterial polypeptide expressing nucleotide sequence isolated from the Sargasso Sea
atgaaagttgctgttctaggtatagttgatccgaaaggcttatcgtttttgaaagaaaacgaattcaaggtcattgaaattgagaattttgaaatacaaaacttaagggaacaattagaagatgttgatggaattttattaagaactacaagacttgataaagaaattttacaacattgtaacaatttaaaaattatatcaagacatggagttggttacgataatgttgatcttgattttctcaatcaaaataaaattgcacttagtattacttctacttctaatgctgtaagtgttgccgaacatgtattatcattttttatttatttaacaaaaaatttaactctatcagatagtctggttaaagaaggtaactttgaaaaaagatctcagt

SEQ ID NO: 200080 - DNA, 592 bp, Unknown
  Bacterial polypeptide expressing nucleotide sequence isolated from the Sargasso Sea
atgagcaatgcgccagtcgataccggacgtcgcagattcctgacagccgcaaccgccgtagtaggtggtgctggtgccgtcgctgtagcggttcctttcatcaagtcatggaatccgagtgccaaagcgaaagctgcaggtgcaccggtcgaagtaaatatcagtaaagtagagccaggtcagctgatccgtgttgaatggcgaggaaaacctgtatgggttgttcgtcgcactgaagctgtgatcaatgaactgccaacacacgacgataagttaagagatccagcgtctgctgaaatgcagcagcctgaatatgcaacaaatcctctgcgctcaatcaagccagagtattttattgctgtcggtatttgtacccacctaggatgttcacccacttatttgccagattcatttgctgagcaagttcaaggtgtgacttctggtttcttctgcccatgtcatggttctaagttcgatatggcgggccgcgtgttccaaggcgttccagctccattgaacctagttatccctccacatcaatatgttgatgatggcactgttatcatcggtgtagataaaggagtggcgtaat

SEQ ID NO: 200081 - DNA, 1078 bp, Unknown
  Bacterial polypeptide expressing nucleotide sequence isolated from the Sargasso Sea
gttgacctcaaaaaaaatggatgggattcttttgagtaaaaagattgggattattgggggaggcatatctggattagtagtaggtatttttctagccaaagagggacatcaagtttctatatttgaaaaaaaatcacttctaagtgaaacaagttcaaaaacaaccaaattgcttcatggcggccttaggtaccttgaaaattttcatattaaagaagtacaaaaaggacttaatgatagatattggtggttaacaaattttcctcaacatactaataagattaagattttaataccatttaaaaatatattttctttagaattattgaaattttatataggcataaaattttatggttttctagcaggcaaaaagagactaggaaaaagtaagctatctataagaaaagttttgcaagatttaaatctttataatgattacaaaggtcacctttctttttttgatggggtaatggatgacgaattacttggaaaagatttaattcatctggccaaagaattaaaaatcaatttatatgaaaataatgaggtatctaattttgatatttatggaaatattgataataaaaaatttgataaggtaatattagcagttggaccttggacaaaaatattactggagaagaataaagtaaaaagtttgaaagatattgattatattaaaggaagccatcttattcttaataagaagatacattcaggattaatgtttaaaggtatttgtcaatctaggtacgtatttgcattaccttataaaggatatactttattaggcacaacagaggtgaaggtaaaatcacctgacaaaccagaaattgattctaacgaagaaaattatttaattgatagtattaatcaggcttttagagatcctgtgacaagaaaagatatcgtctcatcttattctggagtaaggccattaataagatcaaaaaatgattttcataaatcctcaagagatttttttattcaacaagatgctaatttaataagtatttttggaggcaagtggacaacatctccttcaattgcaagaaaaattgctacaattgtctaa

SEQ ID NO: 200082 - DNA, 598 bp, Unknown
  Bacterial polypeptide expressing nucleotide sequence isolated from the Sargasso Sea
tatgcaacctaaatctcctcctaatccaggtagaagaaaatttctaattgcggcaacctctactgtaggtgctgttggtattgctggagctgctgttcctttcatatctgcctttaatccaagtgctaaagcagaagcagctggtgcaccagctgttgctgatataagtaagttagctccaggtgaaatgattattgtagagtggagaggaactccaatttatgtagttaagcattctcaggaatccatgaatgaaatagataaaaatttagataggcttgctgaccctgattctaataccgaagttcaacctcaatatgccaaaaataaataccgttcaagaaaaccaggaatctctgttctatcagcagtttgtactcatttagggtgtgctcctaaatattacccacaactcggagttgttgattttgattctaattggcaaggtggatttttctgtccttgtcatggctcaaaatttgatttggctggaagggtttattccggggttcctgcaccagataatttagctgtgccgccacattactttaaatctgatgacatattagtcattggtgaagatggagatatagcttaa

SEQ ID NO: 200083 - DNA, 289 bp, Unknown
  Bacterial polypeptide expressing nucleotide sequence isolated from the Sargasso Sea
tggagtatggatggttagaaatgatgaaggaatttatgctttgtcaactacatgtacacatttgggctgcacgcccaattggcaacccaccgcaaaaaaatttaaatgtccttgccatggtagtggatttagaataacgggtatacattttgaaggcccagctcctaggccattagagcgttttaaaattacattagcggatgatggtcaaattattattgataaaaatactaagtatcagcaagaaaaaggtcaatggactgatcctgaagcctttctaaaagtttaa

SEQ ID NO: 200084 - DNA, 556 bp, Unknown
  Bacterial polypeptide expressing nucleotide sequence isolated from the Sargasso Sea
gatgagtgaaaaatcaaacgctgacgctcctagagccgcagtaggatctgtaagcaaaggtagaccttcgactattgaaagaagaagtttctttagctggcttgctgttggctggctgggctttgctgctgcaactggcggtttttttacggtaatcattcggtttctttttcctaatgttctatttgagccgcctcaaacttttaaaattggttatccagaagaatttgctccaaataccgtagacactagatttaaaaaggaatttaacgcatggatagttagagatgatgaatccttatttgcgctatctactgtctgtactcatttagggtgcacaccgaattggcttgcaactgacaataaatttaaatgcccttgccacggtagtggtttcagaatgacaggcatacactttgaaggtcccgctcctagaccgctagagaggtttaagataggcattgcaaacgatggacaggtgcttgtggataaaaccaaaagcttcaaatgggaaaaaggtgagtgggaaaataaagactcctatctgaaagtataa

SEQ ID NO: 200085 - DNA, 592 bp, Unknown
  Bacterial polypeptide expressing nucleotide sequence isolated from the Sargasso Sea
gatgagcaatgcgccagtcgataccggacgtcgcagattcctgacagccgcaaccgccgtagtaggtggtgctggtgccgtcgctgtagcggttcctttcatcaagtcatggaatccgagtgccaaggcgaaagctgcaggtgcgccggtagaagtaaatatcagtaaaattgagccaggtcagctgatccgtgttgaatggcgtggtaaacctgtatgggttgtccgtcgcacagaagcagtgattaatgaactgccaacacacgacgataagctaagagatccagcgtctgcagaaatgcaacaacctgaatatgcaacaaatcctctgcgttctattaagccagagtattttattgccgtcggtatttgtacccacctaggatgttcaccaacttatttaccagattcatttggtgagcaagttcaaggcgtgacttctggtttcttctgtccatgtcatggttctaagttcgatatggcgggccgcgtattccaaggcgttccagctccattgaacctagttatccctccacatcaatacgttgatgatggcaccgttatcatcggtgtagataaaggagtggcgtaa

SEQ ID NO: 200086 - DNA, 586 bp, Unknown
  Bacterial polypeptide expressing nucleotide sequence isolated from the Sargasso Sea
atgtcagaaacaatagatcagaataagcgacatttcctcggaatggcaactgctgcaactggtttagttggtgttggttttgcaacagttccgttcttatcttcgcttaaacccagtgccagagctagggcgcttggtgcgccagttgaggtacctctgagctctctcgagcccggggaaatgattagagtagtttggagaggaaaattagtttatgttctaagaagaaccagcgatatgttgaaacgcctttctgatgttactgatcttttgagagaccctgattcacttgaggctgatatacagcctgattatacagttaatgaacacagatctttgaaccctgaatatttagtggtagagggatcttgtacacatctaggatgtgcccctttgcctcagtttgaggttacaccttcatcagattggtttggtggatttttttgcccgtgccatggctcaaaattcgatctttctggtcgcgtttataaaggcgtgcccgcaccaacaaacttaaaagttccgccttataacttttcacaaacgaatgttattaccataggtatagatccaagtgatgcatgat

SEQ ID NO: 200087 - DNA, 411 bp, Unknown
  Bacterial polypeptide expressing nucleotide sequence isolated from the Sargasso Sea
aatgaataaatattatgatttgtttataattggaggaggaattaatggagcaggtatagcaagagatgctagtggtagaggcttaagtgtttatcttgcagaaatgggaaaagttggttctgcaacatcttcttggtcatctaaattaattcatggtggtttaagatatctcgaaaattataattttaaattagttagagagtctttgaaagagagagaaattattacaagcattgcaccaactattactagacctttaccttttataataccttatacaaaaaaattaagatctaaattattaataagattagggttatttttgtatgataatcttggaggtaaatccaatatacctaaatcatcaaaaattaattttaataaaaaatattctaaaattttaaatcaaaa

SEQ ID NO: 200088 - DNA, 769 bp, Unknown
  Bacterial polypeptide expressing nucleotide sequence isolated from the Sargasso Sea
tgaattaaaacatgagctaaatggtgtaggaaaaaacctaaaagatcatctagaatttaatttgcagtacaaatgtaaacagccaataacactaaatggaagtatgtctttgcataaaaaacttttaattggtttaaggtggttgttattcaagaagggtcttggtgcaacgaatcattttgaatcgtgtgggtttataaagtcatctgaaaaaataaaaataccagatattcaatatcattttcttccaggtgcgatgcgatatgatgggaaacaggcaaaccaggggcacggatatcaggttcatgttggtttcaacaaaccaaaaagtcatggcagtatagaaattaaatctaatgaccctcgccatcccccaaaaatcacatttaattatcttaagcatgaagatgatataaaaggatttagattggccttaaaacttacaagaaatattatgaaccaatctgcttttaagccatttcatgataaagaaatacaacctggtaaagacattcaatctgatgacgatattgataattttataaaaaactcagttgaaagcgcctatcatccctgctgctcctgcaaaatgggttctgacaatgattccgttgttgataatcaaacgagagtaattggtttgaacgggcttcgtgtagttgatgcctcaatatttcctgatattctaaatggcaatttaaatgccccaaccatgatggtagctgaaaaagcagctgatatgattttaaaaaaacctccaccaagataa

SEQ ID NO: 200089 - DNA, 598 bp, Unknown
  Bacterial polypeptide expressing nucleotide sequence isolated from the Sargasso Sea
tatgcagccaaaatctcctcctaacccaggaagaagaaagtttctaataagcgcaacatctgcggtcggtgcagtgggcgttgctggtgccgtagttcctttcatcagtgcttttaaccccagcgcagcagctgaagcagctggagctccggccgtcgctgatataggaaaattagctccaggggaaatgattatcgttgaatggagaggaactccaatctacgtagtaaagcattcagatgagtcgatacaggaaatcgataagaatttagagagacttgccgatcccaactcggaaactcaggttcaacctgaatatgcaaaaaataaatatagatcaagaaaacccggcatatctgttttatcagcagtttgtacacaccttggttgtgctcctaagtattaccctcaacttggagttgtagattttgattccgagtggcaaggaggattcttttgcccttgtcatggttcaaagttcgatttggctggaagagtttacgcaggagttcctgcccccgataatttagctgtgcccccacactattttaaatctgatgatattttagtcattggagaagacggagatgtagcgtaa

SEQ ID NO: 200090 - DNA, 193 bp, Unknown
  Bacterial polypeptide expressing nucleotide sequence isolated from the Sargasso Sea
atggatgggattcttttgcataaaaaaattggaattataggtggaggtatttctggtttagtagtcggtatttttttagctagacaaggacataagatttcaatttttgaaaaaaaatcacttctcagtgaaacaagttcaaaaacaactaaactacttcatggtgggctaagatatcttgaaaaccttcata

SEQ ID NO: 200091 - DNA, 574 bp, Unknown
  Bacterial polypeptide expressing nucleotide sequence isolated from the Sargasso Sea
aatgtcagataagcctacaaaaaaaacttcaacaataagtccacaatccccgccccccgcagcgttaaataaggttgaaaaagattcatctgtaaatcgccgaacctttttttcttggctttccttgggctgggttgcttttgttgctgcaacaggcggtttttttacaatgatgctgagatttttctttccaaacgttctttttgagccagtccaaacttttcgagcaggctatccagatgattatactgttggagaggttgatttgagatggaaggaaaaatatggggtttggatggtaagaaatgatgagggtatatatgtactttcaactacttgcactcatcttggctgtacaccaaactggcaaccttctgcaagaaagtttaaatgcccatgccatggaagcggctttagggcttcaggaatccattttgaaggacccgcgccaaggcctttagaaagatttaaaatcacactagctgatgatggtcagattattgtagacaagacacaaaaatatcaacaagaaaaaggtcaatggaatgaccctgaatcatttttgaaagtataa

SEQ ID NO: 200092 - DNA, 541 bp, Unknown
  Bacterial polypeptide expressing nucleotide sequence isolated from the Sargasso Sea
aatgatacccaatgccgcggttggatcatctcctgagaacgcgtttaaaggtcccgagacagatagacgaggtttcctaagttggctatctgttggctggttagcttacttaggcgttactggtggtttcttcacgatcattgtccggtttctttttccaaatgtactatttgaaccgcctcagacatttaaaattggttacccagaagacttctctaagaactctgttgatataaaatataaaaagtcttacaacgcgtggatcgttagagatgaggaatcgatctttgcactatctacagtttgtacgcatctcggctgtactccaaattggctacctgttgaatcaaaatttaaatgtccatgtcacggaagcggcttcagaatgaccggaattcattttgaaggacctgcaccaaggccacttgaaagatttaagatcagtttagcaaatgatggacagatccttgttgataagacgaagagctataaatgggagaagggtgaatgggaaaacccagaatcattcctaaaagtatag

SEQ ID NO: 200093 - DNA, 598 bp, Unknown
  Bacterial polypeptide expressing nucleotide sequence isolated from the Sargasso Sea
atgcaaccaaaatctcctcctaatccaggaagaagaaaatttctcataagcgcaacatctgcggtaggtgctgttggtgtcgctggtgccgtagtaccttttatcagtgcttttaatcccagtgctgcagctgaagcagctggtgctccagcagttgctgatataggaaaattagctccaggagaaatgattatcgtggaatggagaggtactccgatctacgtagtaaagcattcagacgagtccataatggaaatagacaagaatttagagagacttgccgatcccaattctgaaactcaggttcaacctgaatatgcaaaaaataaatatagatcaagaagacctggcatatctgttttatcagcagtttgtactcaccttggttgtgctcctaaatattaccctcaactgggagtagtagattttgattctgagtggcaaggaggattcttttgcccttgccatggttctaagtttgatttagctggaagagtttacgcaggagtgcctgcccccgataatttagctgtgccccctcactattttaaatccgatgatattttagtcataggagaagacggagatgtagcgtaat

SEQ ID NO: 200094 - DNA, 451 bp, Unknown
  Bacterial polypeptide expressing nucleotide sequence isolated from the Sargasso Sea
tttggatggttaggttttgtcgctgcaacaggcgggttttttacaatgttgctaagatttctatttcccaatgttctttttgagcctgttcaaacttttcgtgcaggttttccagatgattatataattggtgaagtaaatacgaattggaaagataaatacggtgtatggatagttcggaatgatcaaggcatttatgccttatctactgtatgtactcatttgggatgcactccaaattggttaggaacttctaaaaaattcaaatgtccttgtcatggaagcggatttaaaatgacaggaattaactttgaaggcccagcgcctagacctcttgaaagatatcgtattgttcttgctgataatggagaaataattatagataagacccaaaagtatcaacaagaaaaaggtcagtggactgatccagaagcattcttaacagtataaa

SEQ ID NO: 200095 - DNA, 256 bp, Unknown
  Bacterial polypeptide expressing nucleotide sequence isolated from the Sargasso Sea
atgcaaaaaggtgatcatttagattgggatattattgttattggaggggggatcacaggtgcgggaattcttagggaagcaaggcgaagaggtttcaaagcactgttgctggagcaacaagatttttcgtggggtacctccagcaggtcctcaaaaatggttcacggaggccttcgttaccttgcatctggagattataaacttacaaaggaatctgttcaggagaggcaacgtcttttaaacgaggccccaggat

SEQ ID NO: 200096 - DNA, 982 bp, Unknown
  Bacterial polypeptide expressing nucleotide sequence isolated from the Sargasso Sea
ctggcatcactcaaaaacggcaaggacggtcgactggtcgttgtctcgcgcgacctggaacgggccgttgcggttccggcgattgcggcgaccatgctcgatgcggtcgagcgatggtccgaatgtgaaccgaaattgttggagatctacgagaatctgaatgccggagcggtagcggacgcatttgccttcgatagccgccaggccgcggcgccgttgccgcgtgctccgcagtggtgcgacggttcggcattcttgaatcatggccggctgatggaaaaagccttcggactgccgcccgtccctgacgtagaaaccatcccgttgatgtatcaaggagcatccgacgattttctgggcgcgcatgacgacgtgccgcttcccgacgaggccgatggaatcgatttcgaggccgaattcggtgtcgttgtcaacgccgtacccatggcatgttccgttgaggcggcgcgcgcgcacatcattctcctggtccagatcaatgacgtcagtctgcgcagcatggggccgcgtgaaatgaaaacggggttcggcttcctgcaggctaagccgtcctcggcattcgcgcccgtcgccgtgacgcctgacgaactcggcgacgcgtggcaccaatcgcgagttcagctcgatttgcagatttcgtggaatggggcatggttcggcaacccaaacggcagggagatgaacttcggatttgatcagttgattgcgcacgctgccaggacgcggcgtctgtcggccggcaccgtaatcggcagtggcaccgtgtcgaacgcggagcgtagccggggttcgggctgtatcgccgagcggcgcgccatcgaggtcattgatcaaggcgcgccgtcaacgcccttcatgaagtatggggattgggtccgaatggaagcattgctcgaggggaagcccctcttcggcgtgatcgaccaatgcattgtgtctgcgaatcttacccaaggataat

SEQ ID NO: 200097 - DNA, 700 bp, Unknown
  Bacterial polypeptide expressing nucleotide sequence isolated from the Sargasso Sea
aatggcgactccattcgcgcaaactagcggcggaatgaaaagtcgtgacggaaaatccaactcagaagtggggcgtgtgatgcgagacaaggaagagaaacgcgtcgacagcggccgccgtacctggctgattgcgacatccgtagcaggtggcgtgggaggcgtagccaccgtcatacctttcgcggcgtcgcttgcgccgtccgcgaaagcgaaagcggccggtgcaccggtcgaagtcgacatcagcgggctgaagcccggtgaaatggtgaccgttccgtggcgcggcaagccggtgtggatcctgaaccgcaccgacgcaatgctggccgacgtggtcaaggccgacaaggaagtggccgatccgaccaccgaaaagccctatacgatgccgttgcccgcgtattgcgcgaacgaatatcgcgcgcgggccgatcgcaagaacattctcgtcgtgatggccgtgtgtacgcacctcggctgcacgccaagccaacgcttcacgccgggtccgcagccgaacctgccggacgactggccgggcggcttcctctgcccgtgccatggttcgacctacgacctcgccggccgtgtgttcaagaacaaaccggcgcctcagaatctcgacatcccgccctacatgttcacgtcggcaacgaccctcgtgatcggcaaggacgagaaaggagaagcgtga

SEQ ID NO: 200098 - DNA, 1391 bp, Unknown
  Bacterial polypeptide expressing nucleotide sequence isolated from the Sargasso Sea
agagcaacaagacttctcatggggtacctctagtcgctcatcaaaaatggttcatggaggtttgagatatcttgcttcaggcgatatcaaacttaccaaagagtcggtgcaagaaagacagcgcctattgaaggaggctcctggattagtcgatccaatttctttttatttcacttttagaaagggtaaatttccaggccgcatagctatgaagattattttaactatctatgatttttttgctggggctcaagataatagattctgtaataatgaggaattactagagcgttttaaaggcctggatgataacaaacttcagggagcaagctgttatacagatgctatggtggatgattcgagattagttctccgtgtattgcaagacagcattgatgatggcggatatgcggtaaattatactaaagtagaagatctcttgttaacagatggtcgtgtttctggagtaagcattcaagatagaggtcattctggcttaattcatttaaatgctccagttgttattaacgctaccggagcttgggcagatagacttcgaaatgttgtgaataatgaaactcgaattagaccgttgcgtggcagtcacattattattgctaaatctttatttccaatatccgatgttatgacttttttgcacgttgatgacaagcgaggtgtttttgtttacccatgggagggcacaacagttattggaaccacagatatagatcataatgaagacatagatattgaggctggcatctccgatcaagaagtggattacttgctaaaagcttttaatagtcaatttccaagtaatgcacttaaacgaagtgatgtgctatctacttgggccggtgttcggcctgttattggtgcagaaaaaagtaaagatccttcaaaggaacgacgagatcatgctgtttggtctgataatggattaatcactgtaagcggtggcaaacttacaacttttcggttgatcgcgctagatgcgctggctgcggctaaggataatcttcctgcagccaaagaaattacagatgatcgtgtatttttgactccaaaagtttctgccgagaccctattaccaaaaaatattagctgggctcaacgtttacttggaagatatggcgaaaaagcaattgaacttttaaatgaaagttctaaggaggaacatgacaatcttgatgcaactgaattttcattagctgaatgtaggtgggcgataaagtatgaggcagtagaacatttagatgatttaatgctgcgaagaactcgtttaggcatgtgtcttccaaatggtggcagtactctttttccagctttaaagaattatttttatccaatcatagctgggacgacgaacggtggcaaaaagaggtaac

SEQ ID NO: 200099 - DNA, 865 bp, Unknown
  Bacterial polypeptide expressing nucleotide sequence isolated from the Sargasso Sea
aatgaatgattcgaccgacaaatatttaacattaaggggcgccaataatgatatttacttttttcagaaaagagtgaatgacactatagcagaagttattggaacaaacttcattaaaaagtccctcaaaacaaaaattctctctgaagctttagctaaaagggatgaaattcttgatgcgttagcaaatattgaaaaactaaaactcactaacattagtgatgaggttttaaatctttttaaagatgaagatttaagtactgagaaacttgatcaagcttctcatgaaagaagcttgcaaagaagaaaagtcttgattggtttaacgagtgcggttggcatcgctggacttccttttgcagctacaccattcattgctgcatggaatccaagtgcaaaagcaaaagcattagggtcctccgtaaaattagatgtttcaaaaatgcaatatggtcaacaaattcaagtagcctggagaaagcaacccatatttataatcagacatacttcagaggcattaaatcaacttgacaaatcagtcccaaaacttgctgatcctgaatctctctcaattgatgaaccttacagaggtagatttgtaacaagatctctcaattcagagtattctgttttatctggtatttgtactcatcttggttgttctccaaagtatcatccagaagttgaaccgaaaccatgggactcttcttggaatggaggatttttctgtccgtgccatggttcaatgttcgatcttgtcggaagggtgtataaaggtgttcctgcaccatcaaatttaacagttcctcctcatttttttgaggggagtattctcaccattggtgaggaaaggagtaatgtctaa

SEQ ID NO: 200100 - DNA, 1177 bp, Unknown
  Bacterial polypeptide expressing nucleotide sequence isolated from the Sargasso Sea
cgacgtacttgtagtaggcggtggaattaccggcgttggctgtgcactcgatgcggcatcacgaggaatgagcgtcgcccttgtcgaacagggggacatcgcatcgggcacatctagtcgctcaagcaagctaattcacggaggacttcgatatctggagcaattccaattcgctctggtaaaggaagcactctccgaaagaaatttgctcttaacaaacattgctcctcatcttgtacacagggtcgattttttatatccgctcaaaggtctgtcagaaagactgtatgccggcttagggatagggctttacgaccttttggcgcgcaggaaagggagtcctttgcctcggcatcggcacctaagcaaaaaacgtgttgctgctaaggcacccgcccttaattcgcgcctcaacaaaggcgcgataatgtactcagacgcaacggtcgatgatgcccgttacaccatttgcgcagcgcgcaccgccgctggtctaggtgcatcaattatcagctccgcaagggtaaccgggttgacaaaaaccaatgatcgagtcgcaggcgcactcataaaatgcctcgaatccggccaagaattcgaagtggggtgcaaaacggttgtaaatgctaccggtgtctggaccagcgaaattgaggctcacgcgggaatgcggcaatccagagttaccgcatcaaaggggatccaccttgtcgtagcagctgatcggttaaatcttaaatccggcatgattctccggacctcaacaagcgttcttttcgtgattccgaacggggaccactgggtgattggcacaactgactcagagtggcaattaaataaagctcatcccgccgccaccaaatgtgacatccgataccttctgcaaactattaactccgtcattgcatccccattatccgaagaggacgtcatcggtgtttatgcagggctgcgccccctactaaccggcgaatcagatacaacaagtcaactgagccgtgaacacgcagttacccatcctgcccctggcttggtgtcgatttcaggaggaaagtacacaacctacagagtcatggctgcagaaacgattgacgcagtcggagtggaccaagaccgaaaacttccgcactccaaaaccgaaaatctccctctcataggggccaatggctttgacacc

SEQ ID NO: 200101 - DNA, 964 bp, Unknown
  Bacterial polypeptide expressing nucleotide sequence isolated from the Sargasso Sea
atgaaagttgctgtactaggtaaagttgaccaaaaaggcttatcgtttttgaaagaaaacgaattcaaagtcattgaaattgagaattttgaaatacaaaacttaaaggaacgattaaaagatgttgatggaattttattaagaactacaagacttgataaagaaattttacaacattgtgacaatttaaaaatcgtatcaagacatggagttggttacgataacgttgatcttgattttctcaatgagaacaaaattgcgcttagtattacatctacttctaatgctgtaagtgttgccgaacatgtattatcatttttcatttatttaacaaaaaaaatatctctatcagatagtctggttaaagaaggtaattttgaaaaaagatctagtttacccaatttttttgaattgtataaaaagaaagtacttattattggttttggtagaataggaaaagaagttgctaagagatgtctcggatttgatatggaagtatatgtatatgatccttttttagataatgaaataataattagaagtcaatgtataccgattgagaaaaaccaaggtttagctatagctgattttattaccatccatttaccattaaatatagatactaagaactttatctcccaaacagaattaaatgtgatgaaaaagaactctattcttgttaatacatcgagaggtggaatcgttaacgaaaatgacttatgtatagcattagagtcaaaaaaaattcaaggtgcaggaatggatgtgtttgtatctgagccacctgagtccaatcatcctttttttaagttagataatatattgctgacacctcacaatgcagcattaacattagaatgtagggagaggatgtctttagaagcttcacaaaatattgtttttttcttaaagaacatgagtgaattaaatgttcaaaatttagtgaataaaaaatatttataaa

SEQ ID NO: 200102 - DNA, 1012 bp, Unknown
  Bacterial polypeptide expressing nucleotide sequence isolated from the Sargasso Sea
aatgaatacttttgactacataatcgctggagcaggttcagcaggttgcgttttagcaaatcgactctctaaagatcctggtacaaaggttcttttaatcgaagcgggtggaactacgtggcatccatttgttaaaatgccagcaggtgtacttgagcttatttctggtgaaggtgctggtaaattttataattatggctattggacagagggtcaaccacatttaaataatagaaaacttttctttcctcgaggtaaaggcttgggtggctcaagcaatattaatggaatgctttacgtgagaggtcactcacgtgattatgatatatggagacagcttggtaatgaaggatggtcttatgaggaagtgttgccttattttaaaagagctgaaaaaaatgaaaatggatcatcagaatttcatggaagtgatggagagctaagtgttcaaaatccagtttttactaataatcctctacatcgatgttttttaaacgctggtaaagaggcaggctataaatacattgaagacattaatgaatatgataatgagggttttggaccatgtcctcaaacgatttcaaaagggtacagagctagtacgagtttttcatttttaaatcctattaaagaaagaaaaaatttaacgattgcaaccaattcaacaactaacaaactattattcgagggcacaaaatgtgttgggcttgagtatttaaaaggaaaagaagttataaaagcttacgctgaaagggaagtaattgtatgtggaggtgctattaactcacctcagatattgcaactttcaggaataggtaaaggagattacataaaaaaatggggattaaaagttgtagccgaccttccgggagtaggtgaaaatttacaagaccatttggatgtattatctcactacgagtgtacacagccagtaacggaagcaaaatatacagcgggtggacttgcattatttaggatggcggccatcttggctcaatggatgataacaaaa

SEQ ID NO: 200103 - DNA, 1141 bp, Unknown
  Bacterial polypeptide expressing nucleotide sequence isolated from the Sargasso Sea
atgaacacttttgattacataattgcaggagctggttcagccggttgcgttttagcgaataggctttccaaagatcctgatataaaagttcttttaatcgaggctggtggcacaacatggcatccgtttgttaaaatgccagcaggtgtgctcgagttaatttctggtgaaggtgctggtaaattttataattatggctattggacggagggtcaaccacatttaaataatagaaaacttttctttcctcgaggtaaaggtctaggtggctcaagcaatattaatggaatgctctacgtgagaggtcactcacgtgattacgatatatggagacagcttggaaatgagggatggtcttacgaggaagtgctgccttattttaaaagagctgaaaaaaatgaaaacggatcatcggaatttcatggtagcgatggagagttgagtgttcaaaatccagtctttacaaataatcctctgcatcggtgctttttaaatgctggtaaagaggcaggctataaatacattgaggacattaatcaacacgataatgagggttttggaccttgtcctcaaacgatttcaaaaggctatagagcaagtacgagtttttcatttttaaatcctattaaagatagaaaaaatttaactattgcaactaattcaataactaacaaactattatttgatggcacaaaatgtgttgggcttgagtatttaaaaggaaaagaagttataaaagcttatgcagaaagggaagtaattgtatgtggaggtgctattaattcgccacaaatattacaactatcaggaataggtaaaggagattacattaaaaaatggggattaaaagttgtagctgatcttccaggagtaggtgaaaatttacaggaccatttagatgtattatctcattacgagtgcacgcagccagtaacggaagcaaaatatacagcaggtggacttgcagtatttagaatggccgcaattttagctcaatggatgataactaaaaaagggccaggaaatgacattggtttatcaggtgtatcatttttaaaaacagatgacacacttgacctacctgatattcaaatgcactttattggatcacttttaaaagaccatggaaagacaagacctg

SEQ ID NO: 200104 - DNA, 1144 bp, Unknown
  Bacterial polypeptide expressing nucleotide sequence isolated from the Sargasso Sea
attacgattacttgtcggttacgtgagcatgagcaaaacctcgaaaaacttgtgcaaaagcaaaccttagagctgtctgaacaggcacttgaattaaaacaagctcagtcactcagtggcgtaggcagttggcatctgtcgcctgataaaagcattaggcaattatcatcacaagctaaatcgctattcaaagaacaaagcaaagcgcaatcaattactgatgtctgtaaaaaaatcgatagtttttataaaaattcgtttttaaattttattcatactaagcctagtagcccgactgaaattgaatacacgattaaactcaatggagaaaaacgctggtttcatgaacacgctgaatggaaccctaaaaccaacaccttggttggtacaattaaagacatcagtgctgaaaaacaacgccaacatgagctttaccaacaagcacattttgactcggtcaccggccttgccaatcgccattacagcgaaaaatatatcgctagtttatgccctgaagaccaatacagtagcggccttactttattgtgtgccgaaatcaaaggctatcgtcaattagaagatatatacggtcaagattacttaaatgaactacagacaacgctagctaaccggctaattgaattttctgacttacatcaagcgttttgcgctcatataaaacctggctgttttttaatattactaaaagaagccatttttgatgaaaaactcgccgccctattagatagattacagcatcaggtcggcggtattattgaaaccgctggtagcgctcatttttaccacttatacattggcgtgggctatccgcatttacaaaatatcgatgcagctgagcaaatcaacacagccctcattgcgatgaatgaatgccctcgcacacaaaaacccttcacagtttatagccaatctctaaaagataagcttattgcacaaagtaacctcgaaagtgacttacgccatgcgctttcggctaacgagcagctaagtatggtgtatcagccaattgtaaataccctcgatggcacactgattggctgtgaagcactggttcgctggcagcaccctgtaagaggctttgtgtcacctgttgagtttattgccatcgctgagcaatcagagc

SEQ ID NO: 200105 - DNA, 1346 bp, Unknown
  Bacterial polypeptide expressing nucleotide sequence isolated from the Sargasso Sea
catgaagctgagtcgacgcgactttatgaaggccaacgcggtggcggcagccgctgccgttgctggtgtcagtgcccccacgctggcggccaatctgatcaccagtaccgacaagaccgccatcacctgggacaaggcaccgtgccgtttctgcggtaccggctgttccgtgctggtgggttcccaggatgggcgcgtcgtggcgacccagggcgatcccgatgcaccggtcaaccgcggtcttaactgcatcaagggttacttcctgtccaagatcatgtatggccaggacaggctgacccagcccatgctgcgcatgacggacggcaagttcgacaagaacggcaacttcgcccccatcagctgggatcaggccttcgacatcatggccgagaagttcaaggccaccctcaaagagaagggaccgaccgccgtcggcatgttcggctccggccagtggaccgtgtgggagggctatgccgctgccaagctgatgaaggcgggtctgcgcaccaacaacctggatcccaatgcccgtcactgcatggcttccgcggtagtgggcttcatgcgtaccttcggcatggatgaacccatgggctgctacgacgacatcgagcaggccgacgccttcgtgttgtggggctccaacatggccgagatgcaccctattctctggtcacgcatctccgatcgccgtctgtcccatcaggatgtgcaggtgcacgtgctctccaccttcgagcaccgcagcttcgagctggcagacaacggcatggtgttcaccccgcagaccgacttggcgatcctcaactacatcgccaactacatcatccagaacgacaaggtgaactgggagttcgtcaacaagcacacccagttccgcaaaggggtgaccgacatcggttacggcctgcgtcccaccaacccgctgcagcagaaggccaagaacccggacagcggcgactccaccccgatgagcttcgacgacttcgccaagttcgtggcggattacgatctggagtctgtctccaagctctccggcgtgccgaaggacaagctcgagaagctggcccagctctatgccgatccgagcaagaaggtggtctcctactggaccatgggcttcaaccagcatacccgcggtgtctgggccaacaacctctgctacaacatccacctgctgaccggcaagatctctaccccgggctcgggtccgttctccctgaccggccagccctccgcctgcggtaccgcccgtgaagtgggtaccttcgcccaccgtctgccggccgacatggtggtgaccgaacccaagcatcgcgccatcgccgagaagatctgga

SEQ ID NO: 200106 - DNA, 1454 bp, Unknown
  Bacterial polypeptide expressing nucleotide sequence isolated from the Sargasso Sea
gccggtcaatgcccagtacatccgcaacctgatcattgcggcccacaacatccacgatcacatcgtccacttctatcagctctccgcgctggactgggtggacatcaccgccgcactgcaggccaatccgcaaaaagcggccgacctgctcaagggggtatcgacctggtcccttaacagcgccgacgagctgaccaaggtgcaggacaagatccgcgccctggtggcgagcggccagctcggcatcttcgccaacggctattggggccacaaggcgatgaagctgagcccggaggtgaacctcattgccgtggcccactacctgcaggcactggagtgccagcgcgatgccaaccgcatcgtcgccatcctgggtggcaagaccccccacatccagaacctggcggtgggcggggtggccaaccccatcaatctggatgcgccgagcgtgctcaacctggagcggctgctctacgtgaagagctttatcgaccggctcggcgagttcatcgagcaggtctacaaggtggatgccgccatcatagccgcgcactaccccgagtggctgaacctggggcagggggccaagcactacctgagcgtgcctgagctgcccaccgacggtgacggcggcagcttcctgatgcccggtggctacatcgagaacggtgatctggccggctatcgtcccatcgagagccatcaggatgtctggctgatggatggcatcgcggagagcaacaagcacgcctggtacaaggatgacgaacccctcaagccgtgggagggcaagaccgagcccaactacaccggctggcaggatgacggcaagtactcctgggtcaaatcccccaccttctacggcaaggtggtggaggtggggccgctcgccgacctcctggtcaagctcgcggccaagcacccggagacggtggcgcactttgatcagctgaacggcctctacaagacgctgactggctctgccatcaagaccgaacagctgcactccaccctgggccgcatcatcggtcgggcggtgcgctgctgcgtgctgaaagacaccttgtcccatcagtggaaggcgctggtggacaacatcggcaagggggatttcagcgcctacatcaagaccgagatcccggcggacaaggagtttcgcggggtgggctttgaagaggcgccgcgcggcatgctctcccactggatcgtcatcaagggcggcaagatcgagaactatcaggcggtggtgccatcgacgtggaactcgggcccgcgcaacttcaacgacgaacccggcccctacgagcaatccctggtaggcaccccggtggtcgacccggccaagccgctggaggtggtgcgcaccatccactcgttcgacccttgcatgtcctgcgcagtccatgtggtggatacccagagcggcgacgtgactcaggtgaaggtgctgtgat

SEQ ID NO: 200107 - DNA, 575 bp, Unknown
  Bacterial polypeptide expressing nucleotide sequence isolated from the Sargasso Sea
catggacacacatgcagccctctatgaacagggaaaggcgcgcttagatgcgttgcgccaattagctccccgtcaacagcagacattactcgataaattacaacaacatggcatcacacgccgtgactttatgaaatggagtgcgatggtaacgggtatgctcgccctaccactcccctttagtaacttagttgcagaggccgccgaattagccgaccgtgtacccttaatttggttacatatggctgaatgtactggctgctccgaatccttagttcgtgccgacacccccaacctagattcgctgatcttcgatcatatctccttggaatatcacgaaaccttgatggcagctgcgggttggcaagcagaggaaaacctcgagcacgccttagaaacctacaagggtcgctacctgctcgcggtggaaggcgcgataccgaccgccaataacggcagcttcttgaccgtgggctgtaaaggccatacaggcttagaaattatcaaacatgccgccgaaagcgccgcagcgattatctctgtgggcacctgtgcatccttcggtggtgtaccag

SEQ ID NO: 200108 - DNA, 394 bp, Unknown
  Bacterial polypeptide expressing nucleotide sequence isolated from the Sargasso Sea
catgagcaagcgcgttgttatcgaccctatcacccgtatcgagggtcacttacgtatcgaagttgaagttgatgagaataatgtcatcaacaaagcatggtcatcctctacgttatggcgtggtattgaagttattctcaaaggccgtacgcctatggacgtgggcctcattgtgcaacgtatctgtggtgtatgtacttattcgcactatcgctgtggtaccgaagcggtagaaaatgctttagggattcaaattcccttgaatgcaaagtatcttcgctcgctgatgcaaacatcgctctatatgcatgaccatatagtgcacttctatcatctccatggcttagattgggtcgatgtggtttcagcactcagtgcagaccccgctaaggcc

SEQ ID NO: 200109 - DNA, 389 bp, Unknown
  Bacterial polypeptide expressing nucleotide sequence isolated from the Sargasso Sea
catggacacacatgcagccctctatgaacagggaaaggcgcgcttagatgcgttgcgccaattagctccccgtcaacagcagacattactcgataaattacaacaacatggcatcacacgccgtgactttatgaaatggagtgcgatggtaacgggtatgctcgccctaccactcccctttagtaacttagttgcagaggccgccgaattagccgaccgtgtacccttaatttggttacatatggctgaatgtactggctgctccgaatccttagttcgtgccgacacccccaacctagattcgctgatcttcgatcatatctccttggaatatcacgaaaccttgatggcagctgcgggttggcaagcagaggaaaacctcgagcacg

SEQ ID NO: 200110 - DNA, 1705 bp, Unknown
  Bacterial polypeptide expressing nucleotide sequence isolated from the Sargasso Sea
catgagcaagcgcgttgttatcgaccctatcacccgtatcgagggtcacttacgtatcgaagttgaagttgatgagaataatgtcatcaacaaagcatggtcatcctctacgttatggcgtggtattgaagttattctcaaaggccgtacgcctatggacgtgggcctcattgtgcaacgtatctgtggtgtatgtacttattcgcactatcgctgtggtaccgaagcggtagaaaatgctttagggattcaaattcccttgaatgcaaagtatcttcgctcgctgatgcaaacatcgctctatatgcatgaccatatagtgcacttctatcatctccatggcttagattgggtcgatgtggtttcagcactcagtgcagaccccgctaaggccgcccaagtcgccctcaaatataccgataaacctatcgccgctggagaaggtgaattaagggctgtgcaagagcgcgtaaaaggctttgtagaaaccggaaaacttggtccattcgccaacgcttattggggtaatggcacctataagtttacccctgaacaaaacctgattgctctatctcactaccttaaagcccttgaagtacaaagagttgccgccgaaatgcttgcaatattcggcggtaaacagccacatcctcaatcattagttgtcggtggcgtgacttctgtacgcgatatgttaagccctgcacgtctgcaagaatggaagcaaaaacacgcaatcgtaactgactttatcctgcgtgcttatcaggccgatatcgtgatggcagccgaagcctttggcactgagcctagcgtgctaggcggcgtcaatgttaaaaacttcatggcaacccatgactttgtgctcgccaatggcgaatatatgttcgatcaaggcgtgattatgaatggcgatttagcaggtgtgagcgatattaaccctgatcttattgccgaggatgtcagccacgcttggtacaatgctgatgcgccgcaacatccgtatgatggcaccaccattccaaactataccggctttattgagcgggatacggtttacggcaaactgcccaccttagatggtgatggtaaatactcttgggtgaaatcaccgcgttatcaaggtgaacctgtcgaagtgggcccactgtcttgtttattagtcagttatgcccgtggcaataaagtggttgtcgatgccgtcaatgcactgcttacgcgcacaggtcttccagtggaagcactctttaccactttaggccgcaccgctgcacggatgctgcaaacggtgatagtcgcgcaggaaggtctgaaaaccttcgaagccttattaacaaacattcagtctgatgaaaccacctatgtgaaaccccatatcgatcctagtaaagagtatgtgggtcacgccatgattgaagcgccccgcggcatgctaagccactggatccgaatcaaaaatggtgtcattgagaactatcaagccgtggtgcctactacctggaacgcaggtcccgtggatgctaatggcaagataggcccctatgaagcctcactgattggtttgaaactggaagatcccactaaaccccttgaggtgatacgtattattcactcatttgacccttgcatggcgtgttctgtacacgtgatggattttaaaggtcaggcattgagcgagttccgtgttagccccaatggtcaataa

SEQ ID NO: 200111 - DNA, 1705 bp, Unknown
  Bacterial polypeptide expressing nucleotide sequence isolated from the Sargasso Sea
catgagcaagcgcgttgttatcgaccctatcacccgtatcgagggtcacttacgtattgaagtcgaagttgatgagaataatgtcatcaacaaggcatggtcttcctctaccctgtggcgtggtattgaagtgattttgaaaggccgcacgccaatggacgtgggtcttatcgtgcagcggatctgcggtgtttgtacctattcccactatcgctgtggtactgaagcggtggaaaatgccttaggcattcaaatcccgttaaacgctaaatacctgcgctccttaatgcaaacctcgctctatatgcatgaccatatagtgcatttctatcatctacacggtttagactgggtcgatgtggtctccgccttaagtgccgatcctgctaaggccgctcaggtcgccctcaaatataccgacaagccgattgctgcgggcgaaggtgaattaagagcagtgcaagagcgggtgaaaggctttgtcgaaacaggcaaactcggccccttcgctaacgcttactggggcaatggcacctataaatttaccccagagcaaaacctgattgccctgtcgcactatctcaaggcccttgaagtgcaacgggttgccgccgaaatgctggcgattttcgggggtaaacagccacatccacaatcattggttgtgggcggtgtcacctcagtgcgcgatatgttaagccctgcgcgcctgcaggaatggaagcaaaaacatgccatagtggccgactttatcctgcgcgcctatcaggccgatatcgtgatggcggcggaagcctttggtggtgaagccagcgtacttggcggcgtgaacgttaaaaacttcatggcaaccaatgactttgtgctcgccaatggcgaatacctgttcgaccaaggcgtgatcatgaagggcgacttagcgggtgtgagcgacattaaccctgagcttatcgccgaagacgtaagccatgcatggtacaccgccgatgcgccgcaacatccctacgatggcactaccattcctaactacactggctttgttgagcgggatacggtttacggcaaactgccgaccttagatggcgatggtaaatactcttgggtgaaatcgccacgttaccaaggcgaacccgtggaagtgggtccattgtcctgcctgctggtgagctatgcccgtggcaataaggtagtggtcgatgccgtgaatgcgttattagcccgtactggtttgcccgttgaagcactgtttaccacactgggccgcaccgctgcacgtatgctgcaaacggttatcgtggcgcaggaaggtctaagaaccttcgatgccctgctcactaatattcaatccgatgaaaccacctatgtgaagcctcacattgatccgagtaaggaatatgtgggtcacgccatgattgaagcgccacgcggcatgttaagccactggatccgcatcaaaaacggcgtcattgagaactatcaagccgtcgtgcccaccacctggaacgcaggccctgtagatgctaatggcaagataggtccctatgaagcctcactgattggcttaaaactggaagatcccactaaaccccttgaggtgatacgtattattcactcattcgacccttgtatggcgtgttctgtacacgtgatggatttcaaaggtcaagcattgagcgagttccgtgtcagccccaatggtcaataa

SEQ ID NO: 200112 - DNA, 871 bp, Unknown
  Bacterial polypeptide expressing nucleotide sequence isolated from the Sargasso Sea
aaagcacatgttaataaaattaattttgaaggaaaaaaagcaattggtatttcttattggagagataatgagttaatcaccgtaaaggccaataaagaagttattttatccgctggatcaattggttctcctcatattcttcaagtatctggaattggtgatgagaaaaaactcggaagtttaggaatatccgtaaaacatcacaactcaagcgttgggcaaaacttacaagatcatctgatgttaaggcctgtttataaagttaaaaacatcaaaacactgaacaaaactataaacagtttttttggaaaaatgatgattggtatggaatttgtttttttcagaagaggtgtaatgacgatgggggcaagtcaactttgtggttttgctaaaagtgatgatagtagggaaacaccaaatttacaatttcatgttcaacctattagcactgaccgattaggaggtgccagtctgcataagtttaatgcctttactccaactgttgcaaatataaggccaactagtagaggagaagtatatataatctcaagcgactctagagattatccaaaaataaaaatgaattatctttcaactgaagatgatcgccaagtatcagctgcaggtattagattggtaagaaaaattatttttgagagtgaaacattcaaaaaatatcaaccagaagagtttagaccaggtataaattatcaaagtgatgaagaaattatagaagcttcaagtgcacatgttcaaacaatttttcatcctgttggaacttgtaagatgggaagtgacagcacctccgtagttagtgataagcttaaagttcatggtattgaaaatttgagagttgttgatgcatcgaatt

SEQ ID NO: 200113 - DNA, 487 bp, Unknown
  Bacterial polypeptide expressing nucleotide sequence isolated from the Sargasso Sea
atgaatagaatcaggatatttctttttctttgtttcgttcttttattttcgtgcgaaaaaaatattgattggaatgtttacggtggctcatacaaaaggacgcagtttgtcaattcagaaaagctgaacctaaataatatctcaaatctcaagaaagtttgggaatatagctcagctgacaatgataatttttcacagattcaaactaatccactaattataaatgacaagttttatggtgtgtctccaaagctcaaattattttctctagaagctaaatcaggttcagaaatatgggtatttgatccttttaatagtgattataatttttttgacaatgatgattcaagagtaaatgtttgtaggggaattacatattttaaagataattctaaacaggcttttattttttatgcggtagggtctaaattatttaaggtgaatattaaaaatggtattgcagattcaagttttggtaataatggat

SEQ ID NO: 200114 - DNA, 765 bp, Unknown
  Bacterial polypeptide expressing nucleotide sequence isolated from the Sargasso Sea
aatggataatgttctagttataggtgcgggtggtgtcagccatgtaacgatccacaaaatggcacaaaattctaattattttaaaaatataattttagcaagtagatctataaaaaaatgctttcaaattaaaaaaagtgttaaaaatagttataatattaacattgaagtagcagagctggatgctgataatgttgatgaaacagtagaattaataaaaaaatttaaaccttttttggttgttaatctagcccttccttatcaagacctcaatataatggatgcttgtttattcacaaatacacattatttagacacggccaattatgaacctagaaatgaagcaaaatttgagtacaaatggcaatggaattatcataaaaaattcaaacaaaagggtcttatggctcttttaggatcaggttttgatcctggtgttacaaatgtttttacaacctttactagaaaacatcatttagataacattgattttttagatattctcgactgtaatgatggcgatcacgggcacccatttgcaactaattttaatcctgaaattaatattagagaggttactgcaaattctaaacattgggataataataaatgggagattggaccagctcttaagaaaaaggtttcatttaaatttcctgaaattggaaataaaaatatgtacttaatgtatcacgaagaattagagagtttaacaaaacattttcctgaaattaaaagagcaagattttggatgacattcggtga

SEQ ID NO: 200115 - DNA, 910 bp, Unknown
  Bacterial polypeptide expressing nucleotide sequence isolated from the Sargasso Sea
cttgatcccaaataatttatctaaagaaattaatagtaataaaatatttgttagtatttcatcaaattataaacagataactataatcatcttctcatcactatttattttaggaattataggttctacatttttaaaggtcgaaaatagttttgtagactatttcaaaaaagatacagaaatatataaaggtatgaaattgattgatgaaaagcttgggggcacaacaccacttgatattattatagaatttgacacaaacacgaccgaagctgaaaattttgatgatgaagacctgcttgattttggtattgcttatgatccaactgactattggtttacgaaagaaaaaattgatttaataaaaaatattcatgatcatcttgaaacttataattttgctggaaaggttttgtctttggcgtctgtgataagagtagcagaatctttaaattctggtaatgaatttgatagcttagagttagctgttttgtataagaaattacccactaaattaaaagatcaaatattaaaaccttatgttcaaattgaaaaaaatcaagctaggattacaatgcgtctaattgatactcatcctgatttaaaaagatctgattttgtaaatgatttaaatgattatttcacagaaaatattaatacagataatataaatgcgtattcaaccggtgtattgatactctacaataatatgcttgagagtctttttgactcgcaaattaaatcacttggaatagttttaataggcatatttgttatgctagtctttttatttaaatccttatcgatcgctatcattgcaataataccaaatataattgcttgttttgtcatacttggaacgatgggttatcttggaatacctcttgatttaatgacaatcacaattgct

SEQ ID NO: 200116 - DNA, 754 bp, Unknown
  Bacterial polypeptide expressing nucleotide sequence isolated from the Sargasso Sea
gatggggtatacaacaccatatgcaaggaaattatatagaattttgacaaaagagtcatttctttttactgaaatgattgcatcaaaatcaatgatatattctaaaagtaaggatttaattattgaaaacgatgaacataatccagtagctcttcaagttggaggatctgatttggaggatcttaggaaatgctcaaaaattgcacatcaatataattacaatgaaattaatcttaatgttggctgtccaagcaaagctgttcagaaaggaagctttggcgcttgtcttatgcaggataaagtactagtcaaagaatgtttagaagtaatgcaaaataataaaatacaagtatccttgaaatgtagaattggattaggtaagaaattaaattataatttttttgaagaatttattgatgaagttgtaaagagtggaataaaaattatttatgttcatgcaagaaatgcaatattaactggcataagtcctgctcaaaatcgttctatcccacctttagattatagttttataagaaaaataaaattaaaatatcctaatattttatttgtattaaatggagggattgatagcttggaaaatgctaagctattattgagggaatttgacggtgttatggtcggtcgcttgatacaaaataatcctttcttattaaaaaaagtagatagttatatttataatttagatgattcgagtaatattaatgaaaaattaatatttgattattttaattat

SEQ ID NO: 200117 - DNA, 852 bp, Unknown
  Bacterial polypeptide expressing nucleotide sequence isolated from the Sargasso Sea
ttttcaggttacagagaggaatggattaagatgcagtactgcagttggatatctaaatcctgttaaaaaaaataaaaacttaaaaattgaaacaaattgtcatgttcaaaaaataaattttgatgggaataacgcagatagcgttacttatttaaagggacatgaaacttttactgtcaaagccgagaaggaaattttactttgtgcgggatcaattggaagtcctcatatacttcaggcttcaggtgttggagaagcctcaaaaataaaagatttgggaattaatatcatcaaagatcttaaaggtgtcggtaaaaaccttcaagaccatctgatgttcaggccagtttataaagttaaaaacataaaaactttaaataagaaaatcaatagtatgtttggtaaactactaattggaattgaatatgtctttaaaagaagaggtccaatgactatgggtgccagtcaactttgtggttttgctaaaagtgatccaagtagagatacaccaaatttacaatttcatattcaaccaattagtactgacaaattaggaggtgcaaaccttcatgattttcatgcttttaccccaactgtcgcaaatataagaccaacaagtagaggtgaaatatcaataagtagtagtgacacaaaagtaaacccaaagattaaaatgaactatctatctactgacgaggatagaaaagttgctgctgatggtattaagttgataagaaaaattgtaatggaaacaaatgagtttaaaaaatatgagcccgaggaatttaggcctggctcacatttgaatgagaaagaggaaatagtaaaagcttgtagtcattatgcccaaac

SEQ ID NO: 200118 - DNA, 1066 bp, Unknown
  Bacterial polypeptide expressing nucleotide sequence isolated from the Sargasso Sea
atggttgagtccaaaataaatcgatgggtaaaacaagaaatacttaatcaatccatatacaaagtaaacaataaaaatactccaattaaactaaatcaaaatgaaagtccagttgattggccaatagaaattagaaaaaaattactgtcaagtttcaatgattatcaatggaaccgttatccagaaatcaatggtgaaaatcttcgaaaaaaactggcgaaaaaacttcaattatctaagagtcagattgttattggaaaaggttcaaatgaagtaatccaagctattacaacagccacactcacgcatggagacattgtctgtcatttgtctccaacctttactatctattcattattgtcgcaacagagaggtgcaaaaattgttgaatcgaaattagatagtgagttcaatgttgttttagaagacttaattaataaatcttctatggcgaaacttacctttattgcaaacccaaattctccaactggtaaattattgcccgtagaaataataaaaaaagtagctgaacaaacttcgggccttctgattgtagacgaagcatacattgatttttccgggggaagtgctcttcctttacttgaaagcaatgataatattataattactcgaactttttcgaaagcatggtccttagcatcttttcgattgggatatggaataatgagtgatgaccttgcttcggaaattcaaaaatgtatgcttccattcaatattgatagtcctgcaactttagctggacatcttcttttagaccatgccgatattattaaagaactaatatctagtatagtaaaggaaagagaaaagcttataattaagttaaacgaacttcatgacattaaggcatggccatcatcaacaaacttttttatgcttgaaacacctattcttccctctgtgctatttcataaacttgctgaggatggaattcttgtaagagatatatcttcatacccactttgcaagaaggtagtccgtgtaactgtaggtacagctaaagagaataaatgtttttataaaactattactaatttactatgaa

SEQ ID NO: 200119 - DNA, 887 bp, Unknown
  Bacterial polypeptide expressing nucleotide sequence isolated from the Sargasso Sea
ttggatcacttcagacggtaatgctgggccctcaggaacgggcggctttaaagccgaaatagggcgctatcatctgtatgtttctttagcgtgcccttgggctcaccgaactttgattttacgaagtttaaaaggtttggagcctttcatttctgtgtctgttgttcactggtttatggctggggatggatggacatttgaacctggtgaggacgttattcccgatacgataaatggctttaaatttttgcatcaggtttatactgcagccgctcctgactactcggggagagtaacagtacctgttttgtgggataaaaaaagtaaaacaatagtatccaatgagtcttcggaaattatacgcatgttgaataatacgtttgacgatttaggagcgaaaccgggtgattactatcctgaagaatttcgtccagaaattgatgacattaacaagcgcgtatattcttcgttaaataatggtgtctataaatgtggatttgcaacgacccaaacggcctatgaagaggctctagttccactttttgatacgttagactggcttgaagaaaagttgtcgagcaatcgttatcttttaggaaatttcataactgaagcagactggagacttttcaccacattggtacgttttgatccagtatatgttggtcactttaagtgtaacattcgacgtttaatggattacccaaacctttctggttatgtgcgtgacctttaccaagtgcccggtgtggcagagacagtaaatatgcaacatattaaaaagcattattatggcagtcatgaaacgattaacccaactcgaattattcccgccgggccctatatagattattctgagcctcattcgcgggccgacttaaactaat

SEQ ID NO: 200120 - DNA, 604 bp, Unknown
  Bacterial polypeptide expressing nucleotide sequence isolated from the Sargasso Sea
cttgtttgaccgccacctgatccccgttatccgcagccccctcacccggctcgccagaccgctctgccacgccgggatcagcgccaaccaggtaagcctcaccggctttgccatcggcatgctggcgttgccgttgctggcctttggctgctatcaatgggcgctggcggcgatcctgctcaaccggctgctggacggactcgacggcgccgtggcgcgggaaaccggcatcaccgactgcggcggctttctcgacatcacgctggatttcatcttctacgccgccgtggtgctgggctttgccctcgccacccccgccaatgcgctgcccgccgccaccctgctgtttgccttcatgggcaccggctcgagctttctggcatttgccatcatggcaggcaagcggggcatcgacaatccggtctaccaccacaagtccctctactatctgggcggcctcaccgaggggagcgaaaccatcgccctgttcgtgctgatgtgcctgtggcccgccgccttcgccccgctcgcctacggctttgccctgctctgcgccatcaccaccctgacccggctctggagcggttaccacaccctgcgttga

SEQ ID NO: 200121 - DNA, 558 bp, Unknown
  Bacterial polypeptide expressing nucleotide sequence isolated from the Sargasso Sea
cagagaagatcggctactggcgttacatcgccatctaccggcacctggagaagaacccggacagcaagatcttcccgatcttcaacttcttcgagaactggtgtcaggacgagaaccgccatggtgatttcttcgacgccctgatgaaggctcagcccgacaccgtgcgtggccccatcgccaggttgtggtgccggttcttcctgctggctgtgttcgccaccatgtacgtgcgtgatgtggcccgcaaggagttctacgagtcactcggcctggacgcccgcacctacgaccgcatggtgatcgacaagacgaacgagacctcggcccgcgttttcccggtcgtgctcgatgtgcgcaatgacaagttctgggagcgcctcgagcagttggtgagtaacaacgcagctcttcaggctgcggatgccggcacgtcccctgcgcctgtgcgtctgatccgcaagctcccccactggataggcaacgtctccgtgatggcgaaattgttcctgatgtctccgatccccagtgatcgtttccagcccgccgtccgctgac

SEQ ID NO: 200122 - DNA, 170 bp, Unknown
  Bacterial polypeptide expressing nucleotide sequence isolated from the Sargasso Sea
atttctgatagccgcgatgaccgaaaacgcgaacgggttagatgcgctggatgatagcttttcattataccgttgccatacgattatgaattgcgccaagacctgtccgaaaggtttaaaccccggaaaggcaattgcaggtattaaaagtgaaatgggacaacgttagc

SEQ ID NO: 200123 - DNA, 322 bp, Unknown
  Bacterial polypeptide expressing nucleotide sequence isolated from the Sargasso Sea
tatgaaatcttataatattatagatcatgaatacgatgtcgttgtccttggtgctggaggttctggcctaagagctgcggttggtttaagtgaagctggattaaaaactgcatgcatttctaaagtctttccaaccagaagtcatacatcagctgcccaaggtggaatttcagcagcccttggaaacatgggagaagacgattggcgttggcatatgtacgatactgtaaaaggagcagattggttaggcgatcaagatagtattgaatatttgtgtaaggaagctccaaaagcagttttagaattagaaaagtatggtgtt

SEQ ID NO: 200124 - DNA, 223 bp, Unknown
  Bacterial polypeptide expressing nucleotide sequence isolated from the Sargasso Sea
tatgagttcttataaaattatagatcatgaatatgacgtggtagtcttaggtgctggtggttcgggtttaagagctgcggttggtctgagtgaggcaggactaaagactgcgtgtatttcaaaagtttttccaacgagaagtcatacttctgctgcacaagggggtatttcagctgcccttggtaatatgggcgaggatgattggcgttggcacatgtatgat

SEQ ID NO: 200125 - DNA, 304 bp, Unknown
  Bacterial polypeptide expressing nucleotide sequence isolated from the Sargasso Sea
gatggttgaatttactttaccttccaattcgaaagtacaaaaaggtattacccatccagtaaaggaagtatcaaaaaaaccaaagaaggttgtaatttatcgttggaatcctgaagataaagataatccccgtttagatagttatgaaattgatttaagtaaatgtggcccaatggttttggatgctttaatgaaaataaagaatgaaattgactcttcattaacctttagaagatcttgccgcgagggagtttgtggttcctgtgccatgaatatagatggggtcaataccttggcatgttta

SEQ ID NO: 200126 - DNA, 111 bp, Unknown
  Bacterial polypeptide expressing nucleotide sequence isolated from the Sargasso Sea
aaaactatttccaacaagaagtcatacggtagctgcacaagggggggtagctgctgcactcggaaatatgggtgaggatgattggaaatggcacatgtatgaaaccgtgaa

SEQ ID NO: 200127 - DNA, 244 bp, Unknown
  Bacterial polypeptide expressing nucleotide sequence isolated from the Sargasso Sea
atggatagttataaaattataaatcatcaacacgacgcaatagtcattggagcaggaggctctggattaagagcaaccatgggattagctcaatctaaacatagcgttgcttgtattagtaaagtttttcctaccagaagccatactgtagccgctcaaggtggtattagtggcgccctgggtaacatgggtgaagatgattggcgttggcatatgtacgacacagtaaaaggttctgattggt

SEQ ID NO: 200128 - DNA, 391 bp, Unknown
  Bacterial polypeptide expressing nucleotide sequence isolated from the Sargasso Sea
gatggttgaatttactttacctgccaattcaaaagtacaaaaaggtgttactcatccagtaaaagaagtatcaaaaaaaccaaagaaggttgtaatttatcgttggaatcctgaagatcaagaaaatccacgtttagatagttatgaaattgatttaagtaaatgtggcccaatggttttggatgctttaatgaaaataaagaatgaaattgactcttcattaacctttagaagatcttgccgtgagggcgtttgtggttcctgtgccatgaatattgatggcgtcaataccttagcatgtttaaaacctattgaagaagtaaaaggtgagataagtattttatcacttcctcatatgcctgttgttaaagacttagtacctgatcttagt

SEQ ID NO: 200129 - DNA, 329 bp, Unknown
  Bacterial polypeptide expressing nucleotide sequence isolated from the Sargasso Sea
catgaaagcatataatattatagaccatgagtacgatgttgttgtacttggtgcgggtggatcaggtttaagagcggcagtagggcttagcgaatctggcttaaaaacagcttgtatctcaaaagtatttcctaccagaagtcatacatcagctgcacaaggtggaatatcagcagcactaggaaacatgggagaagatgattggagatggcacatgtatgacactgtcaaaggtgcagattggttaggtgatcaagatagtattgaatacctttgtaaagaagcacctaaagcagttttagaattagagaaatatggagttccattta

SEQ ID NO: 200130 - DNA, 361 bp, Unknown
  Bacterial polypeptide expressing nucleotide sequence isolated from the Sargasso Sea
cttgggcttcaaaataatttttggaaaaaaatcaaaaaatgaacaaaatcaatctgttaaagatagatcaaaaattgatggattgtgggagtgtatattatgctttagttgtacaacttcttgtgtaagttattggtggaatggggaaaaatatcttggtccagcagcactgttacaagcttcaagatgggttaatgacagccgagatgaagagaggaaaaaaagattgaagtatattgaaaaaaactccaatattcataattgccactctattatgaattgtgctaactcatgtccaaagggattaaatcctgcaaaggctatagctgatttaaaaaaacaaatagctacaaatttataa

SEQ ID NO: 200131 - DNA, 358 bp, Unknown
  Bacterial polypeptide expressing nucleotide sequence isolated from the Sargasso Sea
tatgagttcatacaaaattatagatcatgaatatgatgtagtagtcttaggtgctggtggttcaggtttaagagctgcagttggcctaagtgaggcaggattaaagacggcatgtatttcaaaagttttccctacgagaagtcatacttctgcagcacaaggaggtatttcagctgcgcttggtaacatgggtgaagatgattggcgttggcacatgtatgatacagttaaaggtgccgattggttaggagatcaagatagtattgaatatctttgtaaagaggcgccaaaagcagtaattgaattagaaaaatatggggttccttttagcagaactgaggatggaaaaattatcaaa

SEQ ID NO: 200132 - DNA, 148 bp, Unknown
  Bacterial polypeptide expressing nucleotide sequence isolated from the Sargasso Sea
aagggaattgaaaaaagacttccaggaatttcggaatcctcaaaattatttgcagaagttgatgtaacgaaagaaccaataccagttgtacctacagggcattataatatgggcggaataccaactaattataaagctgaagtttaaa

SEQ ID NO: 200133 - DNA, 553 bp, Unknown
  Bacterial polypeptide expressing nucleotide sequence isolated from the Sargasso Sea
atggtgcaaataagtttacctaaaaattcaaaagtagtgaaaggtaaattttacaaggataaaaccggctcaaaacaattaaaaaaagtaaacgtatatagatgggacccttctgtagggggaaaccctagaattgacacgtacgaagtagatatgagaaattgtcaatcaaaggtattagatgtacttaataaaattaaaaatgaaattgatccatctttagcttacagaagatcatgcgctcatggagtatgtggctcatgtgcaatgaatatgaatggtaagaatggattagcatgcactaaacctcacgaggagataaaaggagatttaaatatttatcctttaccgcatttaaaagtcgttaaagatttaattggtgatcttacaactttatataagcaatatgaatcagttgagccttggctcaaaacttcaaaaaaagatgataataaagaaaatcttcagtcaaaaaaagaaagagaaaaattagacggactttatgaatgcataatgtgcgcttgttgctctacgtcttgccccaagttactgg

SEQ ID NO: 200134 - DNA, 150 bp, Unknown
  Bacterial polypeptide expressing nucleotide sequence isolated from the Sargasso Sea
agaacgaccacatctacctgtacctcaaccacctgccgccggaggtgctcgccgagcggctgcccggcatctcggagacggcggccatcttcgccggcgtcgacgtcaccaaggagcccagtgcgcggcccgcccatcaaacggactgac

SEQ ID NO: 200135 - DNA, 334 bp, Unknown
  Bacterial polypeptide expressing nucleotide sequence isolated from the Sargasso Sea
atggctcagtttacacttcctgcgaattcaaaaataactaaagggaaaacccaccaactaaaagaacctgcaaacgatccaaagaaacttgcaatttacagatgggaccccgaagatgataagaatcctaggatagataattatgagatagatcaagaaaactgcgggccaatggtattagacgctcttatgaaaataaaaaacgaaattgatccgactttaacatttagaagatcttgcagagaaggagtttgtggttcctgtgctatgaatattgatggtgttaacacattagcgtgtttgaaaagtatgtccgatgaaagaagaaatcaaa

SEQ ID NO: 200136 - DNA, 298 bp, Unknown
  Bacterial polypeptide expressing nucleotide sequence isolated from the Sargasso Sea
aatggctcagtttacacttcctgcaaattcaaaaataactaaagggaaaactcaccaactaaaagatcctgcaaacgatccaaagaaacttgcaatctacagatgggatccagaagatgataaaaatcctaggatagataattatgagatagatcaagaaaagtgtggcccaatggtattagacgcacttatgaaaataaaaaacgaaattgatccaactttaacatttagaagatcttgcagagaaggagtttgtggttcctgtgctatgaatattgatggtattaacacattagca

SEQ ID NO: 200137 - DNA, 310 bp, Unknown
  Bacterial polypeptide expressing nucleotide sequence isolated from the Sargasso Sea
atcaacaaatgaacgcaccaaaattgatggattgtgggaatgtattttatgtttttgttgcaccacatcctgtgtaagttattggtggaatggagaaaaatatttaggaccagcagccttactccaggcttctagatggattaatgatagtcgcgataaagaaaagaaaaaaagacttaaacacattgaagaatattcaaatattcataattgtcattcgattatgaattgtgctaattcctgtcctaaaggtctcaatccagcaaaagctattgtagatttaaaaaaacaaattgctactaatttataa

SEQ ID NO: 200138 - DNA, 278 bp, Unknown
  Bacterial polypeptide expressing nucleotide sequence isolated from the Sargasso Sea
catgaataaagtaattaatatctcaaaaaaaaataacatcaaagaatttgatgcacttattgttggtggaggcggatcagggatgagaacctcccttgaactagctaaatcaggtctgaatacagctgttatttctaaagtttttcctaccaggtctcataccgtctcggctcaaggtggaattacatgtgcaatccaaagtgcagatccaaatgatgattggagatggcatatgtacgataccgttaaaggctctgactatattggtgatcaggatg

SEQ ID NO: 200139 - DNA, 111 bp, Unknown
  Bacterial polypeptide expressing nucleotide sequence isolated from the Sargasso Sea
aattataaagttgaagtaataactgtaaatggatttgaaaaagtagttccaggtctaatggcaataggagaagaggcatgtgtttttgttcatggagcaaatagattaggt

SEQ ID NO: 200140 - DNA, 349 bp, Unknown
  Bacterial polypeptide expressing nucleotide sequence isolated from the Sargasso Sea
aatggctcagtttacactccctgcgaattcaaaaataactaaagggaaaactcaccagttaaaagaacctgcaaataatccaaagaaacttgcaatctacagatgggatcccgaagatgataaaaatcctaggatagataattatgagatagatcaagaaaagtgcggcccaatggtattagacgcacttatgaaaataaaaaacgaaattgatccgactttaacatttagaagatcttgcagagaaggagtttgtggttcttgtgctatgaatattgatggcgttaacacattagcatgtttgaaaagcatgtctgaagttaagaatgaaatcaaaatttatcctctt

SEQ ID NO: 200141 - DNA, 243 bp, Unknown
  Bacterial polypeptide expressing nucleotide sequence isolated from the Sargasso Sea
aatgagtgctgcaatacctctagaggaaattaaaataattaagcttagtgtttataggtttgatcccactatggataaaaaaccatacatgcagtctttagatatcgaagttccagcaaataaagacttgatggttttagatgttttacatttagctaaagaacaagaaccttcactttcttttagaaggtcatgcagagagggcgtttgtggatcagatggaatgaatataaatggaaaaaa

SEQ ID NO: 200142 - DNA, 136 bp, Unknown
  Bacterial polypeptide expressing nucleotide sequence isolated from the Sargasso Sea
cgtttatcaagcatagctgataaatttaaactttttagatgccatacaattatgaattgtactaaaacttgtccaaaatcactaaaccctgccaaggctatctctcatatcaaaaaaatgattgcatctaagtaaa

SEQ ID NO: 200143 - DNA, 879 bp, Unknown
  Bacterial polypeptide expressing nucleotide sequence isolated from the Sargasso Sea
ttttacgcccgaggtcaaacaggtcaacagttactatatggagcttaccaatcattatcgcgacaggtgaatcttggaaatattgaacttattacaaaaagagatgtccttgatttggtgattgttaatgatattgcgagaggagtaatagcaagaaatttaattaatggaaatttagagacttataaagcacattgtgttgttttagcaactggtggttatagcaacgtatattacttatcaacaaattcattaaaatcgaatgcaactgcaatttggagggcctacaaaaggggggctaattttgcaaatccatcgttcacacaaatacacccaacatgtatccctcctgaaggtatttatcaaagcaaattaactttaatgagcgaaagtttaaggaatgatggaaggatttggttaccaaaaacaattgattccaaagatgatcctgaaaatattccagaacatgaaagagactatttccttgaaagacaatatcctaaatatgggaatttagttcccagagatgtcgcctctagaagagcaagagagatctgtgaaaaaggttttgggattggctttggtggtaaaggagtatatcttgacttgcaagactcaataaaaaaatatggattaaaggttataaagactaaatatgggaatttattagatatgtatcaacgaattgttggtgacgatccaacaaaagtacctatgaagatttatccagctcctcattacacaatgggtggattatgggttgattacaatttaatgagcaatatagatggccttttcgttttaggagaggcaaactattctgtgcatggcgctaatcgtttaggggcgaatgctttattgcaatgcttgtgtgatgga

SEQ ID NO: 200144 - DNA, 292 bp, Unknown
  Bacterial polypeptide expressing nucleotide sequence isolated from the Sargasso Sea
atgagttcatacaatattatagatcacgaatatgacgttgtagtcttaggtgctggtggatcaggactgagagctgctgttggcttgagtgaagcaggattaaaaactgcatgtatctcaaaagtgtttccaaccagaagtcatacgtctgcagcccaaggtgggatttctgctgcgcttggaaacatgggtgaagatgactggagatggcatatgtatgataccgttaagggagctgactggttaggagatcaagatagcatcgagtatttatgtaaagaagcaccaaaag

SEQ ID NO: 200145 - DNA, 217 bp, Unknown
  Bacterial polypeptide expressing nucleotide sequence isolated from the Sargasso Sea
gatagatatctctggtccagcaattttacttcaagcttatcgttggttgatagacagccgtgatgaatcaacaggagaacgattagacaatctagaagatccattcagactttatcgctgccatacaataatgaactgtactcgcacttgcccaaaaaacttaaatcctgccaaggccatcggtgaaataaaaaaaatgatggtaatgagacgttag

SEQ ID NO: 200146 - DNA, 217 bp, Unknown
  Bacterial polypeptide expressing nucleotide sequence isolated from the Sargasso Sea
atgacaaattatgaaataattgaccatgaacacgacgtaatcgttgtaggtgcaggtggagctggtttaagagcgaccgttggaatggttacaaaaggtttcaaaactgcttgtattacaaaagtttttcctacaagaagtcacaccgttgctgctcaaggaggaattggtgctgctttaaacaatatgggtgaaaatgatagttggaaataccata

SEQ ID NO: 200147 - DNA, 190 bp, Unknown
  Bacterial polypeptide expressing nucleotide sequence isolated from the Sargasso Sea
gatgcaagctgcaagatgggtgaatgactcaagagactctgaaagaaagaatagattaaaagcagttaatgataaaatgaaattatatagatgtcactcgattatgaattgtactcgctcatgccccaaaggactcaatccggcaaaagctattgctgatttaaagaaggctattgttacagaattataa

SEQ ID NO: 200148 - DNA, 610 bp, Unknown
  Bacterial polypeptide expressing nucleotide sequence isolated from the Sargasso Sea
aatggttcttgatgcacttattttaattaaagatcaaatagactcctctttaacatttataacatcttgtcgtgagggagtttgcggatcatgcgcaatgaatattgatggaagaaatacattggcttgtcaaaaaaatataaaagaaatcaatggtgatataaatatttttccactaacacatatggctgttatcaaagatttatttgttgatcttagtcaagcatttaagcaattagaatttattgaaccctggcttaaatctaatcttggcaaaccatcaaaaaatgaacaacttcaatccatggatgatagatctaaaatagatggtttatgggaatgtattctttgttttagttgtactacatcatgtgttagttattggtggaatggaaataaatatttaggcccagcaaccctacttcaggcctcacgatgggttaatgatagcagggatgaagaaagaaaaaaaagactaaaatatattgaagaaaattcaaatatacataattgtcattcaattatgaattgtactagttcatgtcctaaaggattaaatcctgcaaaagctatagctgatttaaagaaacaaattgctacaaatatataa

SEQ ID NO: 200149 - DNA, 583 bp, Unknown
  Bacterial polypeptide expressing nucleotide sequence isolated from the Sargasso Sea
tgaaggtaacggagcaggaccaaacaatgatttcgtatatttagatttaacacatttgggagcagaaacaataaaacagaaattgcctgatataacagatttcgttaggacatatgtgaaaattgaaccaatagatgagccaattccagttcaaccaacagctcattacgctatgggaggtattcctactgatgtagatgcgagagttttaagcgatgctcaaggaacaatccttccaggtgtatattcagcgggagaatctgcctgtgtaagcgttcatggtgcaaatagattaggcacaaattccctactagatatagtggtttttggtaaaagagcaggtcaaagcatggttgactatgtttcttctacaaaaccattttctttatctgaaaatgctggcgaagacctaaaaaataagataagtaactttattgataaagaacatgatcctaatttttcagtagcaaaaataagagaagagcttcaagattcaatggaagaaaatgccaaaattttcagatctgaagaaagtttaacaaaacagactgaaattttgtcagacttaagagatagataccaa

SEQ ID NO: 200150 - DNA, 598 bp, Unknown
  Bacterial polypeptide expressing nucleotide sequence isolated from the Sargasso Sea
atgaaaatagttaaacattcatttgatggagtaatcgtcggtgctggtggagcaggccttagggctgcaattgaagcagcaccgcatatgaagcttgctgtcataacaaaactttatcctacaagatctcacacaggtgcagctcaaggtgggatgagtgccgctcttgcaaatgttgaagaagataactggaactggcatgcttttgataccgtcaaaggttcagattaccttgcagaccaacctgcagtagatattttatgtaaagaggcaattgatgccgtgatagaattggaacactggggattaccatttagtcgattagataatggaaaaattgcacaaagaaggtttggtggtcacactgtaaaagaaggagagtctcctgctttcagagcttgttatgcagctgacagaactggtcatatgattcttcagactctatatcaaaaatgtgtctctatgggagtaactttttttgatgaatttcaagttctagatatcaagattgaggatggtatctgccagggtgttattgcttatgaattagcaacaggtgatatacatattttgaaaccagagcagttacatttgcaac

SEQ ID NO: 200151 - DNA, 679 bp, Unknown
  Bacterial polypeptide expressing nucleotide sequence isolated from the Sargasso Sea
tttaaatcctaccatagaaaatccagacaatgtatgtgaaggtttattagctgtaggagaggctgcgtgcgtttctgttcatggtgcaaatcgcttaggaacaaattctcttatagatttaattgtatttggaaaagcagcaagtttaacaacaataaataaagtaaaacctaattcatcaaaaataaatattaatcaatcaataactgatgaaattataagtcgatttgattcaattagatataataaaggaaatacattaactggagaagtaagaatagaaatgcaaaaaattatgcagaaaaaatgctcagtttttagaacacatgatttgatttctagaggaattaaagaatttgaaaaggttgagagcgccatgcaaaacataaatgtaaaagataaatctcttatatttaatactgatttaaccgaaacattagaattacataatttaatgtctcaatccaaagtaacattatattctgctctaaacagaaaagagactagaggagctcatgctagagaagattacaaagaaagagatgataaaaattggttagctcactctttagcttggctttcaatggatggaagagttaaattagaaaagagacgtgtaaacatgaatactttaacaaaccatgtgcaaccaatacctcctgcaaaaagagtatattag

SEQ ID NO: 200152 - DNA, 310 bp, Unknown
  Bacterial polypeptide expressing nucleotide sequence isolated from the Sargasso Sea
atgagttcatataaaattatagatcatgaatatgatgtagtagtcttgggtgctggtggttcaggtttaagagccgcggttggcttgagtgaggcaggattaaagacagcatgcatttcaaaagtttttcctactagaagccacacttctgctgcacaaggaggtatatcagctgctcttggtaatatgggtgaggatgattggcgttggcacatgtatgatacagtaaaaggtgcggattggttaggagatcaagatagtattgaatatctttgtaaagaagcacctaaagcagttattgagctagaaa

SEQ ID NO: 200153 - DNA, 337 bp, Unknown
  Bacterial polypeptide expressing nucleotide sequence isolated from the Sargasso Sea
attgatcatgaatacgatgtagtggttctaggtgctggaggctcaggcttgagagctgcagttggcttaagtgaagctggattaaaaactgcatgtatttcaaaagtttttcctactagaagtcatacttctgccgctcaaggtggtatatttgctgctttaggtaatatgggtgaagatgattggcgttggcacatgtatgatactgttaaaggtgcagattggttgggtgatcaagatagtatcgaatatctttgtaaagaggctccgaaggctgtaattgaattagaaaaatatggcgtaccttttagtagaacagatgacggcaagatttatc

SEQ ID NO: 200154 - DNA, 226 bp, Unknown
  Bacterial polypeptide expressing nucleotide sequence isolated from the Sargasso Sea
tatgaaaaacgcttataatattgttgaccattattacgatgtcgttgttattggtgcaggaggttcaggattaagggcaactttgggatgtgcagaagcaggcttaaagacagcttgtatttctaaagtatttcctaccagaagtcatacggttgctgctcaaggcggtatcggagcagcacttggaaatatgggtgaagataattggaaaatggcatatgtatga

SEQ ID NO: 200155 - DNA, 263 bp, Unknown
  Bacterial polypeptide expressing nucleotide sequence isolated from the Sargasso Sea
catgaataaagtaattaatatctcaaataaaagtaacatcaaagaattcgatgcacttattgttggtggaggcggatcagggatgagaacctcccttgaactagccaaatcaggcctgaatacagctgttatttctaaagtttttcctactaggtctcataccgtttcggctcaaggaggaattacatgtgcaatccaaagtgcagatccaaatgatgattggagatggcatatgtatgatactgtcaaaggttctgactata

SEQ ID NO: 200156 - DNA, 271 bp, Unknown
  Bacterial polypeptide expressing nucleotide sequence isolated from the Sargasso Sea
aataatggtgaaggggctcctgcaatgagagcctgtgctgctgcggatagaacaggtcatgcccttcttcacacattgtaccaacaagctttaaaaaataatgttgaattttatatagagtattttgtccttgatcttcttaaggatgaaaagaataaatgttgtggagtaattgcttggtgcttagaaacaggaactatacatcgatttttttctcaccaaactgtattagctactggtggttatggcagagcatatttttcttcaacta

SEQ ID NO: 200157 - DNA, 158 bp, Unknown
  Bacterial polypeptide expressing nucleotide sequence isolated from the Sargasso Sea
aatgggcgcgtatgatattacagatcatcattatgatgtggttgttgtgggagcaggtggagctggtttgagggcaacgctaggcatggcaacctcaggtctgcgtacagcatgcgtaactaaagtgtttccaactcgctctcatacagttgctgcgc

SEQ ID NO: 200158 - DNA, 200 bp, Unknown
  Bacterial polypeptide expressing nucleotide sequence isolated from the Sargasso Sea
tatgagttcatacaaaataatagatcacgaatatgatgtagtagttctaggtgctggtggttctggcttaagagctgctgttggtttaagtgaagcaggattaaaaactgcatgtatttcaaaagtatttccaacaagaagccatacttctgctgcacaaggtggaatttcagctgcccttggaaatatgggtgaggatg

SEQ ID NO: 200159 - DNA, 313 bp, Unknown
  Bacterial polypeptide expressing nucleotide sequence isolated from the Sargasso Sea
tctgtacacggtgctaatagattaggaacaaattcattaatcgatcttgttgtttttggcaaagcagctagcctaacatgtaaagaaaaagtaaaaccaaattctagaaaaattgaaattagtaaatcaaaaacagataatattattgagcggtttgataagattagaaacagcaaaggaaactatacaactggagaacttcgtacttccatgcaacatataatgcagcaaaaatgcgcagtatttagaacacatgatctcatatcaaaaggtattgaagaatattcaaaagttgagagctctaatggatgac

SEQ ID NO: 200160 - DNA, 778 bp, Unknown
  Bacterial polypeptide expressing nucleotide sequence isolated from the Sargasso Sea
atgaaaataatcaagcattcttttgatggagtgatcgttggtgctggtggagcaggtcttagagctgcgattgaagcagcaccccatatgaagttagctgtgataacaaaactatatccaacaagatcacacactggtgcagcccaaggtggtatgagtgccgcattagcaaatgtagaagaagataattggaactggcatgcatttgatacagtgaaaggatcagactacttagcagatcaaccagctgtagatattttgtgtaaagaagcgattgattctgtagttgagttagaacattggggacttccatttagtagattagaaaatggcaagattgctcaaagaaggtttggaggacataccgttaaagaaggtgaggcaccagcttttagagcctgttatgcagcagacagaactggtcatatgattctgcaaactttatatcagaaatgcgtttccatgggagtaaccttttttgacgaatttcaagttttagatataaaaattgatgacggagtttgtaaaggtgtcgtagcttatgaaattgcaaccggtgatatacacatatttgaagccagagcagttacattcgctactggtggttttggaaaaatatacaaggttagttccaatgcccactcattaacaggtgacggtccgggaattttatatcagaaaggcataccgttagaagacatggaattctaccagttccacccaacaggaatatatcgacttggaatactattgtcagaagctgcaagaggtgagggtg

SEQ ID NO: 200161 - DNA, 375 bp, Unknown
  Bacterial polypeptide expressing nucleotide sequence isolated from the Sargasso Sea
acgaaaaaattaaaccattcctagataatgaagatgaagttactacaggacatgaaaggctacaaagcccagaagatagagacaaattagacggtctctatgaatgtgttctatgtgcatgttgttcaacaagttgtccgtctttttggtggaatccagaaaaatttgttggtcctgcagcattattgcaagcatataggtttattgcagacacaagagataagcagaaaagagctagacttaaaaagcttaatgatgccttcagtgtttatagatgtcatgggataatgaactgtacttcagtatgtccgaaagggttaaatccttctaaggcaatcaatgaaattaaaaaggagttaagaagaataggatagt

SEQ ID NO: 200162 - DNA, 700 bp, Unknown
  Bacterial polypeptide expressing nucleotide sequence isolated from the Sargasso Sea
gatgagcatctatcgctatgacccatcgttagacgataaaccttacatgcaagatatcgtaattgaggtgccaactgataaagacatcatggttttagatgctttgcatctagctaaggatcaagagccttcattatcttatcgaagatcttgtcgtgaaggtgtttgtggttcagatggaatgaatataaatggaaaaaatggtttagcatgtgtaactcctctatcagaagctgtaaaaagaaataaacttactttaaggcctatgcctggtttgccggttgtaagagatttaatagtagatatgaagcaattttatgaccaattagaaaaggtcaaaccttatttaataactaaaagtgagaacccagaaacagaaagaacacaaagccctgaagagagagaggagctggatgggctttatgaatgtatattatgtggatgctgttcaacttcttgtccttctttttggtggaaccctgataaatttttaggacccgctgctttgcttcagtcatggaggtttatagcagattcaagagacgaagcgacagaagaaagattagatgcgttggaagattcattcagtctgtacagatgtcatggcatcatgaattgcgtctcagtttgccctaaagggttaaaccccactgaagctatttctaatattagaaataagcttattgctagagagaaataa

SEQ ID NO: 200163 - DNA, 703 bp, Unknown
  Bacterial polypeptide expressing nucleotide sequence isolated from the Sargasso Sea
atgagtatttaccgttatgatccaacggtagacaaaaagccttatatgcaggatattgtcgttgagataccaactgataaagatattatggtgctcgacgctttgcatcttgctaagaaccaagaaccgtctttatcttatagaagatcttgtagagaaggagtctgtggatcggatggtatgaatatcaacggaaaaaatggtttagcttgcgtcacacctctatccgaagttcttaaacgagataaaattactttgcgcccgatgcccggacttcctgtagtaagagacttaatcgtggatatgaagcagttttttgatcaactagagaaggtaaagccttatctgataacgaaaagtgacacacctgatatagagagaaagcaaacaccagaagccagagaagaacttgatggactttacgaatgcattctgtgcggctgctgctcaacatcttgcccttctttttggtggaatcccgataaatttcttggaccagccgctctactgcagtcttggagatttattgctgatagcagagatgaggcaaccgaagaaagattagatgatctggaggatgcttttagtctttataggtgtcatggaattatgaattgtgtctcggtttgccctaagggattaaaccctacagaagctatttcaaatatacgtaataaattacttaccagagaaaaggcttaag

SEQ ID NO: 200164 - DNA, 268 bp, Unknown
  Bacterial polypeptide expressing nucleotide sequence isolated from the Sargasso Sea
atggaatttgatggcatcattataggtggcggtggggctggaatgagagcttctttgcaattagctgaatctggactaaacacagctgttatatctaaagtattcccaactagatcccatactgtttcagctcaaggaggaataacttgtgctatccaaagtgatgaccctgatgacgattggagatggcatatgtttgataccgtaaaaggttcagactacattggagatcaggaagctattgaatacatgtgcagtgaagggccga

SEQ ID NO: 200165 - DNA, 787 bp, Unknown
  Bacterial polypeptide expressing nucleotide sequence isolated from the Sargasso Sea
catgaaaataataaaacactcttttgatggagttatcgttggcgcaggtggcgctggtttaagagctgcaatagaagctgctcctcatatgaagctcgcagttattacaaaactttatccaacaagatctcacactggagctgctcaaggagggatgagtgctgcgttagctaatgtagaagaggataattggaactggcatgcttttgatacagtaaaaggatcggactatttagctgatcaacctgcagtagatatcctttgtaaagaagcaattgatgcagtaattgagttagagcattggggtttaccttttagtagattagaaaatggaaaaattgctcagagacgatttgggggacatactgtaaaagaaggtgagtctcctgcttttagagcatgctatgctgccgatagaaccggacacatgatacttcaaactctatatcaaaaatgtgtatcgatgggagtagaattttttgatgagttccaagtattagatataaaaattgaagatggagtgtgcaaaggtgttgttgcttttgaactctctactggagacatccacatatttgaatcaagagcagtaacttttgcaacaggtggttttgggagaatatttaaagtaagctctaatgctcactcactaacaggtgatggtcctggaattttatatcaaaaaggaattcctcttgaagacatggaattttatcagttccatccgactggtatttacagactaggaattttgttatccgaagcagcaagaggtgagggaggaatttaa

SEQ ID NO: 200166 - DNA, 1228 bp, Unknown
  Bacterial polypeptide expressing nucleotide sequence isolated from the Sargasso Sea
taggaataaagaacataaagtagtaattggtggacgtcacatgacatttgttaatgtttcttctccacccaacgtgatggatttagaccgaggcagaaggcctggtgattttgaaagttttagagacctactaaaactaactcaatactttaattgtatacatgtagcaggaggctatcctgtggaaccaattgatgtacactcctcaataagacatcttaaatgcatatatgaaaagttgatattaactgataaagtgtgtcacgcatattcgctgggttcagaaagagtagaagatgcaattgaaatggttagaatagctagcggtcttgaggaagataaatttaaaaaagaagccaggatatatactaatattaactcatcttcacctctaaaacacgattggcccatgcttgatggagcaatgcgtttttcgagaaaaaatcagcctgttgttgtaacaccctttaccctagcaggtgctatggcaccggttaccatagtaggagctgttgcacaatcaatagctgagggattagcagcaattgcattattacagtatatcaatcctggttgtcctgttgttttaggtactttcacttctaatgttgatatgaaatccggagcacctgcatttggtacaccggaatatgttcgtgcaactcaaataacaggacaaatggcacgatattataatttacctcttagatcatctaatgcatgtgccgcaaatgcacctgatggtcaagctatgtgggaaagtttaaatagcctatgggcatcagcaacttcgggtacaaatctagtttatcacagtgcaggttggttagaaggtggattaatagcttcttatgagaaatttgtaatggattgtgaagttttacaacaattcaaaagatattttgaaccagaattgtgtaatttttcggaggatgatttagcatttggagcggtatcagaggttggtccaactggtcatttttttggatgccagcatactcaagaaagatactcagatgctttttattctccatttttgtcagattggagaaactttgaagcttggaatgaggcaggagctgaatggactcataaaaaagcaaataaaatatggaagaaaatactagatgattttgaacctcctccaattgatcaaggtatcaaggaagaactcaatgagtttgttgaaagaagaataaaagaaggtggagccccaacagacttctaa

SEQ ID NO: 200167 - DNA, 330 bp, Unknown
  Bacterial polypeptide expressing nucleotide sequence isolated from the Sargasso Sea
catggtcgcagtcaagactgggctgccgcgccgcaaattcgacgtcgtgatcgtcggtgcgggcggttcgggcatgcgcgcatcgctgcagctggcagaagccggcctctccgtggccgtgctgtccaaggtgttccccacccgctcgcacaccgttgcggcgcagggtggcatcggtgcctcgctgggtaacatgagcgaagacaactggcactatcacttctacgacaccgtcaagggttccgactggctcggcgaccagacgcgatcgaattcatgtgccgccaggcgccgaacgtggtctacgaactgggaaacttcggcatggcc

SEQ ID NO: 200168 - DNA, 217 bp, Unknown
  Bacterial polypeptide expressing nucleotide sequence isolated from the Sargasso Sea
atgagttacgaaatcgaatatcacgattacgacgttgttgttgtaggagctggaggctctggattaagagcaacagttggtgctgtagaaaatggatataagacagcttgtatctctaaagtttttccaacgagaagtcatacagttgctgcacagggaggaatctcagctgcgttagggaacatgggagaagatgattggcgatggcatatgtacg

SEQ ID NO: 200169 - DNA, 217 bp, Unknown
  Bacterial polypeptide expressing nucleotide sequence isolated from the Sargasso Sea
atgagttcgtataaaataattgatcatgaatatgatgtagttgtcttgggtgctggtggttcaggtttaagagctgcggttggactaagtgaagctggtttgaaaacagcctgtgtgtcaaaagtattccctacaagaagtcatacctctgcagcacaaggaggtatttccgcagcgttaggaaatatgggtgaggatgactggagatggcatatgt

SEQ ID NO: 200170 - DNA, 700 bp, Unknown
  Bacterial polypeptide expressing nucleotide sequence isolated from the Sargasso Sea
atgagtatctatcgttatgacccttcactagatgaaaagccttatatgcaagatattgtaattgaggtgccaactgataaagacattatggttttagatgctttgcatctagctaaggatcaagagccttcattatcctaccgcagatcgtgtagagaaggcgtttgtggttcagatggaatgaatataaatggaaaaaacggtttggcgtgtgtgactccactatcagaagccgtaaaaagaaataaacttactttaaggcctatgcctggtttgccagtcgtaagagatttgatagtagatatgaaacaattttacgatcaattagaaaaggtaaagccctatttaataactaaaagtgataatccagaaactgaaagaacacaaagtcctgaggagagagaagagctagatgggctttatgagtgtattttatgtggttgttgctcaacctcctgcccttccttttggtggaatccagataaatttttaggaccagctgctttacttcaatcttggaggtttatagctgattcaagggatgaagcaactgatgaaagattagatgctttagaagattcattcagtctgtatagatgtcatggcatcatgaattgcgtctctgtttgccctaaaggtttaaaccctacagaagctatttctaatattagaaataagctcattgccagagagaaataaa

SEQ ID NO: 200171 - DNA, 196 bp, Unknown
  Bacterial polypeptide expressing nucleotide sequence isolated from the Sargasso Sea
tctgctgcaggcctaccgcttcatcgccgacagccgcgacgaagccaccacggagcgcctggacaacctggaagacccgtaccgcctgttccgctgccacaccatcatgaactgcgtggacgtgtgccccaagggcctgaaccccacccgggccatcggaaagatcaaggaactgatggtgcgccgcgccatctga

SEQ ID NO: 200172 - DNA, 703 bp, Unknown
  Bacterial polypeptide expressing nucleotide sequence isolated from the Sargasso Sea
gatgtgtatttatcgttatgatccaactttggacaagaaaccttacatgcaagatatcattgtagaggtgccaaccgataaagatattatggtactagatgctttgcatctcgcaaaagcacaagaaccgtccttatcttacagaagatcatgcagagagggagtgtgtggttcagacggcatgaatataaatgggaaaaacggacttgcttgcgtcacccctttatccgaagtgattaagaggaataagatcactttgcgacccatgcctggacttcctgttgtaagagatctgatagttgatatgaaacaattctatgatcagttagaaaaggtaagaccttatttaattaccaagagtgattcacccgaaattgaaaggacgcaatcacctgaagaaagagaacaactggatggtctgtacgagtgtattctttgcggttgttgttcaacttcatgcccttctttttggtggaatccagataaatttttaggacccgcagctttgttacaatcatggagattcattgctgacactagagatgaagctactgatgaaaggttagatgacttggaagatgccttcagcctctataggtgtcatggaattatgaattgcgtatctgtctgtccgaaagggttaaatcctacagaagctatctccaatatcagaaataaacttcttacacgaaaaaaagcttaa

SEQ ID NO: 200173 - DNA, 309 bp, Unknown
  Bacterial polypeptide expressing nucleotide sequence isolated from the Sargasso Sea
tatgagcacttacaaaattatagatcatgaatatgatgtagttgttttaggagctggaggttctggcttgagagcagcagttggtttaagtgaggctgggcttaagactgcttgtatttcaaaagttttcccaacaagaagtcacacatcggctgcacaaggtggtatttcagctgcacttggaaatatgggtgaggatgactggcgttggcatatgtatgatacagttaaaggagcagattggttaggtgaccaggatagtatcgaatatctttgcaaggaagcacctaaggcagttattgaattaga

SEQ ID NO: 200174 - DNA, 249 bp, Unknown
  Bacterial polypeptide expressing nucleotide sequence isolated from the Sargasso Sea
catggccaaatttaatttaccggtaaactcaagagttaaaaaaggaaagcattttgaggcaccaaaagatgctaagaatgttagaagatatatcatctatcgatacaattcagaccttgatgaaaatccaagaatggatactttcgatattgatctggacagttgtggacctatggttctagatgttcttattaaaataaaaaatgagatagatcccagcctaacatttagacgatcttgcagagaagg

SEQ ID NO: 200175 - DNA, 152 bp, Unknown
  Bacterial polypeptide expressing nucleotide sequence isolated from the Sargasso Sea
aaaaagaaggttgaatgaattagacgatagttttaaactatatagatgccattcgattatgaattgcacaaactcttgtccgaaaggattaaatccagctaaagcgatagctgaaataaaacatgaaatatccaaaatggataataagtgaa

SEQ ID NO: 200176 - DNA, 85 bp, Unknown
  Bacterial polypeptide expressing nucleotide sequence isolated from the Sargasso Sea
atgaattgtaccaattcctgccctaaaggtttaaatcctgcgaaagcaattggatctatcaaaaaaatgcttgcaacgagctaaa

SEQ ID NO: 200177 - DNA, 271 bp, Unknown
  Bacterial polypeptide expressing nucleotide sequence isolated from the Sargasso Sea
atgacttcttataaaattatagatcatgaatatgatgttgttgttcttggcgcaggaggatcaggtttaagagcagcagttggtttaagtgaggcaggtttaaagacagcttgtatttcaaaagtatttccaactaggagccatacctcagctgcgcaagggggaatttctgcagcattaggaaatatgggtgaagatgattggcgttggcacatgtatgatacagttaaaggatctgattggctaggagacccaagattgtatagaatat

SEQ ID NO: 200178 - DNA, 742 bp, Unknown
  Bacterial polypeptide expressing nucleotide sequence isolated from the Sargasso Sea
aatgttaggaaataaattagaagtaaatttgtatagatacaatcctgaagaggataaatttccatatatgaagaaatatattattaaaaaacctgaaagagatattatggttttagatttattaaatttgttaaaagaagaagatcaatcaatttcatatagaagatcatgcagagaaggtgtatgtggttcagatggaatgaacattaatggaaaaaatggccttgcatgcattacaccaatctcagaagttatcaaaagaaataaaatagaactaaggcccttgcctggtcttccagtaataagggatttagtggtagatatgacagaattttatgcacaatatgaaaaaattaaaccatttttacaaaatgaaacaacagctcccgaacaagaaagacttcaatctccagaagatagagataaattagatggactatacgaatgcattttatgtgcttgctgctcaactagctgtccgtcattttggtggaatcctgataagtttgttggtccagcagccttgcttcaagcctatagatttttagcggattctagagatttgaagactcaagaaagactagaatctctttctgacccgtttagtgtttatagatgtcatggaatcatgaattgtgtaaatgtctgtccgaaaggtttaaatccaaataaggcaattggtgagataaaatcaatgttacataaaaataaaaaggatataattgtctcagacggagcttaa

SEQ ID NO: 200179 - DNA, 161 bp, Unknown
  Bacterial polypeptide expressing nucleotide sequence isolated from the Sargasso Sea
tagtagagacgaagatagaaaagagaggttgaaaaaggtagctgacgaattaaaactttatagatgccatactattatgaattgtactaatgcatgcccaaaaggactaaatccagcaaaagcgatagcatctataaaaaaaatgcttgcaacaggctaat

SEQ ID NO: 200180 - DNA, 664 bp, Unknown
  Bacterial polypeptide expressing nucleotide sequence isolated from the Sargasso Sea
aatggaccttaatgtaagtctttatagatataatcctgaacaggataagtttccttatatgaaaagttataaggttaaaaaacccgaaaaagacataatggttttagatcttcttaatatgcttaaagaggatgatgcaactatttcttacaggcgatcatgcagagaaggtgtgtgcgggtccgatggtatgaacattaatggtaaaaatggtttggcatgcattacacctttgtctgaagtcttaaaaggtaataagcttgagctaagacctttacctggacttcctgtcataagagacctaatagtagatatgactcaattttatgagcagtatgaaaagattaaaccatttttgcagtctgactcagaaccgccagagcaagaaagacttcaatctcctcaagatagagataaattagatggcctatatgagtgtattctttgcgcctgttgctcaacaagttgcccatccttctggtggaatcctgacaaatttgttggaccagctgcacttcttcaggcatacagattccttgcggacacaagagatactaagaaacaagagagattagaagaattaggagacccttttagtgtttatagatgtcacggcatcatgaattgtgtgagcgtttgcccaaaaaggtttaaatccaaataa

SEQ ID NO: 200181 - DNA, 343 bp, Unknown
  Bacterial polypeptide expressing nucleotide sequence isolated from the Sargasso Sea
tatgagttcttataaaattatagatcatgaatacgatgtagtagttcttggagcaggaggagctggtttgagagctgcagtcggtcttagtgaggctggactaaaaacagcgtgtatctctaaggttttcccaacaaggagccatacatcggcagcacaaggaggaatttcagctgctcttggaaacatgggtgaagatgattggagatggcatatgtatgatactgtaaaaggatcagattggctgggtgatcaggattgtattgagtatttgtgtaaagaagctcctcgagcagttttagaattagaaagatatggagttccatttagccgaacagaagat

SEQ ID NO: 200182 - DNA, 553 bp, Unknown
  Bacterial polypeptide expressing nucleotide sequence isolated from the Sargasso Sea
atggttgaacttcttttacccaaaaattctaaagtaaaaagtggaaataactttgcaataaaagaaaaagctaaagctaaaaaagtctttttaatatatagatataatcctgataccaaagaaaatccccgagttgatagatatgaattggacgtaagtgattgtgggcctatggttcttgatgctcttataactatcaaaaataaggtcgatcccacaattacctttagacgttcttgtcgtgagggtgtttgtggaagctgtgcaatgaatattgatggaacaaatactcttgcttgtacaaaatatatttctgatgttaaagggcctgtaaaaatttatcctcttccacacatgccggttataaaagacttagttcctgatctttccggagtttataagcaatataactctatagatccttggttgaaaacaaaaaacaataatcataacaatagagaaagaactcagtcccctaaggaaagagaggagttagacggtctttatgaatgtattatgtgtttctgctgttctacaagttgccctagttatt

SEQ ID NO: 200183 - DNA, 190 bp, Unknown
  Bacterial polypeptide expressing nucleotide sequence isolated from the Sargasso Sea
ttttcttcagcctatagatggataatagactcaagagatgaagatagaaaagcaagattaaaaaaagtagctgatgaactaaaactatataggtgtcatacaatcatgaactgtacaaatgcttgtccaaagggtcttaatcctgcaaaagctatagcatctatcaaaaaaatgcttgcaacaagctaat

SEQ ID NO: 200184 - DNA, 739 bp, Unknown
  Bacterial polypeptide expressing nucleotide sequence isolated from the Sargasso Sea
atggagcttagcgtaagtctatatagatataatcctgagcaggataagtttccctatatgaagaactataaggttaaaaagcctgaaaaagatattatggttctagatcttcttaatatgcttaaggaggatgacgcaactatttcttatagacgatcatgccgagaaggtgtttgcggatctgatggcatgaacattaatggtaaaaatgggttggcatgcattactcctttatcagaagtcttaaaaggaaataagcttgagttaagacctttgcctggtcttcctgttataagagatcttatagtagatatgactcaattttacgagcagtatgaaaagattaaaccatttttgcagtctgactcagaaccacctgagcaggaaagacttcaatctcctcaagatagagataaattagatggcttatatgaatgtattctttgcgcctgctgttctacagcctgtccatccttttggtggaatcctgataagtttgtaggaccagctgcacttcttcaggcatatagattccttgcggatacgagagatactaagaaacaagagagattagaagaattaggagacccttttagtgtttataggtgccatggcattatgaattgtgtaaatgtttgcccaaaaggtttaaatccaaataaagcaattggtgaaattaaatcaatgcttttaactggtactaaagaggataaaataaaggttgtaggtttggagtgag

SEQ ID NO: 200185 - DNA, 568 bp, Unknown
  Bacterial polypeptide expressing nucleotide sequence isolated from the Sargasso Sea
ttgttagttagtatttatcgatataaccccgaatcagacgaaaagccctacatgcaggatcttgatatcaagcttcctgaaggtaaagaccttatggtgcttgatgtattagctttggccaaacaagaagacccttcggtagcttatcgccgatcctgccgcgagggagtatgtggatcggacggcatgaatataaacggtacaaatggtctggcatgtataactccaatctcgagtgcagttggtccagacaacaagctcagtttgaggcctcttcctgggcttccagttattcgagatttggtcgttgatttaactactttctataagcaatttgagaaagttaaaccatacttggtaaacgatgagcccgctcccgaaaaagagaggcttcaatctcctgaagatcgaaaaaaactagatggactgtatgaatgcattctatgtgcatgctgtagtaccagttgtccctctttttggtggaatccagagaaatttattgggccagctggtttgcttcaagcttatagatttttggctgatagtcgagacaattctactaaagaga

SEQ ID NO: 200186 - DNA, 172 bp, Unknown
  Bacterial polypeptide expressing nucleotide sequence isolated from the Sargasso Sea
atggataatagatagcagagacgaagatagaaaagagagattaaaaaaagttgcagacgaactcaagctttatagatgccatactattatgaattgtactaatgcatgcccaaaagggttgaatcctgcaaaagcgatagcgtctataaaaaaaatgcttgcaacaagctaa

SEQ ID NO: 200187 - DNA, 556 bp, Unknown
  Bacterial polypeptide expressing nucleotide sequence isolated from the Sargasso Sea
aatggcacaatttagcctaccacaaaattcaaaaattgaggtaggtaactactttaaagacaaaacgaactcaaaaaatctcaaaaaaattaatgtatacagatgggacccctcaacaggaaaaaatccaagggttgatacatttgaagttgacatggataattgtggtccaaaagttttagatattttatttaagattaaaaatgaaatagatccctcattaacttttagaagatcttgtgctcatggtgtttgtggttcttgcgcaatgaatattgatggcgtaaatggactagcatgcattaaatcgcattcagatataaatggagatttaaatatatatcccttgcctcatttgaaagtagtaaaagatttaattggagatcttacgactttatataaacaatatgagtctattcaaccttggttaaaagttgatcaaactggtaaagaaaaaaccgaactaaaacaatcacaaaaagatagagaaaaattagatggatattacgaatgtattttatgcgcatgttgttctacatcttgcccgagttattgg

SEQ ID NO: 200188 - DNA, 739 bp, Unknown
  Bacterial polypeptide expressing nucleotide sequence isolated from the Sargasso Sea
aatgattgatgtaaacatttatagatataacccagaaacagataagtttccttatacgcaaacatattcaattaaaaaacctgaaaaggacattatgctgcttgaattattaaatcttcttaaagagcaagattcatcaatctcttatagaagatcttgcagagaaggagtatgcggttctgatggcatgaatataaatggaaagaatggacttgcttgtataaccccaatttctgaggctatcaaaaataacaagattgaacttagaccattgcccggtctacctgttatacgtgatttagtcgttgatatgactgagttttatgctcaatacgataaaatcaaaccttttcttcagaatgaaactcagcctccagctcaagaaaggcttcagtcacctgaggatagagacaaacttgatggactgtatgagtgcattttatgtgcttgttgctcaactagttgcccatctttttggtggaatccagataaatttgttggtccagctgcattgttgcaagcttatagatttattgcagattccagagataccaaaacttccgagaggcttgaaggattatctgatccatttagtgtttacagatgtcatggaattatgaattgcgtgaatgtttgtccaaaagatttaaatccaaataaagcaattggcaaaataaaatctatgctcctatcagatagtaaaaaagaaaatattattgcatcagatggaatgagttga

SEQ ID NO: 200189 - DNA, 758 bp, Unknown
  Bacterial polypeptide expressing nucleotide sequence isolated from the Sargasso Sea
ctcgcgcacggacgaaggcaagatctaccagcgcgcgttcggcgggcagtcgctgcagtacggcaagggcgggcaggcgtaccgctgcgcgtgcgcggccgaccgcacgggccacgccatcctgcacacgctctacggccagtcggtgcgtcacgagaccgagttcttcgtcgagtactttgcgctcgacctgatcatggacgcagagggcgcgtgcgtcggtgtcatgggtgcggccccgccgccacaccatgcgcgcgccgcgaggtcgcccagcacgccgcgccgtggatcgtcatgggtgcggccccgccgccacacaatgcgcgcgccgcgaggtcgcccagcacgccgcgccgtggtacgccgtcgcttggcacgccgcgccgtcatcgtgccgccgccgcgcacgacgccgctcgcccgcttcgccgcactgcgcctctggcgccgccgctgctgccaccgccgtcgcttgacgtgccgcgtgcgccgccgcagcgctgtgcatggaggacggcacgctgcaccgcttcaagtgcaagaacaccgtcctcgcgaccggcgggtacggccgcgcgtggtactcggccacgtcggcccacacgtgcacgggcgacggcaacgcgatggcggcgcgcgccggcctgccgatgcaggacctggagtttgtgcagttccaccccaccggcatctacggcgccggctgcctcatcaccgagggtgcgcacgcggtagtgaatggtgggtggtggtgg

SEQ ID NO: 200190 - DNA, 433 bp, Unknown
  Bacterial polypeptide expressing nucleotide sequence isolated from the Sargasso Sea
agaacgggacatgctttactccatacactttatcagcaatcacttaaaaataatgtagaattttatattgaatattttgttttagatttaatttctgatgatcaaggtaattgcattggtgtggtaacatggtgtttagaggatggatcaatccatagatttttgtctcatcaaacaattctagctattggtggatatggaagagcttacttctcatccatgagtgctcacatttgtattggtgatggtagtgcaatggctttaagacaaaacctacctctttttgatatggaatttattcagttccatccaacaggagtttacggtgcaggagtgttaatcattgagggagcaagaggagaaggtggatatttaactaatagtgatggtgaaagatttatggaaagatatgctccaaatgcaaaagatttag

SEQ ID NO: 200191 - DNA, 437 bp, Unknown
  Bacterial polypeptide expressing nucleotide sequence isolated from the Sargasso Sea
actgaaagttctagagttcgacggaatcgtcgttggaggcggtggttctggcttaatggcttccttacaattagcccaatccggtttcaaaaccgctgtagtttcaaaagttttcccaacgagatctcacactgtttccgctcaaggaggtatcacttgtgcaattcaaagtgctgatccggatgatgattggagatggcatatgtacgacactgttaagggttcagattttattggtgatcaagattctatcgagtacatgtgtcaagaaggtcccaaagcagtttttgaacttgagcatatgggattacctttctctagaacagaggaagggaaaatttatcagagagcttttggaggccaatcaaaggattacgggaaaggcggtcaggcagaaagaacttgcgcagccgcagatagaaccggacatgctcttt

SEQ ID NO: 200192 - DNA, 739 bp, Unknown
  Bacterial polypeptide expressing nucleotide sequence isolated from the Sargasso Sea
atggagcttagcgtaaatctatatagatataatcctgagcaggataagtttccttatatgaagaactataaggttaaaaagcctgaaaaagatattatggttctagatcttcttaatatgcttaaggaggatgacgcaactatttcttacagacgatcatgccgagaaggtgtgtgcgggtctgatggcatgaacattaatggtaaaaatgggttggcatgcattactcctttgtcaaaagtcttaaaaggaaataagcttgagttaagacctttgcctggtcttcctgttataagagatcttatagtagatatgactcaattttacgagcagtatgaaaagattaaaccatttttgcagtctgacacagaacctcctgagcaggaaagacttcaatctccacaagatagagataaattagatggcttatatgaatgtattctttgcgcctgctgttctacaagttgtccatccttttggtggaatcctgataaatttgttggaccagctgcacttcttcaggcatatagattccttgcggatacaagagatactaagaaacaagagagattagaagaattaggagatccttttagtgtttataggtgccacggcattatgaattgtgtaaatgtttgcccaaaaggtttaaatccaaataaagcaattggtgaaattaaatcaatgcttttaactggtactaaagaggataaaataaaggttgtaggtttggagtgag

SEQ ID NO: 200193 - DNA, 570 bp, Unknown
  Bacterial polypeptide expressing nucleotide sequence isolated from the Sargasso Sea
aatggttcaaattaatcttccaaaaaaatcggaaattaaaaaaggacaatattttaaagataaaacgggatcaaaaaatataagaaaagttaatatctataggtgggatccagctacaggagagaatccaagaatagacacttatgaagttgatatggacaattgtccttcaaaagttttagatttactaaataaaattaaaaacgaaatcgatccatcacttgcgtacagaagatcttgcgcacatggagtttgtggatcatgcgcaatgaacatggatggaaaaaatgggttagcctgcacaaaaccacattctgaaatcaaaggagacattaatatttatccattgccgcatctaaaagttttaaaagatttaattggagatctaagtactctttataagcagtatgagtcagttcagccgtggttaaaaactacaaaaaaaatagatgacacagaacatcgtcagtcaaaagaagatagatcaaaactagatggtttgtatgaatgtataatgtgtgcgtgttgttctacttcatgcccaagttattggtggaatggagaaaagta

SEQ ID NO: 200194 - DNA, 713 bp, Unknown
  Bacterial polypeptide expressing nucleotide sequence isolated from the Sargasso Sea
accagtgcaaccaactgctcactatgcaatgggaggaataccaacagatgttaatggaagagttctaagtgatgaaaaaaacactgtattaccaggcgtttatgccgctggcgaagctgcttgtgtaagtgttcatggagcaaacagactaggtactaactcattactagacattgtagtttttggtaaaagagctggacaaagcatgcttgaatatgtatctaaaaccaaatctacttcaattagtaacaatgcagctgatgatttagtaaacaaaataaataacttgattgacaaggaacatactgatgaattttcagtaggaagaataagaaatgaattacaggaatcaatggaagagaatgcaaaaatatttagatctgaagaaactctgagcaaacaaactgaaattcttgaaaacttaagagagcgatatgaaaatgtaacaatatttgataaaggaaaagtatttaacacagagttaatggaagctatagaattagactaccttcttgatatgtctgaatcaacagtagcaagtgctctagcaagaaaagaatctagaggtgctcattcacgacaagacttcatagatagagatgatactaatttcatgaaacattcatttgcatttaaaaatggtaactctgcaaatttaagatataaagatgtagaattaggaaaatacaaacctatggaaagaaaatattaat

SEQ ID NO: 200195 - DNA, 310 bp, Unknown
  Bacterial polypeptide expressing nucleotide sequence isolated from the Sargasso Sea
tatgaattcttataaaattatagaccacgagtatgatgttgtagttttgggagctggaggttcaggacttagagcagcagtcggacttagtgaggctggattaaaaactgcctgtatttcaaaagtttttccaaccagaagtcatacttcagctgcacaaggtggaatttcagcagctttagggaatatgggcgaagatgattggcgttggcatatgtatgatactgttaaaggatctgattggcttggagatcaagactcaatagaatatttatgtaaagaagcaccaagggcagttttagagttagaa

SEQ ID NO: 200196 - DNA, 412 bp, Unknown
  Bacterial polypeptide expressing nucleotide sequence isolated from the Sargasso Sea
atggttgaatttacattaccttccaattctaaagtacaaaaaggcattaaccatcccgtaaaggaagtttcacaaaagccaaaaaaaattgttatttatcgttggaatcctgaagatcaaaacaacccacgtttagatacttacgaaattgatttgagtaaatgtggaccaatggttttggatgccctaatgaaaataaaaaatgaaattgattcatcattaacttttagaaggtcttgtagagagggtgtttgtggttcatgtgcgatgaatattgatggtgtcaatactttagcttgtttaaagcctattgaagaagtgaatggagaaattagaatctatccgcttccacacatgcctgttgttaaggatttagttcccgatctaagtaaggcttaccaacagctagaat

SEQ ID NO: 200197 - DNA, 393 bp, Unknown
  Bacterial polypeptide expressing nucleotide sequence isolated from the Sargasso Sea
aatggttcaatttgttcttccaaaaaattctaaaattcaaaaaggcattattcacaaacctaaacaacctactactgatccgataaaacttgaaatatataggtgggatcctgaaaaaaaagaaaatcccaaaattgatacttttgaagttaataaaaataaatttggcccaatggttcttgatgcactaataaaaattaaaaatgaaattgactcaacgctaacatttcgtcgctcttgtcgtgaaggggtctgtggatcttgtgcaatgaatatagatggcattaatacattggcttgtattaagccaattgaagaaattaaaggtacaattaaaatatttcctctacctcatatgaatattataaaagatttagtgcctgatttatctaa

SEQ ID NO: 200198 - DNA, 358 bp, Unknown
  Bacterial polypeptide expressing nucleotide sequence isolated from the Sargasso Sea
atgagttcatacaaaattatagaacatgaatacgatgtagtcgtacttggagctggaggtgcaggtttaagagccgcagttggccttagtgaggctggattaaaaactgcttgtatatcaaaagtttttcctactcgaagtcatacttcagcagcacagggcggtatttctgcagcactaggaaatatgggagaagatgactggaggtggcatatgtacgatacagtaaaaggttcagattggttaggggatcaggactgcattgagtatttatgcaaagaggccccaagagctgttttagaactagaaagatatggagttccatttagtagaacagaagatggtaaaatttatcaaa

SEQ ID NO: 200199 - DNA, 362 bp, Unknown
  Bacterial polypeptide expressing nucleotide sequence isolated from the Sargasso Sea
tatgagtgaatacagtattatagatcatgaatatgacgtcgttgttctaggagcgggtggctctggcttgagggctgcagttggtctaagtgaggcaggattgaaaacagcgtgcatttcaaaagtttttccaacaagaagccatacttctgctgctcaaggaggaatatcagcagcgttaggtaatatgggtgaggacgattggagatggcatatgtatgatactgttaaaggatcagattggttaggtgatcaggactgtattgaatatttatgtaaagaagcgccaagagctgttttggaattagaaagatatggagttccatttagtcgtacaaaagatggaaaaatttatcaaagat

SEQ ID NO: 200200 - DNA, 802 bp, Unknown
  Bacterial polypeptide expressing nucleotide sequence isolated from the Sargasso Sea
tttagagcatgctatgctgccgatagaaccggacacatgatacttcaaactctatatcaaaaatgtgtatcgatgggagtagaattttttgatgagttccaagtattagatataaaaattgaagatggagtgtgcaaaggtgttgttgcttttgaactctctactggagacatccacatatttgaatcaagagcagtaacttttgcaacaggtggttttggaagaatatttaaagtaagctctaatgctcactcactaacaggtgatggtcctggaattttatatcaaaaaggaattcctcttgaagacatggaattttatcagttccatccgactggtatttacagactaggaattttgttatccgaagcagcaagaggtgagggaggaattttaaggaacaaagatggtgaaagatttatggaaagatatgcaccttctataaaagacttggcacctagagatatggtttctcgagctattgctacagaaattagtcaaggaaatggcgcaggaccagatagcgattatgtatatcttgacttaacacatcttggagctgaaacaattaagaaaaaacttcctgatattacagacttcgtaagaacatatgtaaaaattgaacctattaatgaacctataccagtacaaccaactgctcactatgcaatgggaggaataccaacagatgttaatggaagagttctaagtgatgaaaaaaacactgtattaccaggcgtttatgccgccggcgaagctgcttgtgtaagtgttcatggagcaaacagacttggcactaact

SEQ ID NO: 200201 - DNA, 403 bp, Unknown
  Bacterial polypeptide expressing nucleotide sequence isolated from the Sargasso Sea
aatggctgaattaacacttccacaaaattctaaagttcagaaaggaaaggaatatcctttagaggacgattgtgaaaataaaaaaggattctctatatatagatggagtcccgatgacgacgaaaatccaagaactgattattatgaaatagatttatcaaaatgtggaccaatggttctcgatgcaataatcaaaattaaaaatgaaattgatcctactttaacttttagaagatcatgtagagagggtatatgtggatcatgcgcaatgaatattgacggtgtaaatactctagcatgtactaaatcaattgatgatgttaagggtgacattaaaatcagtccattgccccatcaacctgtgataaaagatttagttcctgatttaacaaacttttatgag

SEQ ID NO: 200202 - DNA, 178 bp, Unknown
  Bacterial polypeptide expressing nucleotide sequence isolated from the Sargasso Sea
tatagatggataaacgatagcagggatggagataaaaaagaaagattgaagaaagttgcggatgaattaaaactttatagatgccatactataatgaattgtacaaattcatgtcctaaaggccttaatcctgcaaaagctataggatctatcaaaaaaatgcttgcaacaagctaaa

SEQ ID NO: 200203 - DNA, 221 bp, Unknown
  Bacterial polypeptide expressing nucleotide sequence isolated from the Sargasso Sea
tatgactaaaggatatgaatttgttgaacatcagcacgatgtagtcgtggtgggagctggcggtgctggattgagagcgaccctagggttggttgaagctggactatctacagcgtgtgttaccaaagtttttcctacaagaagccatactgtggctgcacaaggaggtattagtgcagcattaggtaatatgggcgaagacgattggcgatggcatatgt

SEQ ID NO: 200204 - DNA, 310 bp, Unknown
  Bacterial polypeptide expressing nucleotide sequence isolated from the Sargasso Sea
tatgaaatcttataatataatcgatcatgaatacgatgtcgtagttcttggagctggtggatctggattaagagcagctgtaggcctaagcgaggctgggttgaagacagcgtgtatttctaaagtatttccaactagaagtcatacctctgcagctcaaggtggcatttcagcagcacttggaaatatgggagaggatgattggagatggcatatgtatgatactgtaaaaggatctgactggcttggagaccaagatagtattgaatatttgtgtaaagaagcgcctaaagcagtattagaattagaa

SEQ ID NO: 200205 - DNA, 601 bp, Unknown
  Bacterial polypeptide expressing nucleotide sequence isolated from the Sargasso Sea
atggttcagctaagcttacctaaaaattcagaggttaaaaaaggcaaatattttaaagacaaaactggatctaaaaatataagaaaagtaaatatttatagatgggatccatcgactgaagaaaatcctagaatcgatacatacgaagttgatatggataattgtccatctaaagtgctggatattttaaataaaattaaaaacgaaattgaccctacattggcctatagaagatcttgtgctcatggtgtttgtggttcttgtgctatgaatatgggaggaaaaaatggactagcttgcacaactccccatgcagagatagatggtgacatcgatatttatcctctacctcatttaaaagttaaaagagatttgatcggcgatttagatggcttatataaacaatatcaatctattgaaccttggttaaaaaataactcaacaaaacatacaacagaaatttatcagtctaaagaagatagagcaaaacttgatggtgcttacgaatgtattatgtgtgcttgctgttctacatcttgcccaagttattggtggaatggagataaatatttaggtccagcaggttctgctacaggcttat

SEQ ID NO: 200206 - DNA, 484 bp, Unknown
  Bacterial polypeptide expressing nucleotide sequence isolated from the Sargasso Sea
aatggagcttagtgtaagtctatacagatacaatcctgagcaggacaagtttccttatatgaaaaactataaggttaaaaagcctgaaaaagatattatggttttagatcttcttaatatgctcaaagaggatgacgcaaccatttcttacaggcgatcatgcagagagggtgtatgcgggtctgatggaatgaacattaatggtaaaaatggtttggcatgcattactcctttgtctgaagtcttaaaagggaataagcttgagctaagacctttgcctggtctgcctgtcataagagaccttattgtagacatgactcaattttatgagcagtatgaaaaaattaaaccttttttgcagtctgactcagaacctcctgagcaggaaagacttcaatctcctcaagatagggataaattagatggtctatacgaatgtattctttgtgcatgttgttcaacaagttgtccatccttttggtga

SEQ ID NO: 200207 - DNA, 145 bp, Unknown
  Bacterial polypeptide expressing nucleotide sequence isolated from the Sargasso Sea
gaagaaagagagattaaaagaattagatgatacttttaaagtatacagatgccatacaattatgaactgtacacaagcatgtcccaagggattaaacccagcaaaagcgattgcagggattaagcagatgattgcccaacaataa

SEQ ID NO: 200208 - DNA, 703 bp, Unknown
  Bacterial polypeptide expressing nucleotide sequence isolated from the Sargasso Sea
aatgacaattgaaatcaatgagggaagaggagttggtccgaaaaaagaccatataatgttgcaccttgagcacatagatccagaaactcttcatgaaagattacctggcattactgaaacagcaaaaattttttgtggtgttgatgtaaccaaagacccaattcctgttctacctacggtgcactataatatgggtggtgtcccaacaaattatcatggtgaagtgttatgtccaagtgactcagacccaaacaaaactgttcaaggactaatggccataggagaggctgcatgcgtttctgtccatggggcaaataggctcggaacaaattcacttcttgatattgtagtttttggtagggcggcagcacaccgagcaagtgaagtgctaacgccaggagcgtctcacgcaccagtatcaaaagtttcaacagaccgtgctattagcaggttagatagaatgcgtcattcaaaaggggataaacagccaggcgaactaaggcttgagatgcaactggcaatgcaaaaatatgcagccgtttttcgttcaggtgaatcacttacagagggtgttaaaacaatggactctatagcgggggatatgaacaatattggtattcaggatagatctttaatatggaataccgatttaatagaggccatggaactagaaaacctgatggggcaggctttagtgactatc

SEQ ID NO: 200209 - DNA, 517 bp, Unknown
  Bacterial polypeptide expressing nucleotide sequence isolated from the Sargasso Sea
atggttgaatttactttacctgccaactcaaaagtacaacaaggtattgctcatccagttaagaaagtatcaaaaaaaccaaagaaggttgtaatttatcgttggaatcctgaagatcaagacaatcctcgtttagatagttatgaaattgatttaagtaaatgtggcccaatggttttggatgctttaatgaaaataaagaatgaaattgactcttcattaaccttcagaagatcttgccgagagggcgtttgtggttcctgtgctatgaatattgatggggtcaataccttagcatgcttaaaacctattgaagaagtaaacggtgagattagaatttatccacttcctcatatgcctgttgtcaaagacttagtgcctgaccttagtaaggcttacgaacagttagcttctattaaaccttggctgcaacgctctaatgataattctaatgccgcggtaagcattagtgaggaaaaaaaacaaacaccaaaagatagagaaaaattagatggtc

SEQ ID NO: 200210 - DNA, 482 bp, Unknown
  Bacterial polypeptide expressing nucleotide sequence isolated from the Sargasso Sea
tatgtctaaatatgaaattgtagatcatgaacatgatgtggtagttgttggcgctggaggtgctggattaagagcaactttgggcatggtatctggtggattaaaaactgcttgtatcacaaaagttttcccaacaagaagccacactgttgcagctcaaggtggcattggggctgcgcttaacaatatgggtgaaaatgatagttggcaatttcatatgtatgatacagttaagggatctgattggcttggcgaccaagatgctatcgaatatatgtgtaaagaagctatcccgtctgtgaccgagttagagaattttggagttcctttttctagaacagaagatggagaagtctatcaaagaccatttggtggtcatacattagattatggaaagaaaatggcacgaagagcttgtgcagcagcagatagaactgggcatgctattcttcatactctctaccacaatgtctcaatatcaa

SEQ ID NO: 200211 - DNA, 475 bp, Unknown
  Bacterial polypeptide expressing nucleotide sequence isolated from the Sargasso Sea
gctaaggcctttgcctggtcttcctgttataagagaccttattgtagatatgacacaattctatgagcagtatgaaaaaattaaaccatttttgcagtctgattcagagccgccagagcaggaaagacttcaatctccaaaagatagagataagttagacggactgtatgagtgcattttatgcgcttgctgttcaacaagctgcccatctttttggtggaatcctgacaaatttgttggtccagctgcacttcttcaggcttacagattccttgcggatacaagagacacaaagaaacaagagagattagaagaattaggagatccttttagtgtttataggtgtcatggcattatgaattgtgtaagtgtttgcccaaaaggtttaaatccaaataaagcaattggtgaaattaaatcaatgcttttaactggcactaaagaggataaaataaaggttgtaggtttggagtga

SEQ ID NO: 200212 - DNA, 367 bp, Unknown
  Bacterial polypeptide expressing nucleotide sequence isolated from the Sargasso Sea
tatgagttcatacaaaattatagaacatgaatatgatgtagttgttttaggagcaggcggagcaggattaagagctgctgttggtcttagtgaggcaggattaaaaacagcatgcatttcaaaggttttccctacaagaagtcatacttcagcagctcaaggaggtatttcagctgcattaggaaatatgggcgaagatgattggagatggcacatgtacgatacagtcaaaggatcagattggctcggagatcaagattgtattgaatatttatgtaaggaagcgcaaagagctgttttagaattagaaaagtatggggtttcatttagtcgtactgaggatggaaaaattatcaaagaccatttg

SEQ ID NO: 200213 - DNA, 292 bp, Unknown
  Bacterial polypeptide expressing nucleotide sequence isolated from the Sargasso Sea
aatggcagagttctcattaccaagaaattcaaaagtagttaaaggaaaaacctttgatattattagtaaatccaaaaacaaaaaaaattttaatgtttacagatggtcccctgatgatgatttaaaccctaggttggacacatatacacttgatttagatgattgtggtccaatggttttagatgccttaataaaaataaaaaatgaaatagatactactttaacattcagaagatcatgtagagaaggaatttgcggatcatgttcgatgaatgttgatggtactaatacc

SEQ ID NO: 200214 - DNA, 364 bp, Unknown
  Bacterial polypeptide expressing nucleotide sequence isolated from the Sargasso Sea
atgagttacgaaatcgaatatcacgattacgacgttgttgttgtaggagctggaggctctgggttaagagcaacggtcggtgctgtagaaaatggatacaagacagcttgcatttctaaagtttttccaacaagaagccatacagttgctgcacagggcggaatctcagctgcattagggaacatgggagaagatgattggcgatggcatatgtacgatacagttaaagggtcagattggcttggagaccaggatgcaatcgaatatctatgtaagaatgcgcctaaagcagttttagaattagaaaattatggagtgccattcagtcgaacagaagatggtaaaatatatcagcgagctttgg

SEQ ID NO: 200215 - DNA, 337 bp, Unknown
  Bacterial polypeptide expressing nucleotide sequence isolated from the Sargasso Sea
tcctccggctcgcgagcatctgcagaagccagagcagcgcgaaaaactcgacggtctgtacgagtgtattctttgcgcatgttgttcaacctcttgcccgtcgttctggtggaacccggacaagtttatcggcccggcaggtctgctggcggcgtatcgtttcctgattgacagtcgcgatactgaaaccgacagccgtctcgaagggttaagcgatgctttcagcgtattccgctgtcacagcatcatgaactgcgtcagtgtatgtccgaaggggcttaacccgacgcgcgccatcggccatattaagtcgatgctgctgcaacgtagtgcgtaa

SEQ ID NO: 200216 - DNA, 265 bp, Unknown
  Bacterial polypeptide expressing nucleotide sequence isolated from the Sargasso Sea
atggccaactcatacgaaattattgaccacgcttatgacgtggtcgttgtcggcgccggcggcgccgggcttcgcgccacggttggtttggccgaagcgggcttaaagaccgcttgtatatcaaaggttttcccgacccgcagtcacacggtggccgcgcaaggtggcgtttccgcctctctcggcaatatgggggcggacgattggcgctggcacatgtacgacaccgttaaaggttcggattggcttggcgatcaagactcca

SEQ ID NO: 200217 - DNA, 286 bp, Unknown
  Bacterial polypeptide expressing nucleotide sequence isolated from the Sargasso Sea
atgagttcatataaaattatagagcatgagtatgatgttgtggtcctaggagctggaggcgcaggtttaagagccgctgttggcttaagtgaggctggactaaaaacagcttgtatttctaaagtatttccaacaagaagtcatacatctgctgcacaaggtggtatatcagcagcattaggcaacatgggagaggatgattggagatggcatatgtatgatacagtcaaaggagcagactggttaggtgatcaagattgtatagaatatttatgcaaagaagccc

SEQ ID NO: 200218 - DNA, 335 bp, Unknown
  Bacterial polypeptide expressing nucleotide sequence isolated from the Sargasso Sea
tatggttcaattaacactacctaaaggttcaaatgtttccatgggaaaaactcatggaaatgacggtaaaaataaagttgttttcaacgtttacagatggaatcgtgaatctggtgaaaacccaagattagacaaattctttattgaaaaatctaaattaggtccaatggttttagatgccctaatgtttattaaaaatgagattgattccaccctaacatttcgtagatcatgtagagaaggtatttgcggctcatgctccatgaacgttaatggaacaaatactttggcttgtctaaaacctatagtaggtaaagagattatatttaccctct

SEQ ID NO: 200219 - DNA, 379 bp, Unknown
  Bacterial polypeptide expressing nucleotide sequence isolated from the Sargasso Sea
aatggctaatttcgcacttcctgcaaattccaaaatgaccaagggcgagtcccatcccgcgccagctaacgcacagaatgtgagaacattccagatctatcgctggtcgcccgatgatgatgtcaatccacggatcgacagtttcgacattgatcttgatgattgcggcccgatggttctggatgcgctgatcaagatcaagagcgagcaggacagcagcctgacatttcgccggtcatgccgtgagggaatctgcggatcatgttcgatgaacattgatggcacgaacacgctggcctgtctgaaaaacattgatgaggtgaagggtgatgtgaagattttccctttgccccatatgcctgtggtcaaggatcttgtg

SEQ ID NO: 200220 - DNA, 240 bp, Unknown
  Bacterial polypeptide expressing nucleotide sequence isolated from the Sargasso Sea
gttgtccaagttattggtggaattctgataaatatctaggtcctgcatctttgttacatgcttatagatggataatcgatagtagagatcaagctagtgatgagcgtttatcaagcatagccgataaatttaaactttttagatgccatacaattatgaactgtactaaaacttgtccaaaattactaaaccctgccaaggctatctctcatatcaaaaaaatgattgcatctaaataaa

SEQ ID NO: 200221 - DNA, 410 bp, Unknown
  Bacterial polypeptide expressing nucleotide sequence isolated from the Sargasso Sea
aatggctgaatttacattaccaaaaaattctaaaataaaatcaggaaaaatattttctgaggcaaatggtgccacgcgtaagaagaaatttcatatataccgatgggagccagattccggtaagaatcctagattagacgtctatgaacttaatcttgataattttgggcctatgattctcgatgcaattatttatatcaaaaatgaaattgattctaccttaacatttagacgatcttgtcgcgaaggcatatgtggttcctgttcaatgaatatcggcggtacaaacacattagcttgcacaaaatcaattgcaagttttgatggtgacatatcaatttatcctttaccacacatgccagtggttaaagatttagtcccagatttgagtaatttttataagcaatatg

SEQ ID NO: 200222 - DNA, 529 bp, Unknown
  Bacterial polypeptide expressing nucleotide sequence isolated from the Sargasso Sea
atggttaaatttaatcttccagataattcaaaacttacaaaaggcgattattttaaatctgatagcgattcaagtgatattaaaaaatttcaaatttatagatggtcacctgatgataaaaggaatccaagaatggatacatatgaagttgatatgaattcatgtggacccatggttcttgatgcagttatgaaaattaagaatgaaattgattcatctcttacgtttagaagatcgtgtcgagaaggaatttgtggttcatgtgcaatgaatattgatggcacaaataccttggcttgtacaaaagctattagcgatgttaagggagatgttaaaatttatccattgccacatatgcctgttattaaagatttaataacaaacttaaaaaccctttatacacaattaaagtctattaagccttggttacaaaataataaaagtcaggcagccgaagtagaaaatatacaatcgagagatgaaagatcaaagttagatgggctttatgagtgtatattatgtgcatgtg

SEQ ID NO: 200223 - DNA, 255 bp, Unknown
  Bacterial polypeptide expressing nucleotide sequence isolated from the Sargasso Sea
agctcatatcacaataatagctacgggtggatatggcaaaacatattactcatcaacatctgcccacacatgtactggagatggaaatgctatggttttaagagctggtttacctttgcaggatatggaatttgttcaattccatccaacaggaatttatggacatgggactttaatatcagaaggtgttaggggtgaaggaggttatttattgaattctaaaggagaaagatttatggagcgttatgctccaaa

SEQ ID NO: 200224 - DNA, 211 bp, Unknown
  Bacterial polypeptide expressing nucleotide sequence isolated from the Sargasso Sea
tatgagttcatataaaattaaagatcacgaatatgatgtagtcgttctcggagctggaggtgcaggtttaagagccgcagttggccttagtgaggccggattaaaaactgcctgtatatcaaaagtttttcctacaagaagccatacttcagcagcacaaggaggtatttctgcagccctaggaaacatgggagaagatgactggagatgg

SEQ ID NO: 200225 - DNA, 667 bp, Unknown
  Bacterial polypeptide expressing nucleotide sequence isolated from the Sargasso Sea
aatggtgataaaaactcagttgtaccaggctttatggcgattggcgaagctgcatgcgtctctgttcatggtgcaaatagactaggaactaactcactcctagatatagtggtgtttggaagagctgccgcaatgagaactgatgatactttaaaaaagggtctttctcactctaaaattcataaatctattactgataaaatactagatcgtttaaacagaacattacatgcaaaaggggatacttctgttaatgatgtcaggtttgcaatgcaaaatgcaatgcaaaaacatgctgctgtttttagatctacaaaatctctaaatgaaggtgttaacaaaattaatactataagtcgtggattagatgatgttagtgttaaagataaatctttaatttttaataccgatctagttgagtctcttgaacttgaaaatttaatgcaacaagctttagtaacaatgaggtctgcagatcaaagaaaagaatctagaggtgcacatgctcatgaagattttcctaatagagatgataaagattggatgaagcatacagtaatgtggctagacgaaaaaaataaatctaaattgcaatatagagatgttcatttaaatactctatctaatgaggtgaaatcaatacctcctgttgcaagggtatattaaa

SEQ ID NO: 200226 - DNA, 403 bp, Unknown
  Bacterial polypeptide expressing nucleotide sequence isolated from the Sargasso Sea
gatggtacaatttagcttacctgctaattcaaaaattacaaaaggaaatgattttaagagtaaggagaaatcaaaattacccaaaaaattaattatttatagatgggatcctgaaaaaaatcaaaatcctagattagatacttatgaaatagatcaagttaaatgtggtcctatggttttggatgctcttatgaagattaaaaatgaaatagatcctacacttacatttagaaggtcttgtcgtgaaggagtgtgtggatcgtgtgcaatgaatattgatggggttaatactttagcatgtttaaaaagtatgtctgatgtaaaaaaagatataaaaatttatccactaccccatatgcgagttggtaaagatctagtaccagatttgagtaaagctttatga

SEQ ID NO: 200227 - DNA, 136 bp, Unknown
  Bacterial polypeptide expressing nucleotide sequence isolated from the Sargasso Sea
tagattaaaaaaagttgctgatgaattaaaactatatagatgccatacgattatgaattgcacaaattcatgccccaaaggtttaaatccagccaaagctattggctctattaaaaaaatgcttgcaacaagctaa

SEQ ID NO: 200228 - DNA, 502 bp, Unknown
  Bacterial polypeptide expressing nucleotide sequence isolated from the Sargasso Sea
tatgaaagcatacaaaattatagatcacgaatacgatgttgtagtcctaggagcaggtggctcaggattaagagctgctgtcggactctcagaagctggtctcaaaaccgcttgcatatcaaaagtttttccaacaagaagtcatacgtcagctgcacaaggtggaatatccgcagctttaggaaatatgggcgaagatgattggagatggcatatgtacgatacagttaaaggatcagattggttaggcgatcaagatgcaatcgaacacttatgtaaagaagctcctaaagctgtaattgaattagaaaaatacggtgtgccatttagtagaacaaaagagggaaaaatttaccagagagcatttggtggaatgacaaaaaattatggaaatgagtctgtacaaagaacttgtgcagcagcggatagaactggtcatgcaatacttcatactttatatggtcaagctttaaaacataatacagaattttttatagaatac

SEQ ID NO: 200229 - DNA, 910 bp, Unknown
  Bacterial polypeptide expressing nucleotide sequence isolated from the Sargasso Sea
taaagatttagcacctagggatatggtatcaagagctatagctactgaaataagtgaaggtaatggtgcgggtcctgatagcgattacgtttatttagatttgactcaccttggtgcagagacaataaagaaaaaattacctgatataaccgattttgttagaacatatgtgaaaattgaaccgattgaagaacctatacctgttcaacctacagcacactacgctatgggaggcatcccaacagatgtttattcacgtgtacttagtgatgaaaaaggaacagttctaccaggagtttatgctgctggagaagcagcatgtgtaagtgttcatggtgcaaatagattaggtactaattcactcctagatatagttgtttttggtaaaagagcaggtcaaagtatggttgattacgtaactcaaacaaaaccaaacagcataagtgacaatgcctctgatgatctttcaaaaaagatacaaaatcttattgataaagaacatactgatgaattttctgtagcaaatattagaaaagaccttcaagaatccatggaagagaatgcaaaaatatttagaactaaagagactttagaaaaacaaacagagatattagaagaattaagagaaagatacgaaaatgtgacaattttcgataaaagtaaagtccataattcagagctcgttgaggctattgagttagattaccttttagatatgtccgaggctacagtagcaagtgcacttgctcgtaatgagtcaagaggagctcactcaagacaagattttcctgatcgtgatgatacaaactttatgaaacattcctttgcgtttaaaaaagataacacggcaaatcttaagtacaaagatgtagaattaggaaaatatgaaccaatggaacgtaaatactaa

SEQ ID NO: 200230 - DNA, 356 bp, Unknown
  Bacterial polypeptide expressing nucleotide sequence isolated from the Sargasso Sea
aatggctcagtttacactccctgctaattcaaaaataactaaaggcaaaactcaccaattaaaagaacctgcaaatgatccaaagaaacttgcaatctatagatgggatccagaagatgataaaaatcctaggatagataattatgagatagatcaagaaaagtgcggcccaatggtattagacgcacttatgaaaataaaaaacgaaattgatccaactttaacatttagaagatcttgcagagaaggagtttgtggttcttgtgctatgaatattgatggtgttaacacattagcatgtttgaaaagcatgtccgaagttaagaatgaaatcaaaatttatcctcttccacata

SEQ ID NO: 200231 - DNA, 483 bp, Unknown
  Bacterial polypeptide expressing nucleotide sequence isolated from the Sargasso Sea
tatggtggaattatctttacccaaaaactcaaaaataattcagggaaaagtctttggaaaaaaaaccaatgaatcaatttgtttcaatatttacagatggaatagggaatccggaagtaacccaagagtagacaagttcttcattccaaaaaaaaaactagggcccatggcactagatgctcttctatttattaaaaatgaaatagacccaacccttacctttagaaggtcttgcagagaaggcatttgtggctcatgctcaatgaatatcaatgggactaataccttagcttgtcttaaacctctgcaaaacgaaagtgaaataaatatatttccattaccacacatgaaagtgatcaaagacttggtccccgatatgagtgaattttatgaacaatataaatctattaagccttggttagaaaatactaaaaaggggaataaagaacgtaaacaatcccctgaagaaagaaaaaagcttga

SEQ ID NO: 200232 - DNA, 726 bp, Unknown
  Bacterial polypeptide expressing nucleotide sequence isolated from the Sargasso Sea
tacatatcagcatgtatagatataatcctgaagaggataagtttccctatatgaaagagtataaaattgataagccaaaaaaagacataatggttttagatttactaaatttactcaaagaagaagatcaatcaatatcatacagacgatcatgcagagaaggtgtatgtggttctgatggcatgaatataaatggtaaaaatggattagcatgtattacacctatatcgtcagttattaaaagaaataaactagaattaagaccccttcctggactccctgtaataagagatcttgttgtagatatgacagaattttatgcacaatatgaaaaaataaaacctttcttacaaaatgaaacaactgcaccagagcaagaaagacttcaatcacctgaagaaagggaaaaacttgatggattatatgaatgtatattgtgcgcatgctgctctacaagctgtccttcgttttggtggaatccagataagtttgttggtccggctgctcttcttcaagcttatagatttttggcagattctcgtgatttgaaaactaacgaaagattagaagatctctcagatccttttagcgtctatcggtgtcatggaataatgaactgcgttaatgtctgcccaaaaggtttaaatccaaataaagctattggtgaaataaaatcaatgttacataaaaataaaaaggatataattgctactgatggagtataaa

SEQ ID NO: 200233 - DNA, 264 bp, Unknown
  Bacterial polypeptide expressing nucleotide sequence isolated from the Sargasso Sea
tatgagtacaaaagaatataaatttatagatcatgaatatgatgtagtagtagttggcgctggtggtgcaggtcttagagcaactttaggttgtgccgagtccggattaaaaaccgcgtgtatttcaaaagttttcccaactaggagccatactgttgctgcacaaggtggtatttcagcagccctaggtaatatgggtgaagataattggcgttggcatatgtatgatactgttaaaggtgctgattggttaggcgaccagga

SEQ ID NO: 200234 - DNA, 532 bp, Unknown
  Bacterial polypeptide expressing nucleotide sequence isolated from the Sargasso Sea
atggagcttagcgtcagtctatacagatataatcctgagcaggataagtttccttatatgaagaactataaggttaaaaagcctgaaaaagatattatggtcttagatcttcttaatatgcttaaggaggatgacgcaactatttcttacaggagatcatgccgagaaggtgtgtgcggatctgatggcatgaacattaatggtaaaaatgggttggcatgtattactccattgtctgaagtcttaaaaggaaataagcttgagttaagaccattgcctggtcttcctgtcataagagatcttatagtagatatgactcaattttatgagcagtatgaaaagattaaaccgtttttgcagtctgacacagagcctccagagcaagaaagacttcaatctcctcaagatagagataaattagatggactatatgagtgtattctttgcgcctgttgttcaacaagttgtccatccttttggtggaatcctgataagtttgttggacccagcggcactacttcaagcatataga

SEQ ID NO: 200235 - DNA, 518 bp, Unknown
  Bacterial polypeptide expressing nucleotide sequence isolated from the Sargasso Sea
aatggctgaatttacattaccaaaaaattctaaaataaaatcaggaaaaatattttctgaggcaaatggtgccacgcgtaagaagaaatttcatatataccgatgggagccagattccggtaagaatcctagattagacgtctatgaacttaatcttgataattttgggcctatgattctcgatgcaattatttatatcaaaaatgaaattgattctaccttaacatttagacgatcttgtcgcgaaggcatatgtggttcctgttcaatgaatatcggcggtacaaacacattagcttgcacaaaatcaattgcaagttttgatggtgacatatcaatttatcctttaccacacatgccagtggttaaagatttagtcccagatttgagtaatttttatatagcatatgctttcatcaaaccttggatgcaaaccgaaacaccagctccagagaattcagaaagaaatacatcaaagaatgatagggagaaactagacggcctttatgattgcatat

SEQ ID NO: 200236 - DNA, 742 bp, Unknown
  Bacterial polypeptide expressing nucleotide sequence isolated from the Sargasso Sea
atgacacttagcatcaatatttacagatacaatccagaaaaggacaaatttccttatatgcaaagttttgaatttgaaaagcctaagagagatattatggtcttagaattgctcaatcagctgaaagaaaaagatcctactatttcatacagacgatcctgcagagaaggagtttgtggctccgatggaatgaacataaatggaaaaaatggtttagcttgcattacaccattatcatcagttatcaaaaaaaataagctagatcttcgacccttgccaggccttcctgttgttagagacttagttgtagatatgactgagttttacgctcaatatgaaaagattaagccatttcttcaaaacgacactcctgttgatatcggagagaggctgcaatcaccagaagacagggataagttggatggtctctatgaatgtatcctctgtgcttgttgctcaactagctgcccatctttttggtggaatcctgataagtttgtcggtccagcagctcttcttcaggcttataggtttattgcagattcgagagatacaaaaactgcagagagactgcaaagtttatcagatccattcagcgtttatagatgtcatgggattatgaactgtgtgagtgtttgtcccaagggacttaatcctaataaagctattggagaaattaagtcaatgcttctttcaaataaaagcaaccaaaatattattacctctgataaggctgtataac

SEQ ID NO: 200237 - DNA, 265 bp, Unknown
  Bacterial polypeptide expressing nucleotide sequence isolated from the Sargasso Sea
ttggcagaatttgcacttccaaaacactcaaaaattgttaaaggtaaagaatataatcttgaaactgaagcagcaaaccctaagaaggtcaatgtttataggtggtctcctgatgatgacgaaaatcccaggattgacacttacaccattgatttagatcaatgtggtcccatggttttagacgctctaataaagattaaacaagagatagattctagcttaacttttagacgttcttgtagggaaggaatttgtggttcatgtt

SEQ ID NO: 200238 - DNA, 577 bp, Unknown
  Bacterial polypeptide expressing nucleotide sequence isolated from the Sargasso Sea
cgatggcagtgtgacgtatcgccggagctgccgggaaggagtctgtggttcagacgggctcaatattaatggtaaaaacggcctcacttgcatcacgccgctttctgaaacagtgaaaggcgagaagctagtgattcgacctttgccgggtctgccggttatccgagacttggtcgtggacatgagcctattttatgcacagtacaaaaaagtccagccgtatttgcaaaaccctactcctgcgcctgcgataaagcgattgcagacccctgaagagcgtgctcagctaaacggtctttatgagtgcattttgtgcgcttgctgttctaccagctgtccttctttttggtggaatcccgaccgcttcgtcggtcccgcggggctgctgcaagcttatcggtttcttgccgacagccgtgacaccgcgactgaagaccgcctagcaaagctggacgaccccttcagcgtgtttcgatgccatggtattcagaactgcgtcaacgtctgtccaaagggcttgaatccgaccaaagctatcgggcatatccgcaccatgcttttaaaccgggccacctga

SEQ ID NO: 200239 - DNA, 739 bp, Unknown
  Bacterial polypeptide expressing nucleotide sequence isolated from the Sargasso Sea
atgctcaacattaatatatacagatataatccagagaaggataaatttccttatatgcaaacatttcagttcgaaaaaccaaaaagagatattatggttttagagcttcttaatcaattaaaggaaaaagatcctaccatttcatacagaagatcatgcagagaaggagtttgtggttccgatggaatgaatataaatggaaaaaacggtttagcatgcattacgcctttatcttcagtagttaaaaaaaataagttagatcttcgtcctttgccaggccttccagttgtaagagatttggttgttgacatgactgaattctatgctcagtatgaaaagattaagccatttctgcaaaatgatgtgccagttgatattggagaaaggctccagtctcctgaggatagagataaattagatggcctttatgaatgtattctatgtgcctgttgctcaactagctgtccctcattttggtggaatccagataagtttgttggtccagcagcactgcttcaagcttatagatttatagcagattcaagggatactaaaactgcagaaagactacagagcctttctgatccattcagtgtctataggtgtcatgggattatgaattgcgtcagcgtttgcccaaagggactcaatccaaatgaggcaataggtgaaattaagtcaatgctgctttccggaaagaataaagaaaatataattgtatctgatggaatgaattgag

SEQ ID NO: 200240 - DNA, 369 bp, Unknown
  Bacterial polypeptide expressing nucleotide sequence isolated from the Sargasso Sea
aaaaagttaaaccatacctaattaacgatcagccagcggctggtgagcgtcttcaatctattgaagaacgtgataaattagatggactttacgagtgtattttatgtgcatgttgttctacatcgtgtccttcgttctggtggaatccagacaagttcattggtccagcaggccttcttcatgcttaccgtttcctggctgatagccgcgacacggcaactgaagaacgtttagcagacttagacgatgcgttcagtgtgttccgttgccacagtatcatgaactgtgttagcgtttgtcctaagggtcttaatccgaccaaagcaattggacaaatcaaatctatgttattaaaccgcgcggtttaat

SEQ ID NO: 200241 - DNA, 502 bp, Unknown
  Bacterial polypeptide expressing nucleotide sequence isolated from the Sargasso Sea
atggttgaattttcacttccagcaaactcaaaagtcacaactggaaaattacatatgagtaaagagattgctgagtcaccaaaaaaattagtgatttatagatgggatccagaagatgacaaaaatccacgactagatacttatgaaattgatcaaagtaaatgtggacccatggttttggacgccctaatgaaaattaaaaacgaaattgatccaacacttactttcagaaggtcttgtcgtgaaggtgtttgtgggtcttgtgcaatgaatattgatggagtgaatacattagcttgtctcaaaagtatgtcagatgtaaaaaatgatataaaaatctatccacttcctcatatgcgtgttgtaaaagatttagttccagatttaactaaagcttatgaacaactagcctcaattaagccatggttagaaagacctaagtctaacgataacaattcagataatttaaatgaagaaagaaaacaatctccacaaagataga

SEQ ID NO: 200242 - DNA, 228 bp, Unknown
  Bacterial polypeptide expressing nucleotide sequence isolated from the Sargasso Sea
tatgaaaccatacaaaattattgaacatcagtatgatgtagttgttttaggagccggtggcgcaggtttaagagctgcagtaggtctcagtgaagcaggattaaaaactgcttgtatatcaaaggtttttccaactcgaagtcatacatcagcagctcaaggaggtatttcagcagctttaggtaatatgggtgaagatgattggagatggcacatgtatgacactgt

SEQ ID NO: 200243 - DNA, 349 bp, Unknown
  Bacterial polypeptide expressing nucleotide sequence isolated from the Sargasso Sea
aatgaaagcatataaaattatagatcacgaatatgacgttgttgttttaggagcaggtggctctggtttaagagctgcagtcggtctctcagaagccggattaaaaacagcttgtatttcaaaagtattcccaactagaagtcatacatctgccgcacagggaggcatttccgcagcacttggaaatatgggtgaagatgattggagatggcatatgtatgatacagttaaaggctccgactggttaggcgatcaagatgcaatagagtatttatgtaaagaagctccaagagctgttgtcgagttagaaagatatggggttccatttagcagaactgatgatggaaaa

SEQ ID NO: 200244 - DNA, 712 bp, Unknown
  Bacterial polypeptide expressing nucleotide sequence isolated from the Sargasso Sea
aatgaccacttataaaataattgatcacaagtatgatgttttggttgtaggagctggaggatctggtttgcgggctgcagttggattaagtgaatctggtttaaaaactgcttgtatttcaaaagtatttccaacaagaagtcataccgcagcggcgcaaggtggaatttcggctgcgttaggtaatgccggagaagacgattggagatggcacatgtacgatacagtcaagggatcagattggctgggagatcaggattgtatagagtatttatgtaaggaagctccaaaagcagttattgaacttgaacattatggagtgccctttagtagaactaaagaaggaaaaatataccaaagagcttttggtggaatgacaaaaaattatggcaacgaaccagtgcaaagaacttgtgctgcagcagacagaacaggtcatgcaatattgcatacattatacggtcaagcacttaaacataagactgagttttttattgaatatttcgctttagatttgttaatgaaaaacggagagtgtaaaggtgtgttagcttggaatttaaatgatggtaccattcatcgatttagatcacatattacaattttagctacaggtggttatggtaaaatttattattcagctacggcagcacatacttgtaccggagatggaaatggaatggttttgagagctggcttaccacttcaggat

SEQ ID NO: 200245 - DNA, 193 bp, Unknown
  Bacterial polypeptide expressing nucleotide sequence isolated from the Sargasso Sea
gttttattgcaagcatattcgttggataaatgatagcagagatggtgatataaaagagaggttaaagaaagtagctgacgaattaaagctttatagatgtcatactataatgaattgtaccaattcatgtccgaaagggcttaatcccgcaaaagccataggctctattaaaaaaatgcttgcaacaagctaa

SEQ ID NO: 200246 - DNA, 931 bp, Unknown
  Bacterial polypeptide expressing nucleotide sequence isolated from the Sargasso Sea
agggggtattgcggcggcttgggggcgagcagatgattgcgagcagcattttaatgacactatggctgctggttgcgatcataacactgctgatcatgttcgtgtgttaacatcccagtcacgcgctgcaattgagtatttacttaaacatggcgttcaatttgatcgtgctgctaatgatttttccttggcccgtgaaggggctcattctcatgctagagtattgcattataaagacagaactggtgaggcgattatcgagcccttactctccgctgttcggcagcattctaatattgatattttagagcacatgactgtgctggagttggccttagatcagggacgctgtgtgggggcttatttgcgatcggctgatggggagattgttgctgtttcagcgcaacaggtgtttctggctactggaggtgcagggcagttgtacgaacatacctcaaatcctcaaggcgcaacgggtgatggtatggtgctggctcatgctgttggtgctgagttggccgatatggaatttgttcaatttcatcccacgagtgtgttgctagatgcaagcacaaaacactatatgttactctcagaagctctgcgtggtgcaggtgcacggttggtgcttgccgctggacaatcgattatgcagggcaatgaacgtgatttagcctcgcgagatgtggtatcgcgtgccatttttaggcagatgcaggctggcaaacaggtgtatttagatgtcagcatgcttgcggacaatttttcagagcgcttccctaccctagccaaggttttactgaagcagggctttgatcttcaaacagatttggtgcccatttttccaacggcacattatattatgggcggtataaaaacagatattcatgcccaaacacgcgttcctggcctatatgccattggtgaagta

SEQ ID NO: 200247 - DNA, 793 bp, Unknown
  Bacterial polypeptide expressing nucleotide sequence isolated from the Sargasso Sea
catccaactggaatatatagattaggtattttgctttcagaggcagcgagaggtgagggtggaattctaagaaataaagatggagaaagatttatggaaagatatgctccgtcaattaaagatttagcacctagggatatggtttcaagagctatagctactgaaataagtgaaggtaatggtgcgggtcctgatagcgattatgtttatctagatttgactcacctcggtgcagagacaataaagaaaaaattacctgatataactgattttgttagaacatatgtgaaaattgagccgattgaagaacctatacctgttcaacctacagcacactacgctatgggaggcatcccaacagatgtttattcacgtgtacttagtgatgaaaaaggaacagttctaccaggagtttatgctgctggagaagcagcatgcgtaagtgttcatggtgcaaatagattaggtactaattcactgctagatatagttgtttttggtaaaagagcaggtcaaagcatggttgattacgtaactcaaacaaaaccaaatagcattagtgacagtgcctctgatgatctttcaaaaaaaatacaaaatcttattgataaagaacatactgatgaattttctgtagcaaatattagaaaagaccttcaagagtctatggaagagaatgcaaaaatatttagaactaaagagactttagaaaaacaaacagagatattggaagaattaagagacagatacgaaaatgtaacaatttttgataagagtaaagttcataattcag

SEQ ID NO: 200248 - DNA, 718 bp, Unknown
  Bacterial polypeptide expressing nucleotide sequence isolated from the Sargasso Sea
aacatgggaggtattcctactaactatagaactgaagtcttaaggccaaccaatcaaaaccctgacaatatttgtgaaggtttaatggctgtaggtgaagcagcatgtgtatcagttcatggagcaaataggctcggaactaattcattaattgatctagtagtttttgggaaagaagctagtttaacatgtaaagaaaaagtaaaacctaactcaaaaaaaattgaaataagtaaatcgaaaacagaagatataattaatagatttgatctaataagaaacagtaaaggaaattctactactggagagttaagaacatcaatgcaacatgttatgcaaaaaaaatgcgcagtatttagaacacatgatctaatatcaaaaggtattgaagaattccaagaaattgaaagttctatggaccagatagatatcaaagataagtcgctagtctttaatacagaccttgtagaagcgctagagttacataacttaatggctcaatcaaaagtaacattgcattcagccctcaatagaaaagaaagtagaggagcccatgctcgtgaagatttcaaagaaagagatgataaaaattggttagtacattctttggcttggttaaatgataaaggagatgttaatatgggttcgagagctgttcatatgaatacattaacaaatcatgttcaaccaattcccccaaaaaaaagagtttattaat

SEQ ID NO: 200249 - DNA, 604 bp, Unknown
  Bacterial polypeptide expressing nucleotide sequence isolated from the Sargasso Sea
atggctattagaaaagcacaagaattagattcaacacttacattcagaagatcatgtggacaaggagtatgtggttcagatggggttaatatgaatggacaaaacggattggcttgtataacgtcagtatcttccgtatcagtaatgaataaacttgaaataagaccattaccaggattgccggttataaaggaccttattgtagacatgaaacctttctatgatcagtatgaaaaaatcaaaccatttttatcaaatgaggaagaggttgatacaggccatgaaagacttcaaagccctgaagagagagaaaaattagatggtttatatgaatgcatattgtgtgcgtgttgctcaactagttgtccttcattttggtggaacccagagaaatttgtaggaccagctgcattacttcaagcttacagattcatagctgatactagagacaaacaaaaaaaatcaagactaaaaaaattaaatgatgcatttagtgtttacagatgccatggaataatgaattgtacttcagtgtgccccaaaggcttaaacccttcgaaggcaataaatgaaattaaaaaggagttaagaaaaataggatagt

SEQ ID NO: 200250 - DNA, 667 bp, Unknown
  Bacterial polypeptide expressing nucleotide sequence isolated from the Sargasso Sea
atgagtgcatataatataattgatcatgaatacgatgtaatagtcgtaggagcaggaggctctgggttaagagcagctgttggtttaagtgaatctggtttaaaaactgcttgtatttcaaaagtatttccaacgagaagtcatactgcagcagctcaaggaggaatttcagcagctctaggcaacgccggagaagatgattggcgttggcatatgtacgatacagtaaaaggatcagattggctaggagaccaagattgcatagagtatctttgtaaggaagctccacaggctgttatcgaactggaacattatggtgttccatttagtagaactaaagatggaaagatatatcaaagagcttttggtggcatgacaaaaaattatggcaatgaaccaatacaaagaacttgtgctgcagccgacagaacagggcacgcaattttgcatactttatatggtcaagctcttaaacaaaagaccgagttttttattgaatattttgctttagatttattaatgaaaaatggagagtgtaagggtgtactggcttggaatttaaatgaaggtactattcataggtttagatcacatattacaattttagctactggaggttatggaaaaatttattattcagcaacagcagcacatacatgtacaggag

SEQ ID NO: 200251 - DNA, 427 bp, Unknown
  Bacterial polypeptide expressing nucleotide sequence isolated from the Sargasso Sea
tatgagttacgaaattgaatatcacgattatgacgtagttgtagtaggagctggaggctcgggattaagagcaacagttggtgccgtggagaacggatataagacagcttgcatttctaaagtttttcccacaagaagtcatacagttgcagcccagggtggaatttcagctgcgttaggaaatatgggagaagatgattggcgatggcatatgtacgatacggtcaaaggatccgattggcttggagaccaggatgcaattgaatacttatgtaagaatgctcccaaagcagttttagagttagaaaattatggtgtgccatttagtcgaacagaagatggcaaaatatatcagcgagctttcggtggtatgacaaaaaattatggtgatggaactgcgcaaagaacatgtgctgcagcagataga

SEQ ID NO: 200252 - DNA, 284 bp, Unknown
  Bacterial polypeptide expressing nucleotide sequence isolated from the Sargasso Sea
tatgattaaagatttagtaaaacttgaatttgatgttgtcgttgttggtgcaggtggttctggactaagatcggtaatgggttgtgcatcctcaaacctcaaaacagcatgtatttctaaagtatttccaacacggagtcatacggttgctgctcaaggtggtattagcgccgctctcggcaatatgggtgaggatgactggacttggcacatgtacgatacagtaaaaggttcagattggttaggtgatcaagatgctatcgctttcatgtgcaaagaagcac

SEQ ID NO: 200253 - DNA, 738 bp, Unknown
  Bacterial polypeptide expressing nucleotide sequence isolated from the Sargasso Sea
aatggagcttagcgtcagcctatacagatataatcctgagcaggataagtttccttatatgaagaactataaggttaaaaagcctgaaaaagatattatggttctagatcttcttaatatgcttaaggaggatgatgcaactatttcttatagacgatcatgccgagaaggtgtgtgcggatcagatggcatgaacattaatggtaaaaatgggctggcatgcattactcctttgtcggaagtcttaaaaggaaataagcttgagttaagacctctacctggtcttcctgtcataagagatcttatagtagatatgactcaattttatgagcagtatgaaaagattaaaccgtttttgcagtctgactcagaaccacctgagcaggaaagacttcaatctcctcaagatagagataaattagatggactatatgagtgtattctttgcgcctgttgttcaacaagttgtccatccttttggtggaatcctgataagtttgttggaccagcagcacttcttcaggcatatagattccttgctgatacaagagatacaaagaaacaagagagattagaagaattaggagaccctttcagtgtttataggtgtcatggcattatgaattgtgtaaatgtttgcccaaaaggtttaaatccaaataaagcaattggtgaaattaaatcaatgcttttaactggtgctaaagaggataaaataaaggttgtaggtttggagtg

SEQ ID NO: 200254 - DNA, 304 bp, Unknown
  Bacterial polypeptide expressing nucleotide sequence isolated from the Sargasso Sea
tttattgaaaaatacgcacccaaagctaaagatttagcttcaagagatgttgtaagtagatcgatagcagttgaaattaatgaaagtagaagagttagtaaaaataaagattatgtcaatttacacttagaccatcttgatccaaaagtaatagaaggtagattgcctagaattgcagagtcagcaaatacattttgtgaagttgatgtaagaaaagatccaataccagtagttccaactgtacattataatatgggtgggataccaactaattataaagctgaagttttaacattaaatggaa

SEQ ID NO: 200255 - DNA, 591 bp, Unknown
  Bacterial polypeptide expressing nucleotide sequence isolated from the Sargasso Sea
ccacattgtcttttcgtttctcctgtggagcgggtgtatgtgggtcagatgggatgaatgttaatgggcgtaatggtcttgcttgtgtgacagaacttaaggacctgccaaacaaaatttcggtgcgacctttgcctggtatgccagtgattcgagatcttgtggttgatatgaatcttttttataagcaatatatatccattaagccttatttacagtctgaaaaacctactgatggtaaggagcatcgtcaaacagtagagcaacgcagtaagcttgatggtttatatgagtgtattttatgtgcttgttgctcaacagcttgcccatcttggtggtggaatcctgataagtttgttggtcctgctggtttattgtgggcttgccgttttattcttgattctcgtgattccaaacagagtgagcgtttagaagatttagagggattgtacagattgtttcgttgtagagggattatgaattgtgcgaatgtttgtccgaaaggtctaaatccttctggtgcaattgctagtattagagaacaacttttgcaaaagaagctgcgttctaaaaatgggctggatggttaaa

SEQ ID NO: 200256 - DNA, 530 bp, Unknown
  Bacterial polypeptide expressing nucleotide sequence isolated from the Sargasso Sea
aatggttcagtttaatctccctgataattccaagcttgtaaaaggtgaagattattcattacctgacgatataaagaataagaaaaaaatctcaatatacagatggtctccagaagacgataaaaatccaagaatggatacttatgaagtggatttagacgattgtggtcctatggttttagacgcaataatgaaaatcaaaaatgaaatagatccaacgttaacttttagaagatcatgcagagagggtatatgtggatcctgtgcaatgaatattgatggttccaatacattagcatgcacaaaaccaattgaggatgttaaaaaagaaattaaaatttatcctttacctcacatgcctgttattaaagatttagttacaaacctaaagactttatataagcaattggcttctattaagccatggttaaatattacaaaaaaatctgatactgatgagaatttacaatccaaagaagaaagagcaaagttagacggtctttacgaatgtattctatgtgcctgttgtt

SEQ ID NO: 200257 - DNA, 280 bp, Unknown
  Bacterial polypeptide expressing nucleotide sequence isolated from the Sargasso Sea
tgaccctgatgacgattctaatccaagaatagacacctacgagattgatttagatgaatgcggaccaatggttctagatgctttaattaagattaaagctgattttgacccctcactttcttttagaaggtcatgcagggaaggaatatgcggatcctgttcccataacattaatggtttaaacacattgagcttgcactcaacctataaaagacttaaggggggacataagagtttaccccctgcctcatatgaaagttatcaaggacctggtcattga

SEQ ID NO: 200258 - DNA, 178 bp, Unknown
  Bacterial polypeptide expressing nucleotide sequence isolated from the Sargasso Sea
tatcgttggttacaagatagccgagatgaagaaagaaaagaaagattaaaagaattagatgatacctttaaagtttatagatgtcatacgattatgaactgtacgcaagcatgtcccaagggattaaatcctgcaaaagcaattgctggaattaagcagatgattgcccaacaataac

SEQ ID NO: 200259 - DNA, 592 bp, Unknown
  Bacterial polypeptide expressing nucleotide sequence isolated from the Sargasso Sea
atatcatatagaagatcttgcagagaaggtgtatgcggttcagatggaatgaatattaatggtaaaaatgggcttgcatgcatcacgccaatttcagaagttattaaaaggaataaaatagaacttagaccattgcctgggttgcctgtaataagagatttagttgtcgatatgactgagttttattcgcaatatgaaaaaattaaaccatttttacagaatgagacaacagcacctgaacaagaaagacttcaatcaccagaagatagagataaattagatggattatatgaatgtattttatgtgcttgttgctcaacaagctgcccttcattttggtggaatcctgataaatttgtaggtccagcagcattacttcaagcatatagatttcttgcagattcaagagatctaaaaacccaagaaaggctggaatctctttctgatccatttagcgtttatagatgtcatggaattatgaattgtgtaaatgtatgtccaaaaggacttaaccctaacaaagcaattggtgagataaaatcaatgttacataaaaataaaaaggatataattgtttctgacggagcataat

SEQ ID NO: 200260 - DNA, 385 bp, Unknown
  Bacterial polypeptide expressing nucleotide sequence isolated from the Sargasso Sea
aatggcgcaattttccttaccaaaaaattctaaaatcggcaccggcaaaacatacggaagcgacaaaacgtcagctaaaaatcgctcctttcgtatttataggtgggatcccgatactgaagaaaatcctcgtgttgacacttacatgatagatctcgaggactgcggtccgatggtactagatgctataatccacataaaaaacgaaattgatccatcgctaacctttcgccgatcctgtcgagaaggtatttgcggttcctgcgcgatgaacatagacggcaccaacactttagcctgcacaaagtctatcgaatcgattaaaggggacgtaaaagtctacccacttccgcacatgagcgtcttaaaagatctcgtgccagat

SEQ ID NO: 200261 - DNA, 761 bp, Unknown
  Bacterial polypeptide expressing nucleotide sequence isolated from the Sargasso Sea
tgattttgttagaacatatgtgaaaattgaaccgattgaagaacctatacctgttcaacctacagcacactacgctatgggaggcatcccaacagatgtttattcacgtgtacttagtgatgaaaaaggaacagttctaccaggagtttatgctgctggagaagcagcatgtgtaagtgttcacggtgcaaatagattaggtactaattcactcctagatatagttgtttttggtaaaagagcaggtcaaagtatggttgattacgtaactcaaacaaaaccaaacagcataagtgacagtgcctctgatgatctttcaaaaaagatacaaaatcttattgataaagaacatactgatgaattttctgtggcaaatattagaaaagaccttcaagaatccatggaagagaatgcaaaaatatttagaactaaagagactttagaaaaacaaacagagatattggaagaattaagagacagatacgaaaatgtaacaattttcgataagagtaaagttcacaattcagagcttgtcgaggctattgagttagattacctattagatatgtctgaggttactgttgcaagcgcacttgctcgcaatgagtcaagaggagctcactcaagacaagattttcctgatcgtgatgatacaaactttatgaaacattcctttgcgtttaaaaaagataacacagcaaatcttaagtacaaagatgtagaattaggaaaatatgaaccaatggaacgtaaatactaat

SEQ ID NO: 200262 - DNA, 646 bp, Unknown
  Bacterial polypeptide expressing nucleotide sequence isolated from the Sargasso Sea
ccactcaatcaaaatggaaggtcacggaaatatgatggtaatcgacgcaattagaaaagctcaagaaaaagatccaacaatcacctttagaaggtcttgtgctcaaggagtttgtggttcagatggagtaaatatgaatggtcaaaatggcctagcttgcattacttctgtttcctcagttgcagtagcaaacagactagaggttagaccattaccaggtttaccagttatcaaagatttgatagttgatatgaaaccattttatgatcaatatgagaagataaagccttttctagataatgatgaagaaattaatactggtcatgaaaggttacaaagtccagacgaaagaaaaaagctagatggtttatatgaatgtattttatgtgcttgttgttcaacaagttgcccatcattttggtggaaccccgaaaaatttgtaggacctgccgcacttcttcaggcatacagattcattgctgacactagggacaagcaaaagctaaaaagactaaaaaaactaaacgatgcttttagtgtgtatagatgtcatgggataatgaattgtacttctgtttgtccaaaagggttaaatccatcaaaggcaatcaacgaaattaaaaaggagttaagaaaaataggatag

SEQ ID NO: 200263 - DNA, 193 bp, Unknown
  Bacterial polypeptide expressing nucleotide sequence isolated from the Sargasso Sea
gttttattacaagcttacaggtggataaatgatagtagagatgaagataaaaaagaaagattaaaaaaagttgctgacgaactaaaattatatagatgtcatactattatgaattgtaccaattcttgtccaaaaggtctaaatccagcaaaagctattgggtctataaagaaaatgcttgcaacaagctaaa

SEQ ID NO: 200264 - DNA, 284 bp, Unknown
  Bacterial polypeptide expressing nucleotide sequence isolated from the Sargasso Sea
gatgataacccatgaatatgacgttattgtagttggggctgggggtgcaggcttaagagctactttaggcatggcaacagaaggtctaaaaactgcttgtataacaaaagtttttccaacaagaagtcatactgttgctgctcaaggtggcatgagtgcagctcttggaaacatgggggaagatgattggcgctggcatatgtacgacactattaaaggttctgaattggttggggatcaagatgcaattgaatatatgtgtagagaagctataccttctgtaa

SEQ ID NO: 200265 - DNA, 811 bp, Unknown
  Bacterial polypeptide expressing nucleotide sequence isolated from the Sargasso Sea
aggttttgggaaaatttataaagttagctcaaatgctcactcacttactggtgatggtcctggaattttataccaaaaaggcatacctcttgaagatatggaattttatcaattccaccccactggaatatacagactcggaatattgttatctgaagctgcacgtggggaaggtggtattttaaggaataaagatggtgaaagatttatggagagatatgcaccatctatcaaagacttggcaccaagagatatggtttctcgtgcaattgctacagagatcagcgaaggaaatggtgctggaccaaataatgattttgtatatttggatttaactcatcttggagctgaaacaatcaaacaaaaactcccagatattactgactttgtcagaacttatgtaaaaattgaacctattaacgaaccgattcctgtccaaccaactgcccattacgctatgggtggtattcctacagatgttaatgctagagttttaagcgatgcatcaggtacagtacttccaggggtatattctgctggagaatcagcatgtgtaagtgttcacggagcaaatagattaggtacaaattcactcttagatattgtagtttttggtaaaagggcaggtcaaagtatggttgattatgtatcttcaacaaaaccaatggaactttctgataatgctgcagaagaccttacaaataaaattgaaaaattaatagaaaaagatcatagccttgaattttctgttcctaggattagagaagagttacaagattctatggaagaaaatgcaaaaatatttagaact

SEQ ID NO: 200266 - DNA, 568 bp, Unknown
  Bacterial polypeptide expressing nucleotide sequence isolated from the Sargasso Sea
aatggcgcaatttaacttgccacagaactctaaaattgaagtcggtaagtattataaagataaaactaattctaaaaatttaaaaaaagtaaacgtttacagatgggatccctcgactggagaaaaccccagattagatacttttgaagttgatatggatagttgtggcccaaaagttttagatattttgtttaaaattaaaaatgaaatagacccctctatcactttcagaagatcgtgtgctcatggtgtttgtggatcttgtgctatgaatattgatggtgttaatggcctagcatgcataaaatctcacgaagaaataaacggagagttaaatatatacccattgccacacttaaaagtagttaaagacttaataggagatcttactactttgtataaacaatacgagtccattcaaccctggttaaaagttgatcaaaccggtaaagaaaaaatagaattgaaacaatcacaaaaagacagagaaaaacttgatggatactacgaatgcatcttatgtgcttgctgctccacttcttgccccaagttactggggaatggtgac

SEQ ID NO: 200267 - DNA, 208 bp, Unknown
  Bacterial polypeptide expressing nucleotide sequence isolated from the Sargasso Sea
tatgactgcggaatatgaattgatacagcatgagcatgatgtaatagtcgtcggagctggtggagcaggacttcgcgcgaccttcggcttagccgccgagggactaacgacagcttgtattactaaagtgttcccaactcgcagccatactgttgcagcacaaggcggaatgagtgcggccttgggaaacatgggtgatgacaactgg

SEQ ID NO: 200268 - DNA, 776 bp, Unknown
  Bacterial polypeptide expressing nucleotide sequence isolated from the Sargasso Sea
atatagattaggtattttgctttcagaggcagcgagaggtgagggtggaattttaagaaataaagatggagaaagatttatggaaagatatgctccgtcaattaaagatttagcacctagggatatggtttcaagagctatagctactgaaataagtgaaggtaatggtgcgggtcctgatagcgattacgtttatttagatttgactcacctcggtgcagagacaataaagaaaaaattacctgacataactgattttgttagaacatatgtgaaaattgaaccgattgaagaacctatacctgttcaacctacagcacactacgctatgggaggcatcccaacagatgtttattcacgtgtacttagtgatgaaaaaggaacagttctaccaggagtttatgctgctggagaagcagcatgtgtaagtgttcacggtgcaaatagattaggtactaattcactcctagatatagttgtttttggtaaaagagcaggtcaaagtatggttgattacgtaactcaaacaaaaccaaacagcataagtgacagtgcctctgatgatctttcaaaaaagatacaaaatcttattgataaagaacatactgatgaattttctgtggcaaatattagaaaagaccttcaagaatccatggaagagaatgcaaaaatatttagaactaaagagactttagaaaaacaaacagagatattggaagaattaagagatagatacgaaaatgttacaattttcgataagagtaaagttcacaatt

SEQ ID NO: 200269 - DNA, 859 bp, Unknown
  Bacterial polypeptide expressing nucleotide sequence isolated from the Sargasso Sea
tataatatttaaatgtaatgctgttattttagcaacgggtgggggtgggaaagcctggaaaattacatcaaattcatgggaatatactggtgatggctatggaatggcctatgatgcgggtgctgaattaatggatatggaatttactcaatttcatcctacaggtatggtttggccgccatcagtaagaggaacattggtgacggagggggttcgtggtgaaggtggaattttagttaatagtgaaaacaaaaggttcatgtatgataatattcctaatcgatttgcagctgaaactgcggacactgaagaagaagcagaccgttggctcgcgggtgataaggacgcaaggagaccgccagagttattaacgcgtgatgtggtggcgcgtgcaatccgtaaagaagtaaaggctggaagagggtctcctcatggtggtgcttttttagatatagcaaacagaagaaatgctgaagatattaaacgtaaactgccatctatgtatcatcagtttaatgtgttggctgaacttgatattaccaaggaatcaatggaggtaggcccaaccctacactattttatgggtggggttaaagttgatgcggatactcaaatgactaaggtacctggtttgtttgcatgcggagagtgtgcagccggtgttcatggagcaaatagattaggtggaaattcgctttctgatttattagtttgtggtaaactagctggttctggtgccgtaaactatatcaaatcacttaaaaataagaaaaccctaaataatgatgttgttgaaaaagcgattcgtacagcaacagatattttaaatcgtgaaaatggagaaaatccttatttaatt

SEQ ID NO: 200270 - DNA, 310 bp, Unknown
  Bacterial polypeptide expressing nucleotide sequence isolated from the Sargasso Sea
cctgaagagcgtgagaagctggatggcctgtacgagtgtattctctgtgcatgctgctcgacttcctgtccttctttctggtggaacccggacaagttcattggcccggctggtctgttgcaggcataccgcttcctggcggacagccgcgacgaaaagacctccgagcgtctggcttctctggatgatccgttcagcgtatttcgttgccgcggcatcatgaactgtgtgaatgtgtgcccgaagggtctgaacccgacccgcgctatcggtcacatccgcaacatgttgctgcaaagcggtacctgat

SEQ ID NO: 200271 - DNA, 364 bp, Unknown
  Bacterial polypeptide expressing nucleotide sequence isolated from the Sargasso Sea
aatgaatacttataaaattatagatcacgaatatgatgttgtagttcttggagctggtggctcagggcttagagcggcagtgggtttatccgaagctggattgaagacagcttgtatttcaaaagtttttcctacaagaagtcatacctcggcagcacaaggagggatctcagcagcacttggtaatatgggtgaagacgattggaggtggcatatgtatgataccgttaaaggctctgattggttaggagatcaagatgccatagaatatttatgtaaagaggcaccaaaagcagtaattgaattagaaagatatggagttccttttagtaggacaaaagatggaaaaatttatcaacgagct

SEQ ID NO: 200272 - DNA, 410 bp, Unknown
  Bacterial polypeptide expressing nucleotide sequence isolated from the Sargasso Sea
catgagtaaggcttataaggtaatagatcataattatgatgttgttgttgtaggggcaggaggatcaggattgcgcgcaactttaggttcagcagaagctggtttaaagacagcatgtatctcaaaagtatttccaaccagaagccatacagtcgcagctcaaggtggaattggtgcagctcttggaaatatgggtgacgacaattggaaatggcatatgtacgatactgtcaaaggctctgattggttgggtgatcaagatgccatagagtatctgtgttctaatgcagcagaggcagtaattgagcttgagaattatggaatgccatttaccagaacagatgatggcaaaatatacccaagaccttttggtggtcacttaactaataatggagaaggtgctccagcta

SEQ ID NO: 200273 - DNA, 742 bp, Unknown
  Bacterial polypeptide expressing nucleotide sequence isolated from the Sargasso Sea
atgtttgataataaattaaaggtaagtttatatcgttacaatccggaagaagatcagtttccgtatatgaaggaatatacaatcgataagcctgaaagagatattatggttcttgatttacttcacttattaaaagaaaacgatcaatctatttcatacagaagatcatgcagagagggtgtatgcggttctgatggaatgaatattaacggtaaaaacggattggcttgtataacccctatctcatcagtaataaaaagaaataaaattgagttaaggccgcttccgggattacctgttataagagatttagttgttgatatgactgagttttatgcacaatatgaaaaaattaaaccatttttacaaaatgaaacatctgcccctgagcaagaaagacttcaatcaccagaagaaagggagaaattagatggattatatgaatgtatattatgtgcatgttgttcaacaagttgtccttcgttttggtggaatcctgataagtttgttggtccagccgcattgcttcaagcatacagatttttagcagattctagagatttaaaaactcaagaaagactagaatcattatcagatccatttagtgtttatagatgtcatggaatcatgaattgtgtaagcgtatgcccaaaaggacttaatccaaataaagcaattggagaaataaaatcaatgttacataaaaataaaaaggatataattgtctctgacggggtataaa

SEQ ID NO: 200274 - DNA, 583 bp, Unknown
  Bacterial polypeptide expressing nucleotide sequence isolated from the Sargasso Sea
atggtacagtttaatttaccttcaaattcaaaaatacaaaaaggtcagtattacaaagacaaaacaggatcaaagaacataagaaaagttaatgtttatagatgggatccgtctaaaaatgaaaatcctagaatagacacttatgaggtcgatatggataattgttcctctaaagttttagatattttaaataaaatcaaaaatgaaattgatccgtctattgcttatagaagatcttgcgctcatggagtatgtgggtcgtgtgcaatgaatatgaatggaaagaatggtctagcgtgtacaaaatctcattctgaattaaatggggatattgatatttatccattaccacatttaaaagttttgaaagatttaattggagacttaagtactctttataaacaatacgagtctgttgaaccttggcttaaaacatcaaaaataagtgacaaagaaaacattcaaacaaaagaggatagagcaaaattggatggtctatatgaatgtataatgtgtgcatgctgctcaacttcttgcccaagttattggtggaatggtgaaaaatatttaggtcctgcagttt

SEQ ID NO: 200275 - DNA, 739 bp, Unknown
  Bacterial polypeptide expressing nucleotide sequence isolated from the Sargasso Sea
atggagcttagcgtaagcctatacagatataatcctgagcaggataagtttccttatatgaagaactataaggttaaaaagcctgaaaaagatattatggttctagatcttcttaatatgcttaaggaggatgatgcaactatttcttatagacgatcatgccgagaaggtgtgtgcggatctgatggcatgaacattaatggtaaaaatgggttggcatgcattactcctttgtcagaagtcttaaaaggaaataagcttgagttaagacctttacctggtcttcctgttataagagatcttatagtagatatgactcaattttacgagcagtatgaaaagattaaaccatttttgcagtctgactcagaaccacctgagcaggaaagacttcaatctcctcaagatagggataaattagatggcttatatgaatgtattctttgcgcctgctgttctacaagttgcccatccttttggtggaatcctgataaatttgttggaccagcggcacttcttcaggcatatagattccttgcggatacgagagatactaagaaacaagagagattagaagaattaggagacccttttagtgtttataggtgtcatggcattatgaattgtgtaaatgtttgcccaaaaagtttaaatccaaataaagcaattggtgaaattaaatcaatgcttttaactggtactaaagaggataaaataaaggttgtaggtttggagtgag

SEQ ID NO: 200276 - DNA, 508 bp, Unknown
  Bacterial polypeptide expressing nucleotide sequence isolated from the Sargasso Sea
tatgaaaacatataaaattatagaccatgaatatgatgttgtagttctaggcgctggaggttcaggcctaagggctgcagtaggtctatccgaggctggtctcaaaactgcttgtatatcaaaagtttttcctacgcgaagccatacatctgctgctcaaggtggaatttccgcagctttaggaaatatgggtgaagatgattggagatggcatatgtacgatacagttaaaggatcagactggctaggcgaccaggatgctattgagcacttatgtaaggaagcaccaaaagctgtaattgaattagaaaaatatggtgtccctttcagtagaacaaaagaaggtaaaatttatcaaagagcatttggagggatgaccaaaaattatgggaacgaatcagtgcaaagaacttgtgcagctgcagatagaactggtcacgcaatactacacactttatatggtcaagctctaaaacataatacagaattttatatagaatattttgct

SEQ ID NO: 200277 - DNA, 337 bp, Unknown
  Bacterial polypeptide expressing nucleotide sequence isolated from the Sargasso Sea
tatgagtacaaaagaatataaatttatagatcatgaatatgatgtagtggtagttggtgctggtggtgcaggtcttagagcaactttaggttgtgctgagtccggattaaaaactgcgtgtatttcaaaagttttcccaacaaggagccatactgttgctgcacaaggtggtatttcagcggccctaggtaatatgggtgaagataattggcgttggcatatgtatgatactgttaaaggcgctgattggttaggcgaccaagacgctattgaatatttatgtaagaattctcctgaagctgtatatgaattagagcattttggtgttcctttttca

SEQ ID NO: 200278 - DNA, 391 bp, Unknown
  Bacterial polypeptide expressing nucleotide sequence isolated from the Sargasso Sea
aacaaacttttatgagcaacataaatccgttcaaccatggctaaaaacaaagtcagatcaaccagaaaaagaatggtttcaatcaaaagaagatagggaaaaagtcgacggtatgtacgaatgcattatgtgtgcttgctgttctacatcatgcccgagttattggtggaacccagataagtatctcggtccagctgcacttttacaagccaataggtggatcaaagatagtagagatgaatataaagaagaaagattagatgaactcgatgatgcttttaaagtatatagttgcagaacaattatgaattgtgcaaaatcatgcccaaaaggcctttcaccagcaaaagcgattgccgatataaaaaaggaattagccacaagaaaataa

SEQ ID NO: 200279 - DNA, 706 bp, Unknown
  Bacterial polypeptide expressing nucleotide sequence isolated from the Sargasso Sea
aatggctaagcgtacatttgaaatttaccgctacgacccggataaggacgcagcaccgcgcatgcaaacgtacgagatcgaaatcgactcgcacgaacgcatgctgctcgacgcactgctcaagctgaaggcgatggacgaaaccttgtcgttccgccgttcgtgccgcgaaggcgtgtgcggttcggacgcaatgaacatcaacggcaagaacggtctggcgtgcttgcagaacatgaacgatctgccgcaaaagatcgtgctgcgtccgctgccgggcctgccggtggtgcgcgacctgatttgcgacttcacgcagttcttcaaccagtatcactcgatcaagccgtacctgatcaacgatacgccgccgccggaaaaggaacgtctgcagtcgccggaagaacgcgacgagctcgacggcctgtacgaatgtattctgtgtgccagctgctcgacttcgtgcccgagcttctggtggaatccggacaagttcgtcggcccggcaggcttgttgcaagcctatcgtttcatcgcggacagccgcgaccaggcgacgggtgagcgcctcgacaacctggaagatccgtaccgtctgttccgttgccatacgatcatgaattgcgtcgacgtctgcccgaagggcctgaacccgaccaaggcgattggcaagatcaaggaattgatggttcgccgcgcggtctga

SEQ ID NO: 200280 - DNA, 469 bp, Unknown
  Bacterial polypeptide expressing nucleotide sequence isolated from the Sargasso Sea
atgcaggactacactctggaaaatccagagggtcgtgacatgatggtgttagacgcactgttgaaattaaaagaacaagacccaaccttatcattccgtcgcagctgccgtgaaggtgtctgtggttcagacggtctgaatatgaacggtaaaaacggtttagcttgtattactccattgtctgctttaggcaaggggaaaggcggcaaactggtgatccgtccattaccaggtttacctgtagtgcgtgacttagttgttgatatgactcagttctacactcagtatgaaaaggtaaaaccttacctgatcaatgacgagttaccgccagcaggtgaatacctgcaatcgcctgaagatcgtgaaaagttagatggcctgtacgaatgtattttgtgcgcctgctgttcaacttcttgcccttcattctggtggaatccggataaatttatcggaccagctggtttgt

SEQ ID NO: 200281 - DNA, 742 bp, Unknown
  Bacterial polypeptide expressing nucleotide sequence isolated from the Sargasso Sea
atgacaattagcataaatatatatagatacaatccagaaaaggacaaatttccttacatgcaaagttttgaatttgaaaagcctaaaagagacatcatggttctggaactgcttaatcagctgaaagaaaaggatcctaccatttcatacagacgctcatgcagagagggagtttgtggttctgatggaatgaatatcaatggaaaaaatggtctagcttgtatcacacctttatcatcagttatcaaaaaaaataagctagatcttcgaccattaccaggccttcccgttgtgagagatttagttgtagatatgactgagttttatgctcaatatgaaaagattaagccatttcttcagaacgatacacctgttgatattggagagagattgcaatcaccagaagatagagataagttagatggtctttatgaatgtatcctatgtgcttgttgctcaacaagctgcccatctttctggtggaatcctgataagtttgttggtccggcagctcttttacaggcatataggtttattgcagattcgagagatacaaaaactgcagagagacttcaaagtctatccgatccatttagtgtgtatagatgtcatgggatcatgaactgtgtgagtgtttgtcctaagggacttaatcctaatgaagctattggagaaattaagtcaatgcttctttcaaataaaaaaaaccacaatattattacctctgataaggccggataac

SEQ ID NO: 200282 - DNA, 718 bp, Unknown
  Bacterial polypeptide expressing nucleotide sequence isolated from the Sargasso Sea
atgactaaaaaacttaaattaagtttatacagatttgatccagcaaaggataaaagaccctatatgtcagattatgaaatcccatacagctcatcaggcaatatgatggtaattgatgctattagaaaggctcaggaactagattctactattacatttagaagatcatgtggacagggagtttgtggttcagatggtgtaaatatgaatgggctaaatggattagcatgtatcacaccagtctcaaaggtagcaactgcaaacaggctagaagtcagaccactacctggtctgccagtcattaaagatctaattgtagatatgaagcctttctacgatcaatatgaaaaagttaaacctttcttagacaatgatgaagagattaaaactggtcatgaaagattgcaaagtccaaaagatagagaaaaacttgatgggctttatgagtgcatattatgtgcgtgttgttcaactagttgtccttcattctggtggaatccagaaaaatttgttggtccggcagcacttttacaagcatatcgttttattgccgacacaagagataagcaaaaaagaatgagacttaaaaaattaaatgatgcttttagcgtatataggtgccacggtataatgaactgcacctcagtttgtccaaaaggtttaaatccatcaaaagcaattaatgagatcaaaaaggagttaagaaaaacaggatagt

SEQ ID NO: 200283 - DNA, 373 bp, Unknown
  Bacterial polypeptide expressing nucleotide sequence isolated from the Sargasso Sea
atgaaacaactggctccagaacaagaaagacttcagtctcctgaagaaagagataagttagatggtttatacgaatgtattctgtgtgcatgttgctcgacaagctgtccatccttttggtggaatcctgataagtttgttggcccagctgccttacttcaagcatacagatttcttgcagactcgagagatttaaaaactcaagaaagactagaatctttatccgatccgttcagcgtttatagatgtcatggaatcatgaattgtgtaaatgtttgtccaaaaggtcttaatccaaataaagcaattggtgagataaaatcaatgttacataaaaataaaaaggatataattgtctctgacggggtataaa

SEQ ID NO: 200284 - DNA, 155 bp, Unknown
  Bacterial polypeptide expressing nucleotide sequence isolated from the Sargasso Sea
agatgaggatagaaaagagagattaaagaaggttgctgatgaactaaagctttatagatgccatactattatgaattgtactaatgcatgcccaaaaggcttaaatcctgcaaaagcaatagcgtctataaagaaaatgcttgcaacaggttaat

SEQ ID NO: 200285 - DNA, 445 bp, Unknown
  Bacterial polypeptide expressing nucleotide sequence isolated from the Sargasso Sea
atggcggaatttacactacccaagaactcaaaaatcgaaaaaggcgaacattttagtgcagatgaatcggctgaaaatatcagagtatttcatgtatatcgttatgatccttctgatgattcaaatcctcgtgtggatacttatgagatagatatggataaatgtggcccgatggttttggatgggctgattaaaattaaaagcgattttgatccttcactaacctttaggagatcatgcagagaaggcatatgcggctcatgttctcacaatatcaatggcgtcaatacactcgcatgcataaagccgatcaaagatctaaaaggagatattcgcatttatcctcttcctcacatggatgttgtaaaagatttagtggtcgacttaactgatttttatgagggttattcctcagtcgagccttggctcaagtcagatactcctg

SEQ ID NO: 200286 - DNA, 208 bp, Unknown
  Bacterial polypeptide expressing nucleotide sequence isolated from the Sargasso Sea
cttgggtccggcagttcttttgcaagcgtacagatgtatagctgatagtcgtgatgatagtacaggagaacgtcttgatgcccttgaagacccgtttaaactttatagatgtcacactattatgaattgctctaaaacttgtccaaaaggattaaatccggcaaaagcaattggcgaaattaaaaaacttatggttgaaagaagatag

SEQ ID NO: 200287 - DNA, 742 bp, Unknown
  Bacterial polypeptide expressing nucleotide sequence isolated from the Sargasso Sea
aatgtttggtaataagctaaaggtaagtttgtatagatataatccagaagaggataaatttccctatatgaaaaattacgtaattgataagccagaaagagacataatggttttagatttattacatttattaaaggaagaagatcaatcaatatcatatagacgatcatgcagagagggggtttgtggctctgatggtatgaacataaatggtaaaaatggactggcctgcataacaccaatttcttccgttattaagaggaataaaattgaattaagaccactaccaggattgcctgtgatcagagatttagttgttgatatgacagagttttatgctcaatatgagaagataaaaccttttctacagaacgaaacaacagcaccggaacaagagagacttcaatctcctgaggaaagagataaattagatggtctctatgaatgcatattgtgtgcatgttgttctacaagctgtccatcattctggtggaatcctgataaatttgtcggaccagctgcgcttcttcaagcatatagattcctcgcagattctcgagatttgaaaactcaagaaaggttagaggctttatctgatccatttagtgtatacagatgtcatggaataatgaattgtgtaaatgtatgcccaaaaggccttaatccaaataaggcaattggtgagataaaatcaatgttacataaaaataaaaaggatataattgtctctgacggggtataa

SEQ ID NO: 200288 - DNA, 949 bp, Unknown
  Bacterial polypeptide expressing nucleotide sequence isolated from the Sargasso Sea
tatgaaaatagttaaacattcatttgatggagtaatcgtcggtgctggtggagcaggacttagggctgcaatagaagcagcacctcatatgaagcttgctgtcataacaaaactttatcctacaagatctcacacaggtgcagctcaaggtgggatgagtgccgctcttgcaaatgttgaagaagataactggaactggcatgcttttgataccgtcaaaggttcagattaccttgcagaccaacctgcagtagatattttatgtaaagaagcaattgatgccgtaattgaattggaacactggggattaccatttagtcgattagataatggaaaaattgcacaaaggagatttggtggtcacactgtaaaagaaggtgagtctcctgctttcagagcttgttatgcagctgacagaactggtcacatgattcttcagacgctttatcaaaaatgtgtctctatgggagtaactttttttgatgaatttcaagttctagatatcaagattgaggatggtatctgccaaggtgttattgcctatgaacttgcaaccggagatatacatatttttgaaaccagagcagttacatttgcaactggtggatttggtaaaatatttaaagttagctctaatgctcactcattaactggtgatggaccagggattctctatcaaaaaggtatacctttggaagatatggagttttatcaatttcatccaactggaatatacagattaggtattttgctttcagaggcagcaagaggtgagggtggaattctaagaaataaagatggagaaagatttatggaaagatatgcaccgtcaattaaagatttagcacctagggatatggtttcaagagctatagctactgaaataagtgaaggtaatggtgccggtccagatagcgattacgtttatctagatttgactcaccttggt

SEQ ID NO: 200289 - DNA, 742 bp, Unknown
  Bacterial polypeptide expressing nucleotide sequence isolated from the Sargasso Sea
atgtttggtaataagttaaaggtaagtttgtatagatataacccagaagaggataaatttccttacatgaaaaactacgtaattgataagcctgaaagagacataatggttttagatttattacatctactaaaggaagaagatcaatcaatatcatatagacgctcttgcagagagggagtttgtggctcagatggtatgaatataaatggtaaaaatggactggcctgcataacaccaatttcttccgtcattaagaggaataaaattgaattaagaccactaccaggtttgcctgtgattagagatttagtagttgatatgacagagttttatgctcagtatgagaagataaaaccttttttacagaacgaaacaactgcaccggaacaagagagacttcaatctcctgaggaaagagataaattagatggtctctatgaatgcatattatgtgcatgttgttctacaagctgtccatcattctggtggaaccctgataagtttgtcggaccagctgcgcttcttcaagcatatagattcctcgcagattctcgagatttgaaaactcaagaaaggttagaggctttatctgacccatttagtgtatacagatgtcatggaataatgaattgtgtaaatgtatgtccaaaaggccttaatccaaataaggcaattggtgagataaaatcaatgttacataaaaataaaaaggatataattgtctctgacggggtataaa

SEQ ID NO: 200290 - DNA, 1792 bp, Unknown
  Bacterial polypeptide expressing nucleotide sequence isolated from the Sargasso Sea
atgttcacaagaaagattcaaaaaacagcactagccatgctgatctctggtgcaatggctggcacagcctatgctgcaccagaagtactagccgattttcacggtgaaatgggtggctgcgatagctgccacgtatcagacaaaggtggcgtaaccaacgacaacctgactcatgaaaatggccaatgtgttagctgccacggtgatctaaaagaactggctgctgcagcgccaaaagataaagtttctccgcacaaatctcacttaatcggtgaaatcgcttgtaccagctgccacaaaggccacgaaaaatcagtaacctactgtgatgcttgccatagcttcggctttgatatgccatttggcggcaagtgggaacgtaagtttgttcctgtcgatgcagacaaagcggctcaagataaagccattgccgcaggcgtgaaagaaacaactgacgttgtcgttatcggctctggtggtgcaggtcttgctgctgccgtttcagcccgtgacgctggcgcaaaagtgatcctgttagaaaaagaacctatcccaggtggtaacactaaactggctgctggtggtatgaacgccgcagaaactaagccacaggctaagttaggtattcaagataagaaacaaatcatgatcgacgacaccatgaaaggtggtcgtaacattaacgatcctgaattagtgaaagtcctggccaacaactcttcagactctatcgattggttaacctctatgggtgccgacatgactgacgtaggccgtatgggtggcgcaagcgttaaccgtagccaccgcccaacaggtggtgcaggtgttggtgctcacgttgcacaagtactgtgggacaacgccgttaaacgtggtactgatattcgtttaaacagccgtgttgtacgtatccttgaggatgcgagcggtaaagtgaccggcgttctagtgaaaggtgaatacactggttactatgtaatcaaagccgatgcggtagtcattgctgctggtggtttcgcgaaaaacaacgaccgcgttgctaagtatgatcctaaattaaaaggctttaaagcaactaaccacccaggtgctaccggtgacggcttagacgtcgctctgcaagctggcgcagcaacacgtgacttagaatacatccaagctcacccaacttactcaccagccggcggtgtgatgatcaccgaagccgtacgtggtaacggtgcgatcgtggttaaccgtgatggtgaccgtttcatgaacgaaatcactacccgtgacaaagcctctgctgcgatcctgaaacaaaaaggtgaaagtgcttacctcgtattcgatgactctatccgtaagagcttgaaagccatcgaaggttatgttcacttgaacatcgttaaagaaggtaaaaccatcgaagagctagcgaaacaactcgatataccagcagctgaactggcaaaaacagtgactgcttataatggtttcgtgaaatcaggtaaagacactcaattcgaacgtcctgatttaccacgtgagttagttgtcgcacctttctatgccttagaaatcgcgccagcggttcaccacactatgggcggtatcgtgattgatactaaagccgaagtgaagagtgaaaaaactggtaaacctattgaaggtttatacgctgcgggcgaagtcactggtggtgtgcatggtgctaaccgcttaggtggtaacgctatctctgatatcgtgacctatggccgtatcgcaggtgcatctgccgctaaattcgcgaaagatcactaat

SEQ ID NO: 200291 - DNA, 1792 bp, Unknown
  Bacterial polypeptide expressing nucleotide sequence isolated from the Sargasso Sea
tatgttcacaagaaagattcaaaaaacagcactagccatgctgatctctggtgcaatggcaggcacagcctatgccgcgccagaagtactagccgattttcacggtgaaatgggcggctgcgatagctgccacgtatcagacaaaggtggcgtgaccaacgacaacctgacccatgaaaatgcccaatgcgttagctgccacggtgatttaaaagaactggctgcagcagcgccaaaagataaagtttctccgcacaaatctcacttaattggtgaaatcgcttgtaccagctgccataaaggccacgaaaaatcagtgacttactgtgacgcttgccacagcttcggcttcgacatgccatttggcggcaagtgggaacgtaagtttgtacctgttgatgcagacaaagcggctcaagataaagccatcgccgctggcgtaaaagaaaccactgacgtcgtggttatcggttcgggtggtgcaggtcttgcggccgccgtttcagcccgtgatgctggcgcgaaagtgattctgttagaaaaagaacctatcccaggtggtaacactaaactggctgctggcggtatgaacgctgcagaaactaagccacaggctaagttaggtatcgaagataagaaacaaatcatgatcgacgacaccatgaaaggtggtcgtaacatcaacgatcctgaattagtgaaagttctggccaacaactcttcagactctatcgattggttaacctctatgggtgccgacatgactgacgtgggccgtatgggtggcgcaagcgttaaccgtagtcaccgtccaacaggtggtgcgggtgtgggagcacacgttgcacaagtgctgtgggacaacgccgttaaacgtggtactgacattcgtttaaacagccgtgttgttcgcatccttgaagatgcaagcggtaaagtgaccggcgttttagtgaaaggtgaatacactggctactatgtgatcaaagccgatgcggtcgtgattgctgctggtggttttgcgaaaaacaacgatcgcgtcgctaagtacgatcctaagttaaaaggctttaaagcgactaaccacccaggtgcaactggtgacggcttagatgttgcactgcaagcgggcgccgcaactcgtgacttagaatacatccaagctcaccctacttactcaccagctggtggtgtgatgatcaccgaagcggtacgtggtaacggcgctatcgtggttaaccgtgacggtaaccgctttatgaacgaaatcactacccgtgataaagcgtctgctgcgattctgcaacagaaaggcgaaagcgcttacctcgtattcgatgactctatccgtaagagcttaaaagccatcgaaggctatgttcacttgaacatcgttaaagaaggtaaaaccatcgaagatttagctaaacaactcgatgtgcctgccgctgaactggcgaaaaccgttacttcttacaacggttttgtgaaatcaggtaaagacactcaattcgaacgtccaaacctgccacgtgaaatcgctactgcgcctttctatgccttagaaatcgcgccagcggttcaccacactatgggtggtatcgttatcgatactcaagccgaagtgaagagcgataaaaccggtaaacctatcagcggtttatacgctgctggtgaagtgactggtggtgttcacggtgctaaccgtttaggtggtaacgccatctctgatatcgtgacctacggccgtatcgcgggtgcatctgccgcgaaatacgcgaaagatcactaa

SEQ ID NO: 200292 - DNA, 352 bp, Unknown
  Bacterial polypeptide expressing nucleotide sequence isolated from the Sargasso Sea
agaaacgaaaacaaatagcccagctcaggagtggaagcagtctatagaagatcgaaaaaagctggacggactttacgaatgcgtgatgtgtgcttcatgctctacatcgtgtccttcttattggtggaatagtgatagatatctaggtccagcagcgcttttacatgcctatcgctggattatcgacagtagagatcaagcaactggtgagagacttgaaggcttagatgatccttttaagttatatcgttgccacactataatgaactgtgcaaaaacttgcccaaaaggcctaaacccagcattggcaatagctgaagttaaaaagttaatggtagagaaaacaaattaa

SEQ ID NO: 200293 - DNA, 139 bp, Unknown
  Bacterial polypeptide expressing nucleotide sequence isolated from the Sargasso Sea
agaaaggttaaaaaaagttgctgatgaattaaaactttatagatgccatactattatgaattgtacaaatgcttgtccaaaaggcctgaatcctgctaaagcaattgcatctataaagaaaatgcttgcaacaagttaa

SEQ ID NO: 200294 - DNA, 1138 bp, Unknown
  Bacterial polypeptide expressing nucleotide sequence isolated from the Sargasso Sea
caaagaaggtttggtggtcacactgtaaaagaaggtgagtctcctgctttcagagcttgttatgcagctgacagaactggtcacatgattcttcagactctttatcaaaaatgtgtctctatgggagtaactttttttgatgaatttcaagttctagatatcaagattgaggaaggtatctgccaaggtgttattgcctatgaacttgcaaccggagatatacatatttttgaaaccagagcagttacatttgcaactggtggatttggtaaaatatttaaagttagctctaatgctcactcattaactggtgatggaccagggattctctatcaaaaaggtatacctttggaagatatggagttttatcaatttcatccaactggaatatatagattaggtattttgctttcagaggcagcgagaggtgagggtggaattctaagaaataaagatggagaaagatttatggaaagatatgctccgtcaattaaagatttagcacctagggatatggtttcaagagctatagctactgaaataagtgaaggtaatggtgcgggtccagatagcgattacgtttatctagatttgactcaccttggtgcagaaacaataaagaaaaaattacctgatataactgattttgttagaacatatgtgaaaattgagccgattgaagaacctatacctgttcaacctacagcacactacgctatgggaggcattccaacagatgtttattcacgtgtacttagtgatgaaaaaggaacagttctaccaggagtttatgctgctggagaagcagcatgtgtaagtgttcatggtgctaatagattaggtactaattcactgctagatatagttgtttttggtaaaagagcaggtcaaagtatggttgattacgtaactcaaacaaaaccaaacagcataagtgacagtgcatctgatgatctttcaaaaaagatacaaaatcttattgataaagaacatactgatgaattttctgtggcaaatattagaaaagaccttcaagaatccatggaagagaatgcaaaaatatttagaactaaagagactttagaaaaacaaacagagatactggaagaattaagagacagatacgaaaatgttacaa

SEQ ID NO: 200295 - DNA, 706 bp, Unknown
  Bacterial polypeptide expressing nucleotide sequence isolated from the Sargasso Sea
ctgaaaataagtatttataggtatgaccctgatgtgggcaacaaaccttatatgcagtcccttgatatcgatatccccaaggacaaagacattatggttttagatgctcttcaaattgctaaagaagttgatccaacaatttcttttagaagatcttgtagagaaggtgtatgtggttcagatggaatgaacattaacggaaaaaatggtttaggatgcatcactccattatcagaagcagttaaaggtaacaaattggaacttagaccacttccaggactgccagttgttaaagatttaattgttgatatgactcaatttgtcgatcaatacaaaaaaattcagccctatttaatcactgaaaaagcaaatgatggaaaagagattccacaaactatcgaggatagagataaattggatggtttgtacgaatgtataatgtgcggttgttgctcgactgcctgtccttctttttggtggaatcctgataaatttttgggtccagctgcacttcttcaagcatacagatttatttcagatagcagagatgttgcgactgaggagagattagaccaattggaagatgctttcagtgtttttagatgtcatggaataatgaattgtgtatcagtttgtcctaaggggttaaacccaaacaaagcgataaacgagataaaaaaaatgctcattaagagagcggtataaa

SEQ ID NO: 200296 - DNA, 571 bp, Unknown
  Bacterial polypeptide expressing nucleotide sequence isolated from the Sargasso Sea
ctgggagggaattctcttttggatcttgttgtgtttggaagatcggcaggacttcatattgaagattcctttaaacagggaattggaataagtgagccatcttctgagaacattaatgaatctttgaaaaatatcaatcgtgtcaattctagtctcgaaggagaaaactcaccaaaaattaaaaaagatcttcaagaagttatgcaaatgagttttggtgtatttagaagtgaagaaaatatgaagcaagggattgaagaaataaatacgattcgcgaaagatcagaaggtctccatcttgccgacaaatcatctaagtttaatactgcaagggtagaggctttagagcttttaaatcttctcgaagttgcggaggctactgcaatttgtgcctacgaaagaaaggaaagcagaggtgctcactccagagatgattttccagaaagagatgatgaaaattggctgaagcactctatttattttaaaggttcaaaggaagtttctaagagagacgtaaattttagaccaaagattgttcaagcctttcaacccttcactcgaacttactaat

SEQ ID NO: 200297 - DNA, 703 bp, Unknown
  Bacterial polypeptide expressing nucleotide sequence isolated from the Sargasso Sea
atggcaaaacgcatttttgaagtctaccgctacgatccggacaaggacgcagcgccgcgcatgcagacgtacgagctggagctcgagcacgagcgcatgctgctcgacgcactggtcaagctgaaggccgtggacgagacgctgtcgttccgccgttcgtgccgtgaaggcgtgtgcggttcggacgcgatgaacatcaacggcaagaacggtctcgcgtgcctgacgaacctgaacgacctgccgcagaagatcgtgctgcgtccgctgccgggcctgcccgtcgtgcgtgacctgatcgtcgacatgacgcacttcttcaaccagtaccactcgatcaagccgtacctgatcaacgacgcgccgccgccggagaaggaacgcctccagtcgccggaagagcgcgacgagctcgacggcgtgtacgagtgcattctgtgtgcgagctgctcgacgtcgtgcccgagcttctggtggaacccggacaagttcgtcggcccggccggcctgctgcaggcttaccgcttcatcgcggacagccgcgacacggctaccggcgagcgtctcgacaacctggaagacccgtaccgtctgttccgttgccatacgatcatgaactgcgtcgacgtttgcccgaagggcctgaacccgacgaaggcgatcggcaagatcaaggaactgatggttcgccgcgctgtttaag

SEQ ID NO: 200298 - DNA, 709 bp, Unknown
  Bacterial polypeptide expressing nucleotide sequence isolated from the Sargasso Sea
atgaaattggaatttgcagtttatcgctacaatcctgatgtagatacaaaaccttacatgcaggattacagccttgaagtggctgctggcactgacatgatggtgctcgatgcactgatcaagttaaaagaacaagacccaaccttagtgttccgtcgctcttgccgcgaaggtgtttgtggcagcgatggcctgaacatgaacggtaaaaacggtctggcttgtattaccccaatctctacttttaaaggtaagaagttggaaatccgtccactgccaggtatgccagttgtacgtgatttagtagttgatttaactcagttctacaagcaatacgagaagattaaacccttccttatcaacgatgataagcagcctgctcgtgaacatttacagtcacctgaacaacgtgcccatttagatggtctttatgaatgtatcatgtgtgcctgttgttcaacggcttgtccatcattctggtggaatcctgataagtttatcggtcctagcggtctgctgcatgcttaccgtttcttgatcgacagtcgcgatacagcaacagaagaacgtctttctgagctggacgacgcctacagcgtgttccgttgccacggcatcatgaactgcgttgacgtttgtccaaaaggacttaatccgaccaaagcaatcggtcatattaagtcaatgctgcttaagcgagcggtgtaat

SEQ ID NO: 200299 - DNA, 416 bp, Unknown
  Bacterial polypeptide expressing nucleotide sequence isolated from the Sargasso Sea
tatgaaagcgtacaaaattatagatcacgaatacgatgttgtagtcctaggagcaggtggctcaggattaagagcagctgtgggactttcagaagctggtcttaaaactgcatgcatatcaaaagtttttccaacaagaagtcatacgtcagctgcacaaggtggaatatcagcagctttaggaaatatgggtgaagatgattggagatggcatatgtatgatacagttaaaggatctgattggttaggtgatcaagatgcaatcgagcacttatgtaaagaagctcctaaagctgtaattgaactagaaaaatacggtgtaccatttagtagaacaaaagagggaaaaatttaccagagagcatttggtggaatgacaaaaaattatggaaatgagtctgtacaaagaacttgtg

SEQ ID NO: 200300 - DNA, 499 bp, Unknown
  Bacterial polypeptide expressing nucleotide sequence isolated from the Sargasso Sea
atgaacgtcacattctctgtctacagatacaatccggatgttgataacgtcccccatatgaaggaatatcgtcttgatattcctgaaggttccgacatgatggtgctcgacgcactgatccagctcaaagagctggaccccacgctcgccttccgccgctcttgccgcgaaggggtctgtggatctgacggtctcaacatgaatggcaagaacggtcttgcctgcatcaccccgctctccgatctgctgaagaagggcaataacgtcgttatccgccccttgccaggcctgccggtgatccgtgatctggtgatcgacatgacccagttctacacccagtgggagaaggtcaaacccttcctcatcaacgacgaaaaattgccgcccgtgcgtgagcacctgcaatcccccgaagagcgcgccaagctggatggcctgtacgagtgtattctctgtgcctgctgctccacctcttgcccctccttctggtggaaccggg

SEQ ID NO: 200301 - DNA, 742 bp, Unknown
  Bacterial polypeptide expressing nucleotide sequence isolated from the Sargasso Sea
atgtttagaaataaattagaaataagtctttacagatataaccctcaagaggataaatttccttatatgaaaaaatatatcatcgataagcctgaaagagatattatggttttagacttacttaatcttttaaaagaagaagaccaatcaatatcatatagaagatcttgcagagaaggtgtatgtggctcagacggaatgaatattaatggtaaaaatgggcttgcgtgcatcacgccaatttcagaagttattaaaaggaataaaatagaacttagaccgttgcctgggttgcctgtaataagagatttagttgtcgatatgactgagttttattcacaatatgaaaaaattaaaccatttttacagaatgagacaacagcacctgaacaagaaagacttcaatctccagaagatagagataaattagatggattatatgaatgtattttatgtgcttgttgctcaacaagttgcccttcattttggtggaatcctgataaatttgtaggtccagcagcattacttcaagcatatagatttcttgcagattcaagagatttaaaaacccaagaaaggctggaatctctttctgatccatttagcgtttatagatgtcatggaattatgaattgtgtaaatgtatgtccaaaagggcttaaccctaacaaagcaattggtgagataaaatcaatgttacataaaaataaaaaggatataattgtttctgacggagcataat

SEQ ID NO: 200302 - DNA, 706 bp, Unknown
  Bacterial polypeptide expressing nucleotide sequence isolated from the Sargasso Sea
tatgcaagtaagtatttatcgttataacccagatatagatgaagtgcccagcatgcgcgagatggaggtcgatcttcctgaaggcaaggacttgatggtgctggatgttttggagcttatgaagacgcaagattccaccttgagttatcgccgctcttgccgagaaggtgtatgtggctctgatggaataaatatgaatggacgaaacgggctcgcgtgcattacccctgtttctcaggtcgtcaaaaaggggaaactggttttaagacctcttccaggtcttcctgtcattagagatcttgtggtcgatatgacccagttttacaagaactacgagaaagtaacgccttacctggttaatgatgaacctcggcccgctcaagagagattgcaaagtccagaagaccgagagaagttggatggtctttacgagtgtatcttgtgtgcttgttgttctacctcgtgcccgtctttttggtggaaccctgataaatttatcggcccggcggggctgttacaagcttatagattccttgctgatagtcgcgatactgcgactgccgaacgtcttgcggatctggacgatccgttcagcgtttttagatgccggggtataatgaattgtgtgaatgtgtgccctaaaggtcttaatcctactcgagcgatcggtaagatcaggacgatgttgctggagactggcacttag

SEQ ID NO: 200303 - DNA, 1150 bp, Unknown
  Bacterial polypeptide expressing nucleotide sequence isolated from the Sargasso Sea
ttgaaagtaatcaaacattcttttgatggagttattgtcggtgcaggtggtgctggtttaagggctgcaatagaagctgctcctcatatgaagctcgcagttattacaaaactttatccaacaagatctcacacaggagctgctcaaggagggatgagtgctgcgctagctaatgtagaagaggataattggaactggcatgcttttgatacagtaaaaggatcagactatttagctgatcaacctgcagtagatatcctttgtaaagaagcaattgatgcagtaattgagttagagcattggggtttaccttttagtagattagaaaatggaaaaattgctcagagacgatttgggggacatactgtaaaagaaggtgagtctcctgcttttagagcatgctatgctgccgatagaaccggacacatgatacttcaaactctatatcaaaaatgtgtatcgatgggagtagaattttttgatgagttccaagtattagatataaaaattgaagatggagtgtgcaaaggtgttgttgcttttgaactctctactggagacatccacatatttgaatcaagagcagtaacttttgcaacaggtggttttgggagaatatttaaagtaagctctaatgctcactcactaacaggtgatggtcctggaattttatatcaaaaaggaattcctcttgaagacatggaattttatcagttccatccgactggtatttacagactaggaattttgttatccgaagcagcaagaggtgagggaggaattttaaggaataaagatggtgaaagatttatggaaagatatgcaccttctataaaagacttggcacctagagatatggtttctcgagctattgctacagaaattagtcaaggaaatggcgcaggaccagatagcgattatgtatatcttgacttaacacatcttggagctgaaacaattaagaaaaaacttcctgatattacagacttcgtaagaacatatgtaaaaattgaacctattaatgaacctataccagtacaaccaactgctcactatgcaatgggaggaataccaacagatgttaatggaagagttctaagtgatgaaaaaaacactgtattaccaggcgtttatgccgccggcgaagctg

SEQ ID NO: 200304 - DNA, 718 bp, Unknown
  Bacterial polypeptide expressing nucleotide sequence isolated from the Sargasso Sea
atgacaaaaaaacttaaattaagtttatatagatttgatccagcaaaagataagaggccctatatgtcagactatgaaatcccttatagctcatcaggaaatatgatggtgattgatgcaattaggacagctcaggaactagattctaccatcacatttagaaggtcttgtgcacagggagtttgtggttctgatggtgtaaatatgaacggacaaaatggcttagcatgcattacaccggtctcaaaagtcgtaacggcgaatagactagaagtcagaccacttcctggtctaccagtcattaaagatttaatagtagatatgaaacctttctacgatcaatatgaaaaaattaaacctttcttagacaatgatgaagaaattaaaactggccatgaaagactgcaaagtccagaagatagagaaaaacttgatggactttatgaatgcatattatgtgcttgttgctcaactagctgcccttcattctggtggaatccagaaaaatttgttggtccagcagcacttttacaggcatatcgttttattgctgatacaagagataagcaaaaaagaatgagacttaaaaaattaaatgatgcttttagcgtatataggtgccacggtataatgaactgtacctcagtttgtccaaaaggtttgaatccatctaaagcaatcaatgagatcaaaaaggagttaagaaaaacagaatagt

SEQ ID NO: 200305 - DNA, 130 bp, Unknown
  Bacterial polypeptide expressing nucleotide sequence isolated from the Sargasso Sea
aagaaagttgctgatgaactaaagctttatagatgtcatactattatgaattgtactaatgcatgcccaaaaggcttaaatcctgcaaaagcaatagcctctataaaaaaaatgcttgcaacaggttaat

SEQ ID NO: 200306 - DNA, 739 bp, Unknown
  Bacterial polypeptide expressing nucleotide sequence isolated from the Sargasso Sea
aatggaccttaatgtaagtctttatagatataatcctgaacaggataagtttccttatatgaaaagttataaggttaaaaaacccgaaaaagacataatggttttagatcttcttaatatgcttaaagaggatgatgcaactatttcttacaggcgatcatgcagagaaggtgtgtgcgggtccgatggtatgaacattaatggtaaaaatggtttggcatgcattacacctttgtctgaagtcttaaaaggtaataagcttgagctaagacctttacctggacttcctgtcataagagacctaatagtagatatgactcaattttatgagcagtatgaaaagattaaaccatttttgcagtctgactcagaaccgccagagcaagaaagacttcaatctcctcaagatagagataaattagatggcctatatgagtgtattctttgcgcctgttgctcaacaagttgcccatcgttctggtggaatcctgataaatttgttgggccagctgcacttcttcaggcatacagattccttgcggacacaagagatactaagaaacaagagagattagaagaattaggagacccttttagtgtttatagatgtcacggcattatgaattgtgtgagtgtttgcccaaaaggtttaaatccaaataaagcaattggtgaaattaaatcaatgcttttaactggaactaaagaggataaaataaaggttgtaggtttggagtga

SEQ ID NO: 200307 - DNA, 976 bp, Unknown
  Bacterial polypeptide expressing nucleotide sequence isolated from the Sargasso Sea
ggcagatcgatggttagctggggataaagacgcaagaaggccaccagaattattaacacgggatgttgtcgctcgagcaatacgtaaagaagtaaaagctgggagaggttcaccccatggtggtgcttttttagatattgctaatagaagaagtgctgacgatattaaacgcaagttgccatcaatgtatcatcagtttaatgttttggctgagcttgatattaccaaagaatcaatggaggttggaccgacccttcattattttatgggaggtgttcgggttgatgcagacacacaaatgactagagtccctggactctttgctgctggagagtgtgctgctggagtacatggcgcaaataggttgggtggtaactctctttcagatttattagtgtgcggaaaattagctgggtctggggcggttgattatattaaatcattaccaaacaaaaaaaatctaaatgatgatgatgtggaaaaagtgattcgttccgcaacagatatcttaaatcgtgaaaatggtgaaaatccttatttaatccatgaagagcttcaagaactaatgcaaaataatgttggtattgtacgaacagatgaattgttatctgagggtattgatggtttatcaaaattgtggggaaaatttaataatgtaaaagctgatggagcatgtcagtttaacccgggttggcatcaagctatttcattaagaaatttattagttacatctgaatctgttgcccgttctgccagaatgcgagaagaaagtcgtggtgcacatacgcgtgttgattttgagggcgaacgcgatgagtggttgcaatataatgtggtaataagtaagtctgataatggagagatgatagcagaaaaaaatagacgtggtgaaccagatccagaattaaaaagaattgctgaattaagtattgatgaattagaaaaagaagtttctttggaaacggatagtaaataa

SEQ ID NO: 200308 - DNA, 709 bp, Unknown
  Bacterial polypeptide expressing nucleotide sequence isolated from the Sargasso Sea
atgaaattggaatttgcagtttatcgttacaatcctgatgtagatacaaaaccttacatgcaggattacagccttgaagtggctgaaggctctgacatgatggtgcttgatgcactgatcaagttaaaagaacaggacccaacgttagcgttccgtcgctcatgccgtgaaggtgtttgtggtagtgacggtgtgaacatgaacggtaaaaacggtctggcttgtattacaccaatctctaccttcaaaggtaagaagttggaaattcgtccactgccaggtatgccagtcgtacgtgacttagtggttgatttaactcagttctacaagcagtacgagaagatcaagccgttcctcatcaacgatgagaagatgccagcccgtgaacatttacagtcacctgaacagcgtgcgcatttagatggtctgtacgaatgtatcatgtgtgcatgttgttctacggcttgcccatcgttctggtggaatcctgataagtttatcggtcctagcggtctgctacacgcttaccgtttcttgatcgacagccgcgatacagcgacagaagaacgtctttctgagctggacgacgcctacagcgtgttccgttgccacggcattatgaactgcgttgacgtctgtccaaaaggacttaatccgactaaagcaattggtcacattaagtcaatgctgcttaagcgagctgtgtaat

SEQ ID NO: 200309 - DNA, 265 bp, Unknown
  Bacterial polypeptide expressing nucleotide sequence isolated from the Sargasso Sea
atgagtgaatacaatattatagatcatgaatatgacgtcgttgttctaggagcgggtggttctggattgagggctgcagttggcctaagtgaggcaggattaaaaacagcatgtatttcaaaagtttttccaactagaagccatacttctgctgctcaaggaggaatatctgcggcattgggaaatatgggtgaagatgattggagatggcacatgtatgataccgttaaaggatcagattggttaggtgatcaggactgtatga

SEQ ID NO: 200310 - DNA, 616 bp, Unknown
  Bacterial polypeptide expressing nucleotide sequence isolated from the Sargasso Sea
gcatgtgtgtctgttcatggagcaaaccgcctgggaacaaactctctattagatattgttgtctttggacgcgctgctgcacaccgtgctgttgacacaatgaagccaggcgagtctttgccgcctttacctgaatcagttacacaaaaagccattgatcgctttgataggattcgccattcgaaaggtgatgtatcaacagctgaactcagactggatatgcaaaaagctatgcaaaagcacgcttctgtgttccgcaatactgagatacttgatgaaggtgtaaagaaactaggtgacattgcaatggatatgaacaatgtccgcatacaagataaatctttgatctggaacacagagctcattgagacattagagcttgataacttgatgggacaggcattggtaacaataagatcagcaagtgagcgtaaagaatcgcgtggtgctcatgcgcatgaagattatccagaaagagatgataaagactggatgaaacacactgtaatgtggctcgatgagcagaacaaatcaaaacttggatacagagacgttacattatcaacattaacaaatgaagtgcaaagtatcgcacctgtcgcacgcgtttattaaa

SEQ ID NO: 200311 - DNA, 643 bp, Unknown
  Bacterial polypeptide expressing nucleotide sequence isolated from the Sargasso Sea
aatggttttagatcttcttaatatgcttaaagaggatgatgcaactatttcttacaggcgatcatgcagagaaggtgtgtgcgggtccgatggaatgaacattaatggtaaaaatggtttggcatgcattacacctttgtctgaagtcttaaaaggtaataagctagagctaagacctttacctggacttcctgtcataagagacctaatagtagatatgactcaattttatgagcagtatgaaaagattaaaccatttttgcagtctgactcagaaccgccagagcaagaaagacttcaatctcctcaagatagagataaattagatggcctatatgagtgtattctttgcgcctgttgctcaacaagttgcccatccttctggtggaatcctgacaaatttgttggaccagctgcgcttcttcaggcatacagattccttgcggacacaagagatactaagaaacaagagagattagaagaattaggagacccttttagtgtttatagatgtcacggcatcatgaattgtgtgagcgtttgcccaaaaggtttaaatccaaataaagcaattggtgaaatcaaatcaatgcttttaactggcactaaagaggataaaataaaggttgtaggtttggagtga

SEQ ID NO: 200312 - DNA, 742 bp, Unknown
  Bacterial polypeptide expressing nucleotide sequence isolated from the Sargasso Sea
atgcttaaaaataaattagaagtaagtatgtacagatataaccctgaggtggataaatttccttacatgaagacatacttaattagcaagccatctaaagatatcatggttttagacttactaaatttattgaaagaagaagaccaatccatttcgtatcgaagatcttgtagagagggggtttgtggttcagatggcatgaatattaatggtaaaaacggattagcatgcataactcctatctcatctgttatcaagaaaaataaaattgaattaagaccacttccaggactgccagttataagagatttagttgtagatatgagtgagttttatgctcaatatgaaaaaattaaaccttttttacaaaatgaaactactgcccctgaacaggagcggcttcagtcgcccgaagatagagataagcttgatgggctttatgagtgtattctgtgcgcatgctgttctactagctgtccctcattttggtggaatcctgataaatttgttggacctgcagcactgttacaagcatatagatttcttgctgattcccgtgatcttaaaacttatgaaaggttagaggctttatctgatccttttagtgtttacagatgtcacggaattatgaattgtgtaaatgtttgtcctaaaggacttaatccaaataaggctattggcgaaataaaatccatgttacaaaaaaataaaaaggatataattgtctctgataaattataaa

SEQ ID NO: 200313 - DNA, 334 bp, Unknown
  Bacterial polypeptide expressing nucleotide sequence isolated from the Sargasso Sea
cctgaagaaagagataaattacgatggtctctatgaatgcatattatgtgcatgttgttctacaagctgtccatcattctggtggaatcctgataaatttgtcggaccagctgcgcttcttcaagcatatagattcctcgcagattctcgagatttgaaaactcaagaaaggttagaggatttatctgatccatttagtgtctacagatgtcatggaataatgaattgtgtaaatgtatgtccaaaaggccttaatccaaataaggcaattggtgagataaaatcaatgttacataaaaataaaaaggatataattgtctctgatggggtataa

SEQ ID NO: 200314 - DNA, 742 bp, Unknown
  Bacterial polypeptide expressing nucleotide sequence isolated from the Sargasso Sea
aatgtttggtaataaattgcatgtaagcttgtatagatacaatcccgaagaggatcagttcccttatatgaaaaaatatactattgataaacctgacagagatattatggtgcttgatttattacatctattaaaagaagaagatcaatctatatcttacagaagatcatgtagagaaggtgtgtgcggttctgatggaatgaacataaatggtaagaatggtttggcttgcatcacaccaatttcttcagttttgaagaaaaataaaatcgaattaagacctttaccaggacttcctgtaattagagatctcgttgtggatatgactgagttttatgctcagtacgaaaagataaaaccgtttttacaaaatgaaacaacagctcctgagcaagaaaggcttcagtctcctgaggaaagagataagcttgatggtttgtatgagtgcattctatgtgcatgctgttctacaagttgtccatctttttggtggaatcctgataaatttgtaggtcctgcggcattacttcaagcctatagatttttagcagactctagagatctcaaaactgaggaaaggttgaatgatttatccgacccatttagtgtttatagatgtcatggcatcatgaactgtgtaaatgtttgtcctaaaggccttaatccaaataaggcaattggtgaaataaaatctatgttacataaaaataaaaaggatataattgcttctgatagaatataa

SEQ ID NO: 200315 - DNA, 742 bp, Unknown
  Bacterial polypeptide expressing nucleotide sequence isolated from the Sargasso Sea
atgtttggtaataagctaaaggtaagtttgtatagatataatccagaagaggataaatttccctatatgaaaaattatttaattgataagccagaaagagacataatggttttagatttattacatttattaaaggaagaagatcaatcaatatcatatagacgatcatgcagagagggagtttgtggctctgatggtatgaacataaatggtaaaaatggactggcctgcataacaccaatttcttccgttattaagaggaataaaattgaattaagaccactaccaggattgcctgtgatcagagatttagttgttgatatgacagagttttatgctcaatatgagaagataaaaccttttctacagaacgaaacaacagcaccggaacaagagagacttcaatctcctgaggaaagagataaattagatggtctctatgaatgtatattgtgtgcatgttgttctacaagctgtccatcattctggtggaatcctgataaatttgttggaccagctgcgcttcttcaagcatatagattcctcgcagattctcgagatttgaaaactcaagaaagattagaggctttatctgatccatttagtgtatacagatgtcatggaataatgaattgtgtaaatgtatgcccaaaaggccttaatccaaataaggcaattggtgagataaaatcaatgttacataaaaataaaaaggatataattgtctctgacggagtataaa

SEQ ID NO: 200316 - DNA, 163 bp, Unknown
  Bacterial polypeptide expressing nucleotide sequence isolated from the Sargasso Sea
ggatagtagagatgaggaaagaaaagagagattaaaaaaagttgcagatgaactcaagctgtatagatgtcatacgattatgaattgcactaattcttgcccaaaaggtttaaatcctgcaaaagcaattggatctattaaaaaaatgcttgcatcaagctaa

SEQ ID NO: 200317 - DNA, 141 bp, Unknown
  Bacterial polypeptide expressing nucleotide sequence isolated from the Sargasso Sea
aaagaagattgaagaaagttgctgatgaattgaagctttatagatgccatacaattatgaactgtactaatgcatgtccaaaaggtttaaatcctgcaaaagctattgcatctattaaaaaaatgcttgcaactagctaat

SEQ ID NO: 200318 - DNA, 106 bp, Unknown
  Bacterial polypeptide expressing nucleotide sequence isolated from the Sargasso Sea
attgtatagatgtcatactataatgaattgtgctaattcttgtccaaaaggtctaaatcctgcaaaagccattggctcaataaaaaaaatgcttgcaacaagttaa

SEQ ID NO: 200319 - DNA, 931 bp, Unknown
  Bacterial polypeptide expressing nucleotide sequence isolated from the Sargasso Sea
ttggcgatggcatatgtacgatacggttaaaggctctgattggcttggagaccaggatgcaattgaatacttatgtaagaatgctcccaaagcagttttagagttagaaaattatggtgtgccatttagtcgaacagaagatggcaaaatatatcagcgagcttttggtggtatgacaaaaaattatggtgatggaactgcgcaaagaacatgcgctgcagcagatagaactggccatgccattattcacactctttatggacaatccctaaaacatgatgtggattattacatcgaatattttgttttagatttacttatggttgaaggtgaatgtagaggcgttgttgcttggtgtttagaggacggcaagctacatgtatttaactcaaaacaaactgtattagcttcaggtggttatggaagagtttatttctccgctacatctgctcacacatgtacaggagatggaaatgcaatggtattaagagcgggacttccgcttcaagatatggaatttgttcaatttcatcctacgggaatttatggtgttggctgtttgataacagagggagccagaggtgaaggtggatacctagtaaatagtgagggagaaaggtttatggaaaggtacgctccatcggcaaaggatttagcttcaagagatgttgtgtcacgatctattaccaaagaaattattgatggaagaggtgtgggaaaggataaagaccacatgtatcttcatctagaccatattgactccaatattcttgaagaaagactaccagggatatcagaatctgcaaaagtctttgctggagtggatgtaactaaagacccgatacctattattccgacagtacattataacatgggtggaataccaactaacttccacggcgaggttatgaatcttgttaaaggcgacgaa

SEQ ID NO: 200320 - DNA, 952 bp, Unknown
  Bacterial polypeptide expressing nucleotide sequence isolated from the Sargasso Sea
atcacttaaaaataatgtagaattttatattgaatattttgttttagatttaatttctgatgatcaaggtaattgcattggtgtagtaacatggtgcttagaggatggatcaatccatcgatttttatctcatcaaacaattctagctactggtggatatggaagagcttacttctcatccacgagtgctcacatttgtactggtgacggtagtgcaatggctttaagacaaaacctacctctttctgatatggaatttattcagttccatccaacaggagtttacggtgcaggagtgttaatcactgagggagcaagaggagaaggtggatatttaactaatagtgatggtgaaagatttatggaaagatatgctccaaatgcaaaagatctagcatcaagggatgtagtaagccgagcaatgactattgaaattagtgaaaatagaggctgtggagataatgccgatcatgtgctacttcatcttgagcacattgatgctgatacattacataaaagattacctggtatttcagaaactgcaaaaatatttgccggagttgatctaactaaagatccaataccagttcttccaacagttcattataatatgggtggcataccgacaaattatagaacagaagttctaaggccaacaaatgaaaatccagataatgtatgtgaaggtttaatggctgttggtgaggctgcatgtgtttctgtacacggtgctaatagattaggaacaaattcattaatcgatcttgttgtttttggcaaagcagctagtctaacatgtaaagaaaaagtaaaaccaaattctaaaaaaattgaaattagtaaatcaaaaacagataatattattgagcgatttgataagattagaaacagcaaaggaaactctacaactggagaacttcgcacttccatgcaacatataatgcagcaaaaa

SEQ ID NO: 200321 - DNA, 181 bp, Unknown
  Bacterial polypeptide expressing nucleotide sequence isolated from the Sargasso Sea
ggagttcgtacaatttcatccaacaggaatttatggtcacgggactttaatttcagaaggtgtaaggggtgaaggtggttacttagtaaattccaaaggagagagatttatggaaagatatgccccaaaagctaaagatcttgcctcaagagatgttgtaagtagatcaattgctggttga

SEQ ID NO: 200322 - DNA, 966 bp, Unknown
  Bacterial polypeptide expressing nucleotide sequence isolated from the Sargasso Sea
tactgaaggagctaggggtgaaggtgggtatttaacaaatagtgatggcgaaagatttatggagcgatatgcaccaaatgccaaagatctagcatccagagatgtagttagtcgtgctatgactattgagataaatgaaaatagagggtgtggagaagacgctgatcatgttgttttacatttagaacatattgatgctgatactcttcataaaagattgcctggaatttcagaaactgcaaaaatttttgcaggtgtagatttaactaaagagccaattcccgtattaccgactgtacattataatatgggaggcattccaacaaatcataggactgaagtgcttcgtccaacagaaaataatcctgataatatatgtgaaggattattggcagttggtgaggcggcatgtgtgtctgtacatggagctaaccgtttaggaacaaactctttaattgatcttgttgtatttggaaaagcctcaagtattacagccaaagaaaaagtgcaacctaacagtaagccagttgatattgatgaaagtatagtcgacccaatattagatcgttttgataaaatccgattcaacaaaggggatagctcaaccggtgaagtaagaacttcgatgcaaaaagttatgcaagaaaaatgtgcagttttcagaacggatgaacttatctcaaaaggtattgaggaatttagtcatatagaaagctcaatggataacatagatgtgaaagataaatccatgatctttaacacagacttaactgagtctcttgaattacataatttaatggcacaatccaaggttactcttcattctgctcttaatagaacagaaagcaggggagcgcatgcaagagaagaccatcgagaaagagatgactctaattggctggtccattctttatcatggcttgataataaagggggtgttagaatgggaactcgacctgtaaacat

SEQ ID NO: 200323 - DNA, 649 bp, Unknown
  Bacterial polypeptide expressing nucleotide sequence isolated from the Sargasso Sea
aacgacaaggttgttaacggtctatttgcctgtggtgagattgcctgtgtatctgtacacggtgcgaaccgtcttggcggtaactcacttcttgaccttgttgtcttcggtcgcgcgaccggtttacaccttggtaagacattgtctgaaatggcaccaacacgcgacgcatcagagtctgatcttgaagcctctatgacgcgtttcaaccgttgggaaaattcagagaaaggtaagggcgaagacccagtacaaattaagaaagacttgcagaaatgcatgcagcttaacttctcagtattccgtgaaggtgaagcaatggcggaaggtcttaaagagcttagcgaaattcgcgagcgtcttaagcatgcacgccttgacgacaagagcgcagacttcaatacccagcgtattgaatgtttagagcttgataacctaatggaaaccgcgtacagcacagcagtagcagcgaacttcagaacggaaagccgtggtgctcacagccgcttcgacttcccggaccgtgatgacgataactggttatgccacagcatctacgatccgaacactgataaaatgctcaaacgtgaagtgaatatggcgcctaagcttagggaagcattcccgcctaaagtgcgttcatattaag

SEQ ID NO: 200324 - DNA, 793 bp, Unknown
  Bacterial polypeptide expressing nucleotide sequence isolated from the Sargasso Sea
tctcagaaacagcaaaaattttgcaggagtagatttacccaaagatccatcccagttttaccaactgtacattataatatggggggtatcccaactaactatagaacagaagttttaagaccaaataaacacaatcccgataatatatgtgaaggattaatggcagtaggtgaagcggcttgtgtatctgtccatggtgctaatagactaggtactaactccttaattgatttagtagtttttggaaaagctgcaagtttgacttgtaaagaaaaaataaaacctaattcaaaaaaaattgaaataaataaatcgaagacagatcatataattcaaagatttgataaaattagacatagtaaaggtaattcaactactggggaacttagaacttcaatgcaacacgttatgcaaaaaaaatgtgcagtatttagaacacatgatttaatttctagaggtattgaggaatatcaaaaaattgaaagttctatggatacaattgatattaaagataagtctcttatttttaatacagatcttgtagaagcactcgagttacacaatttaatggctcaatctaaagtaactttgtactcagctcttaatagaaaggaaagtagaggagcacatgctcgtgaggattacaaagaaagagatgatgaaaattggttagttcattctttagcttggctaaatgaacaaggagatgtaaatatgggatctagagcagttcacatgaatacattaaccaatcacgtacaacccattcctcctaaaagaagagtttactaat

SEQ ID NO: 200325 - DNA, 737 bp, Unknown
  Bacterial polypeptide expressing nucleotide sequence isolated from the Sargasso Sea
atccattaaaaataaagctgaatttttcattgaatattttgcactcgatttaattatggaagagggtgaatgcactggagttgtagcgctagagatggcgactggcaagattcatgcttttcgcgctcaacgggtgatactggccacaggcgggcatggaagagcatatttttcatgtactgctgcacacacttgcaccggagatggttcaggaatggctctcagagcaggtttgccgcttcaagatatggaatttgttcaatttcatccaactggtatctacggtgttggatgtctcatcacagaaggtgttcgaggagaaggaggatatcttaccaactctgatggcgagcgattcatggaacgttatgcgcccaatgctaaggaccttgcatcaagagatgttgtgagtcgttcaatgacaatggaaatattagaaggaagaggtgtaggagagaaaaaagaccatattcatcttaatcttcagcacttagggcctgaagtaatcgaagagcgtctccccggtattgctgaaacagcaagggtatttgctgacgttgatgtaacaaaagaccccattcctgttctaccaacagttcattacaatatgggtggtgtgcccacaaatatgcacacagaggtcattaccaaaaactctgctggcgagatggagattgtctcaggattgatggcagttggtgaagctgcttctgtatcggtgcatggagcaaatcgtc

SEQ ID NO: 200326 - DNA, 433 bp, Unknown
  Bacterial polypeptide expressing nucleotide sequence isolated from the Sargasso Sea
tacaggtggttatggaaaagtttattattcagcaacatcagcacatacttgcactggtgatggtaatgcaatggttttaagagctggattatcgcttcaggatatggaatttgttcaatttcatccaacaggaatttatggccatggtaccttaataacagaaggtgcgcgaggtgaagggggttatcttacaaattctaaaggtgaaaggtttatggaaaggtatgccccaaatgcaaaagatttggcatcaagagatgttgtaagcagatccatgtctatagagattaatgagggaagaggtgttggaaaagatcaagatcatgttcacttaaacgtaagtcacttggataaagagattattgaaagcaggcttccaggaattattgatgcagcaagattatttgcaaatgtagatgtaactaatgaacca

SEQ ID NO: 200327 - DNA, 773 bp, Unknown
  Bacterial polypeptide expressing nucleotide sequence isolated from the Sargasso Sea
ttacgaaattgaatatcacgattacgatgtagttgttgtaggagctggaggctcgggattaagagcaacagttggtgccgtggagaacggatataagacagcttgcatttctaaagtttttcccacaagaagtcatacagttgctgcacagggtggaatatcagctgcgttaggtaatatgggagaagatgattggcgatggcatatgtatgatacggttaaaggctctgattggcttggagatcaggatgcaattgaatacttatgtaagaacgcccctaaagcagttttagagttagaaaattatggtgtgccatttagtcgaacagaagatggtaaaatatatcagcgggctttcggcggcatgacaaaaaattatggtgatggaactgcgcaaagaacatgtgctgcagcagatagaactggccatgccattattcacactctttatggacaatccttaaaacatgatgtggattattacatcgaatattttgttttagatttacttatggttgaaggtgaatgcagaggcgttgttgcctggtgtttagaggacggcaagctgcatgtatttaactcaaaacaaactgtattagcttcaggtggttatggaagagtttatttctccgcaacttctgcccatacatgtacaggagatggaaatgcaatggtattaagagcgggacttccgctgcaagatatggagtttgttcagtttcatccaacaggaatttatggtgttggttgtttgataactgagggagcctaga

SEQ ID NO: 200328 - DNA, 136 bp, Unknown
  Bacterial polypeptide expressing nucleotide sequence isolated from the Sargasso Sea
ctgagggagcctagaggtgaaggtggatacctagtaaatagtgagggagaaaggtttatggaaaggtacgctccatcggcaaaggatttagcttcaagagacgttgtgtcacgatctattaccaaagaaattattg

SEQ ID NO: 200329 - DNA, 808 bp, Unknown
  Bacterial polypeptide expressing nucleotide sequence isolated from the Sargasso Sea
tgatagaaccggacatgcattacttcacacgctatatcagcaaagcctcaaaaataacgttgatttctataacgaatactttgccatagatttattaaaagatgataacgacgcaatttgtggactcttagcaatcaatattgaagatgggtcattgcaccgctttattgcaaaaatgactattttagctaccggaggttatggaagaatatttcaatcctccacaagtgcacatatttgtacaggggatggcgcaggtattgctctaagggcaggacttccgttatctgatatggagtttattcagtttcaccctactggaatatacggtgttggtgttttaatatcagaggcagctagaggtgaggggggtattttaaaaaataatgagggtacaaggtttatgcttgagtacgctccaaatgccaaagaccttgcagctagagatgttatttcaagattcataagtaaggagattagtgctggtagaggctgcggccctaataaagactatataaatcttcatttagaacaccttgatgctgatatgcttgctaaaagattacctggtatttctgagtcagttaaagcattttgtggaagagatatttccaaagaaccaattccagttattccaactgttcactactgtatgggaggtatcccaactaattttaaagcagaagttttgaaacctaatgacacgaatacagaagaagtatgtgagggattaatggcaataggtgaagcagcatgtgcatcagttcatggagcaaatagactaggaactaatgctcttgcagaactt

SEQ ID NO: 200330 - DNA, 604 bp, Unknown
  Bacterial polypeptide expressing nucleotide sequence isolated from the Sargasso Sea
gtattagatattctatttaaaataaaaaatgaaattgattcatcattaacttttagaagatcttgtgcgcatggagtttgtggttcatgcgctatgaatgtagatggaacaaatacgttgtcatgtattaaatcccatagtgacattaaaggagaattaaatatttatccattaccgcatctcaaagttataaaagatttgataggggatttaagtaatttatacaaacaatatgagtcaatccaaccgtggttaaaaacttctaaaaccgacactgaaaatcaagaaattctacaatctcaaaaagatagatcaaaacttgatggatattacgagtgtatattatgcgcttgctgctccacatcatgccctagttattggtggaatggagataagtatttatgccccgcagtgctacttcaagcttatagatggataagtgacagcagagatgaagaaaaaaaagaaagattaaaaaaagttgcagatgagttaaagctttacagatgccatactataatgaactgtactaattcttgtcctaaaggtcttaatccggcgaaagctattggctctataaaaaaaatgcttgcaacaagctaaa

SEQ ID NO: 200331 - DNA, 811 bp, Unknown
  Bacterial polypeptide expressing nucleotide sequence isolated from the Sargasso Sea
aacagttcataaaagactacccgggatttctgatacagcaaaaatatttgctggtgttgatttaacaaaggatccaattcctgttttaccaacagttcactataatatgggaggaattccaactaattatagaactgaagtattgcgtcccaaaactgaaaatcctgataatatatgcgaaggcttaatggctgttggagaagctgcttgtgtatctgtccatggagccaatagacttggaactaattctttaatagatcttatagtttttggtaaagcagcaagtttaacatgtttagaaaaagtaaaacctaactcaaaaaaccttgaaattaataaatctgaaaccgatggtattattgatagatttgataagataagacatagtaaaggggatatgaccactggtgaattaagaacctcaatgcaacatataatgcaaaaaaaatgtgcagtttttagaacacatgatttaatttcgaaaggaattgatgaatataatgaaattgagatgtctatagactctataaatattaaagataagtcactaatatttaatacagatcttgtagaagcactggaattacataatcttatggctcagtccaaagttactcttcattcagctttaaatagaactgaaagtagaggagctcacgcaagagaagattataaagaaagggatgataaaaattggctagttcattctttagcttggttaaatgataaaggagatgtaaatatgggatcaagagctgttcatatgaatactttaactaaccatgtgcaaccaattcctccaaaaaaacga

SEQ ID NO: 200332 - DNA, 877 bp, Unknown
  Bacterial polypeptide expressing nucleotide sequence isolated from the Sargasso Sea
gaggccggattaaaaacagcatgcatttcaaaagtttttccaacaagaagtcatacttctgctgctcaaggaggaatatcagcagcactaggcaatatgggcgaagatgattggagatggcatatgtatgataccgttaaaggatcagactggttaggtgatcaggactgtattgaatatttatgtaaagaagccccaagagctgttttggaattagaaagatatggagttccatttagtcgaacaaaagatggaaaaatttatcaaagatcttttgggggaatgacaaaaaattatggcaatgagactgttcaaagaacttgtgcagcagcagatagaacaggtcacgctatacttcacactatgtatggccaagcattgaaacataatactgaattttttatcgaatattttgcattggatctattaatgaaaaatggagaatgtaaaggtttattagcttggaacttaaatgatggaacaattcacagatttagatctcatataaccataatagcaacgggtggatatggaaaaacatattactcatcaacttctgcccatacatgtactggagatggcaatgcaatggcattaagagcgggtttgccattacaagatatggaatttgttcagtttcatccaacaggaatttatggacatggaactttaatatcagaaggagttagaggagaaggtggctacctagtaaactccaaaggcgaaagatttatggaacgttacgctccaaaagccaaagaccttgcatctagagatgtagttagtagatcaatagctgttgaaattaatgaaggaagaggcgttggaaatgaaaaagatcatgtacatcttcatttagaccatctagatcctaaag

SEQ ID NO: 200333 - DNA, 844 bp, Unknown
  Bacterial polypeptide expressing nucleotide sequence isolated from the Sargasso Sea
atcgaacacctttgtaaagaggcacccaaagctgttatcgaattagaaaaatatggtgtaccgtttagtagaacaaaggaaggaaaaatttatcaacgtgcttttggaggtatgaccaaaaattatggaaatgattccgtgcaaagaacatgtgctgctgctgatagaacgggacatgcaattttacatactttatacggacaagctttaaaacataataccgaatttttcatagagtatttcgcattagatcttttaatgaaaaatggagagtgcaaaggcttagtagcttggaatttgaatgatggaactattcacagatttagatcacatataactattctcgcaactggcgggtacggcaaagtttattatactgcaacatctgctcatacttgtactggtgatgggaatgctatggttttgagagcaggactcccattacaagatatggagtttgttcaatttcatcctacaggaatttacggagttggcacgttaatatcagaaggtgtcagaggtgaaggtggctttcttttaaattcaaaaggagaaaggttcatggagaagtatgctccaaaagctaaagatttggcctcaagagatgtagttagcaggtcaatagcagttgagatcaacgaaggtagaggagttggaaaaaataaggactatgtgaatcttcatctagatcatttagacccgaaagttattgaagaaagattaccaggaatagcagagtcagccaaaactttttgtgaagttgacgttagaaaagatccaattccagtagtaccaacagtacattataatatgggaggaattcctacaaattataaagcagaag

SEQ ID NO: 200334 - DNA, 803 bp, Unknown
  Bacterial polypeptide expressing nucleotide sequence isolated from the Sargasso Sea
tatgaaacaatacgaaattatagatcatgaatacgacgtagtagttctaggtgctggaggctccggtctgagagcagccgtgggactatcagaggcaggtcttaaaactgcttgtatatcaaaagtttttccaactagaagtcatacatctgctgcacaaggaggcatatcagctgcacttggaaatatgggagaagatgactggagatggcacatgtacgatacagttaaaggatctgattggttaggggaccaagatgcaatagagcatttatgtaaagaggcaccgaaagcagtaatagaattagaaaagtatggagttccattcagtagaacaaaagagggaaaaatttatcaaagagcattcggtggaatgacaaaaaattatggtaatgaatcagttcaaagaacctgtgcagcagccgacagaactggtcacgcaatattacacacattatacggtcaagcactaaaacataatacagagtttttcatagaatattttgcgctagatcttttaatgaaaaatggagagtgcaaaggccttatagcatggaatttaaatgatggaacaattcatagattcagatcgcacataactattattgcaacaggtggatatggaaaagtttactatacagcaacgtctgctcatacatgcacaggagatggaaacgcaatggcattacgagcaggattgccactccaagacatggaatttgttcagtttcacccaactggaatatatggtgtaggaactttaatatctgagggtgttagaggagaaggcggttaccttttaa

SEQ ID NO: 200335 - DNA, 694 bp, Unknown
  Bacterial polypeptide expressing nucleotide sequence isolated from the Sargasso Sea
aataaaaaatcatttaaaatttatcgttgggatcctgaaaagaatgaaaacccaagatacgatttatacgagatcgacttggataaatgcggaccaatggttttagatgcacttattaagataaaagatgaaattgattctactcttacctttagaaggtcatgtcgtgaaggaatatgcggatcatgtgcaatgaatattgatggtgttaatacattagcatgtacaatggcaatagaagacacaaaaaaagaagtaggaatcaatcctttaccacatcaacctgttgttaaggacttggttccagatttaacaaatttttataatcaacataaaaaaattcaaccatggttaaaggctaatggtaaatctgcagaaactgaatactctcagtcaaaagaagatagagaaaaaatcgatggattgtatgaatgcattatgtgtgcatgctgttcaacatcttgtccaagttattggtggaattctgacaaatacttaggacctgcggctcttttacaagcctatagatggattagtgatagcagagacgaagagaaagaagaaagactagatcaacttgatgatgagtttaaagtttatagttgtagaacaatcatgaattgttcaaaggcttgtcccaaaggtttatctcctgcaaaagctatagcaggcataaaaaaagaattggcttcaa

SEQ ID NO: 200336 - DNA, 607 bp, Unknown
  Bacterial polypeptide expressing nucleotide sequence isolated from the Sargasso Sea
atgagtacatataaaattatagatcatgaatacgatgttgtagttttgggtgctggtggttcaggactaagagcagctgtcggactttctgaagctggtcttaaaaccgcatgcatatcaaaagtttttccaacaagaagccatacatcagctgcccaaggtggaatttctgctgctttgggaaatatgggcgaagatgattggagatggcacatgtacgataccgtcaaaggatctgactggttaggagatcaggatgcaattgaacatttgtgtaaagaagccccaaaagcagtaattgaattagaaaaatacggcgttccgtttagtagaacaaaagaaggaaaaatctaccaaagagcatttggaggaatgacaaaaaattatggaaatgagtctgtacaaagaacttgtgcagccgcagacagaactggtcacgcaatactacatactttatatggccaagctttaaaacataatacagaattttttatagaatattttgctttagaccttctaatgaaaaatggagaatgcaagggattaattgcctggaacttaaatgatggaaccattcataggtttagatcacatattactatattag

SEQ ID NO: 200337 - DNA, 712 bp, Unknown
  Bacterial polypeptide expressing nucleotide sequence isolated from the Sargasso Sea
tgtaaagaagctatcccatcagtaacggaattagaaaattttggtgttccattttccagaactgaggatggtgaagtataccagagaccttttggtggtcatacattagactatggaaaaaaaatggcaagaagagcttgtgcagccgctgacagaacaggacatgctattttacatacgctttaccaacaatgtttgaagtatcaggcagagttcttcattgaatatatagctttagatttattgatggatgataatggcaaatgtgttggtgtgttagctttatgtatggatgatggtaaaatccacaggtttagaggtcaccaaacggtattggcaacaggtgggtatggaagagtttacttttcttgtacttctgctcatacttgcacaggtgacgggaatgctatggttttaagagctggcttacccctccaagatatggaatttgttcaatttcaccctactggtgtatacggtgctggtgtccttataactgaaggatctcgaggtgaaggaggttaccttacaaattctgaaggtgaaagatttatggaaagatatgctccaaccgctaaagatcttgcaagtagagatgtggtatcaagatcaatgacaatagagattaatgaaggtagaggagttggccctaataaagaccatatatttatgcatttagagcatattgatcctgctaccttacatatgaggt

SEQ ID NO: 200338 - DNA, 880 bp, Unknown
  Bacterial polypeptide expressing nucleotide sequence isolated from the Sargasso Sea
atggctttacgtcaaaatcttccactttcagatatggagtttatacagtttcatccaactggcatctatggagcgggagtattaattactgaaggtgcaagaggtgaaggcggatatttaacaaataatgatggtgaacgatttatggaaagatatgctcctaatgctaaagatctagcatctagagatgttgtaagcagggctatgacaattgaaatagaagaaaaaaggggttgtggagaaaataatgaccatcttttattgcatcttgaacatattgactcaaatacaatacacaaaagattacctggtatatctgaaacagctaaaatatttgcagatgttgatctaactaatgaaccaatacctgttttaccaactgttcactataatatgggggggattccaacaaattatagaactgaggtattatcaccaacaatagataaccctgacaatatatgtgagggcttattagccattggtgaagctgcatgcgtctctgttcatggagcaaatagattaggtacaaattctcttatagatttgattgtttttggaaagtcagcaagcttaacagcagcaaataaaactaatcccaattcaaaaaaatttgatattaataatcaatcaacagatgaaattctaggaagactagattcaattagatttaataaaggaacatttagtacaggcgaagtcagactgggaatgcaaaaaataatgcaacaaaaatgtggtgtttttagaacacataatttgattacaaaaggaattgatgaatttaagggtgtagaatcttctttagaaaacattaatattaaagataaatcattaatatttaatacagatttagtagaatcattagaattacataatc

SEQ ID NO: 200339 - DNA, 547 bp, Unknown
  Bacterial polypeptide expressing nucleotide sequence isolated from the Sargasso Sea
ggtcttgccgagaaggatatgtggctcgtgttcaatgaatgtagatggtactaatacattagcttgtttaaaatcaattgaagaagttaaaggagatgtgtatatttatcctcttcctcacatgtctgtaataaaagatttggttccagatctatcaaacgcatataaacaactagcttctgtaaaaccatggcttcaaactaaagataaaagtattgaaggaaaagaaagagtccaaagtccagaagatagagaaaaacttgatggtttgtgggaatgtgtactttgtttttcatgttcaacatcttgtccttcttattggtggaatggagaagattatttaggccccgcaacattgttacaggcttatagatggatagcagatagcagagatgaacaccgcaaagaaagattagaagaattagaagattcttttaaattatatagatgtcatacaattatgaattgcacaaaaacatgcccaaaaggccttaatcctgcaaaagcaattggtgctataaaaaaattgcaattagaaaatccttaa

SEQ ID NO: 200340 - DNA, 481 bp, Unknown
  Bacterial polypeptide expressing nucleotide sequence isolated from the Sargasso Sea
gtttattactcagctacatctgctcatacatgtactggagatggcaatgcgatggttcttagagcaggcttacctttacaagacatggaattcgtacaatttcatccgacgggaatttatggagttggatgtttaataactgaaggagttagaggagaaggtggatttttagtaaatggtaaaggtgaaagatttatggaaagatatgcacctaatgcgaaagacttagcttctagagacgtggtaagcagatcaatggaaatggaaatcaacgaaggtagaggtgcgggaaaagataaggatcatataaaccttcatttagatcacattgataaaaaagttatagatgagagattacctggtatttctgaggcagcaaaaacttttgcaaatgttgatgttagcaaagagcctattccagttgttccaacagttcattacaacatggaaggaattcctacaaattataaggcggaggtgc

SEQ ID NO: 200341 - DNA, 775 bp, Unknown
  Bacterial polypeptide expressing nucleotide sequence isolated from the Sargasso Sea
tttgcaggtgtagatttaacaaaagaaccaattcctgtattacctactgtacattataatatgggaggaattcccacaaatcataggactgaagtgctccgcccaacagaaaataatcctgataaaatatgtgagggattgttagcagttggtgaggcagcatgtgtatctgtccatggagctaaccgtttaggaacaaactctttaattgatcttgtggtatttggaaaagcctcaagtattacagctaaagaaaaagtgaaacctaacagcaagcctgttgatattaattcaagcacacttgaccccatattagatcgttttgataaaattcgatttaataaaggggatagttcaactggtgaagtgagaacttctatgcaaaaagttatgcaagaaaaatgtgctgtttttagaacggaggaacttatttcaaaaggtattgaggaatttagtcatatagaaagctcaatggataacatagacgttaaagataaatccatgatctttaatacagacttaactgagtctcttgagttacataatttaatggcacaatctaaggttactcttcattctgctctaaacagaacagaaagcagaggagcgcatgcaagagaagatcatcaagaaagagatgattctagctggctggtccattctttatcatggcttgataataaaggtggtgttagaatgggaacacgacctgtaaacatgaataccttaaccaatcatgttcagcctatccctccaaagaaaagagtatattaaa

SEQ ID NO: 200342 - DNA, 938 bp, Unknown
  Bacterial polypeptide expressing nucleotide sequence isolated from the Sargasso Sea
cttcttcgtggagtggatggcgctggacctgatccgcaacacccagggcgatgtggtcggcgtgaccgcactggaactggaaaccggcgatctgtacgagctgcatgccaaggccgtgctgctggccaccggtggtgccggccgtatcttccaggcgtcgaccaacgccttcatcaacaccggtgacggcctgggcatggctgctcgcgccggcattcctctgcaggacatggaattctggcagttccaccccaccggcgtggccggtgccggcgtgctgctgaccgaaggctgccgcggcgaaggcgccattctcttgaacagcgaaggcgagcgcttcatggagcgttacgctcccacgctgaaggatctggccccccgtgacttcgtgtcgcgctccatggaccaggaaatcaaggaaggtcgcggctgcggtcccaacaaggactacatcctcatgaagctggaccacctgggtgccgaaaccatccgcaagcgtctgccttccgtggaggaaatcggccacaacttcgccaacgtggacatcaccaaggaacccatccccgtggttcccaccatccactaccagatgggcggcatcccgaccaacatcaacggtcaggtcgtggtctgggacggtcagcagaacaatgtggtgggcggcctctacgccgtgggcgaatgctcgtgcgtgtccgtgcacggcgccaaccgcctgggcaccaactcgctgctggacctgctggtcttcggcaagtctgccggcaagcacatcgtggaattcgtcaacggcttcggcgctcaccacgaagtgcccgccgacggcgccgagcgcaccctggcccgcctcaacagttgcaggactcaaggacggcacctacgcccaggacgtcgccggcgagatccgcaaatcatgcagacgcatgctggcgtgttcc

SEQ ID NO: 200343 - DNA, 294 bp, Unknown
  Bacterial polypeptide expressing nucleotide sequence isolated from the Sargasso Sea
agcttgatggttcagacgaatgtattttgtgtgcctgttgctcaactagttgtcctagctattggtggaatagtgataaatatttgggcccagctactttaatgcaagcttatagatggatagctgattctcgtgataataaaacaaacgaaagactcaagcatcttgaagacacttttaaactttataaatgtcatacaattatgaattgcacaaacgcttgtccaaagggtttaaatccagcaaaacaaatcgcaaaaataaaatcattaatagtatctaataaaatttaga

SEQ ID NO: 200344 - DNA, 887 bp, Unknown
  Bacterial polypeptide expressing nucleotide sequence isolated from the Sargasso Sea
atagaacatttatgcaaagaagctcccaaagcagtaattgaattagaaaaatatggtgttcctttcagtagaacaaaagatggaaagatttatcaaagagcttttggtggtatgacaaaaaattatggtaacgattcagttcaaagaacttgtgcagcagcagatagaactggccatgcaatacttcatactttatatggacaagctttaaaacataatactgaattttttatagaatactttgcactagatttattaatgaagaatggagaatgcaaagggttaatagcttggaacttaaatgacggtacaattcacaggttcagatctcacataactatattggctacgggaggatatggtaaagtttattatacagccacttccgcacacacttgtactggagatggtaatggaatggctttacgtgccggactgccacttcaagacatggaatttgtacaattccaccccacaggaatttatggagttggtactttaatatctgaaggagtgcgaggagaaggtggtttcctactaaattctaaaggagaaagatttatggaaagatatgctccaaaagcaaaagatttagcctcaagagatgtagtaagcagatcaatagctgttgaaataaatgaaggtagaggtgttggaaaaaataaagattatgtaaatcttcacttagatcatttagatccaaaagttattgaagaaagattacctggtattgcagagtcagccaaaacattttgtgaggtagatgttcgaaaagatcccattccagttgtacctaccgtgcactacaatatgggaggaattccaacaaattataaagctgaagtattaaccttaaatggaaaagaaactacagttcctggattatg

SEQ ID NO: 200345 - DNA, 891 bp, Unknown
  Bacterial polypeptide expressing nucleotide sequence isolated from the Sargasso Sea
ggcggtgtattgcgtgataaagatggccatcgttttatgccagactatgaacccgataaaaaagagctcgcctcgcgcgatgtggtttctcggcgtatgactgaacatatgcgcaaaggaaaaggggtcaacagtccatacgggccacatttatggctcgacatcactttgctgggcaagaaacacattgataccaacttacgtgaagtcaaagagatctgtcagcactttttaggcattgatcctgtgacagattggatcccggtaaggcctacacaacattattctatgggcgggatccgtaccaaacctaatggtgaaagcccgcaattagcagggctctttagtgtaggtgaagccgcgtgttgggacatgcatggttttaatcgtttgggcggcaactcgttggcagaagctgtggttggcggaatgattattggggagtatgttgccgatttctgccagcaaacaaccttgaaagtggatactcgcttaattgaatactttggccagcaaattgaagcggaaataagccagcttatagagggaaatggtaccgagaaagccataacattgaagcaagaaatgcagcaaatcatgatggattacgttggcatttttcgtaatggtactcaactcgaacaagctgtgaatgagttaagtgagctgcttaagcgttcacgaaatattggcttaagttgtaaaaaacgtcatgcaaaccctgaacttgttgatgcattaagggtaaagcggatgcttaaagtggccttaacggtagccagtggtgcttatgctcgtaccgaaagtcgaggcgcgcactcgcgtgaagatatcctgagcgaaatgaccgcgactggctcaatcgtacactcagttcatggcctgatgaaa

SEQ ID NO: 200346 - DNA, 514 bp, Unknown
  Bacterial polypeptide expressing nucleotide sequence isolated from the Sargasso Sea
atgaaatatgaaattgaataccatgattatgacgttgtagtcgttggagccggaggttctggactacgagcaactgtcggagctgttgagaatggttataagacagcttgtatttcaaaagtttttccaactagaagtcatacagtcgctgcacaaggtggaatatccgcagctttaggtaatatgggtgatgatgattggcgctggcatatgtatgatactgttaaaggatctgattggcttggtgaccaggatgctatcgaatatttgtgcaaaaatgctccaaaagctgttctcgaattagagaactatggagtgcctttcagtagaactgaggatggtaaaatatatcaaagagcatttggtggtatgacaaaaaattacggtgagggcactgctcaaagaacatgtgctgcagctgacagaactggccacgcaattattcatactttatatggtcaatcacttaaacatggagttgactattatattgagtactttgctcttgatctaa

SEQ ID NO: 200347 - DNA, 607 bp, Unknown
  Bacterial polypeptide expressing nucleotide sequence isolated from the Sargasso Sea
tgtatccgtgcatggagcaaatagattaggctcacactcattaatagatttagtagtttttggaaaatcggcagccaagagggctgcagaattagtaaaaccaaacttgcctcacgatgaaatttctaaaagtgaaactgataaatctcttgatagatttgataaattaagaaatagcaatggatcaaatgggactgcagaacttagactgtccatgcaaaaaacgatgcaagaaaaatgcgcggtatttagaactgaaaaaaccttaaaggaaggagttaatgaaattcagaaaccttttgaaggaatgaagtctatatcggttaaagataaatctttaatttttaatacagatttaatggaaacccttgagtttgataaccttatacgccaggctattactactatggaatcagcatatcacagaaaagaaagccgaggcgcccatgctagagaagattttcctaaaagagacgatgaaaattatatgaaacacacattaagttggcataatggcaaagaagttaaaattaattatcgaaaggttaatttatcaacattaacaaatgatgttcaaacttttccaccaaaagaaagagtttattaa

SEQ ID NO: 200348 - DNA, 580 bp, Unknown
  Bacterial polypeptide expressing nucleotide sequence isolated from the Sargasso Sea
tatgactgcatacaaaattatagatcatgaatatgatgttgttgttctgggcgctggtggctcaggtttaagagcggcagttggactttccgaagccgggctcaaaactgcatgcatttcaaaagtatttccaactagaagtcatacttctgctgcacaaggaggtatttctgcagcattaggaaatatgggcgaagatgattggagatggcacatgtatgatactgtcaaaggttctgattggctaggagaccaagatgccatcgagtacttgtgcaaggaagctccaaaggcagtaattgagctagaaagatatggtgttccatttagcagaactaaagatggaaaaatttatcagcgagcttttggaggaatgactaaagactacggaaatgattctgtacaaagaacttgcgcagcagcagataggactggtcacgcaatacttcatacattgtatggacaagctttaaaacacaatactgaattttttatagagtactttgcattagatctactaatgaaaaatggagaatgtaaaggcctagtagcttggaacctaaacgacggtacaattcac

SEQ ID NO: 200349 - DNA, 511 bp, Unknown
  Bacterial polypeptide expressing nucleotide sequence isolated from the Sargasso Sea
catataacaattatagcaagtggtggatatggaaaaacatattactcgtctacatctgctcatacttgtaccggcgatgggaatgctatggtattaagagccggtttacctttacaggatatggaatttgtacaatttcaccccacaggaatttatggacatggcactttaatatctgaaggagttcgaggtgaaggaggatatttattgaattccaaaggcgaaagatttatggagagatatgctccaaaagctaaagatcttgcgtctagagatgttgtaagtagatcaatagcgattgaaattaatgagggaagaggagttggaaaagaaaaagatcatgtacatcttcatttagatcatttagatccagaagtaattgaaaaaagacttccaggaatttcagagtcttcaagattatttgccgacgttgatgttacaaaagagccaataccagttgttcctacagtgcactataatatgggtggtatcccaacaaattacaaagccg

SEQ ID NO: 200350 - DNA, 901 bp, Unknown
  Bacterial polypeptide expressing nucleotide sequence isolated from the Sargasso Sea
ccagccatgcgagcttgcgcagcagcagatagaactggtcatgcactacttcatactctttaccaacaatccttgaagcacaaggtaaattattttgtagaatattttgtattagatttattaaaagatgttgatggaaaatgttgtggagctgtagcttggtgcttagaagatggatctatccatgtttttcattcacatataactatacttgcaacagggggatttggaaaaacttttttatcttcaactagtgctcatatttgtactggggatggtaatgctatggcattaagaagtggtctgcccttatcagatatggaattcattcaatttcatcccacaggattatatggagtaggagtgttaattactgaaggagctagaggtgaaggtggttatttaaccaataataacggtgataaatttatggaaaaatatgccccaggtgtaaaagatttagcttcaagagacgtagttagtagagctattacagtagaggttaataagggtaggggctgtggtcccgaaaaagatcacgtttttttgcatttagagcatttggaatcaaaatttcttaataaacgcttacctggagttttagagcatgcaaagattttttcaaatatagatgcaacttctgaacctataccagtaattccaacagttcactataatatgggaggtataccaacaaactataggacagaagttatttcatcagaaaaacaagataaagataaaatatacgaaggtttgttggcagtaggtgaggcagcatgcgtttctgttcatggtgcaaatagacttggaactaattcattaatagatttagttgtttttggaaaggctgctagtataactgcaaaagaaaaaattaaagattataaatcttacacaa

SEQ ID NO: 200351 - DNA, 825 bp, Unknown
  Bacterial polypeptide expressing nucleotide sequence isolated from the Sargasso Sea
tatgagtgaatacaatgttatagatcatgaatatgacgtcgttgttctaggggcaggtggttctggcttgagagctgcagttggtctaagtgaggcaggattaaaaacagcatgtatttcaaaagtttttccgacaagaagccatacttctgctgctcaaggaggaatatctgcggcattgggaaatatgggtgaagatgattggagatggcatatgtatgataccgttaaaggatcagattggttaggtgatcaggactgtattgaatatttatgtaaagaagcaccaagagctgttttagaattagaaagatatggagttccatttagtcgtactaaagatggaaaaatttatcaaagatcttttggtggaatgacaaaaaattatggtaatgagactgttcaaagaacttgtgcagcagcagacagaacaggtcatgccatacttcacactatgtatggccaagcattgaaacataatactgaattttttattgagtattttgctttagatctattaatgaaaaatggagaatgtaaaggcttaatagcttggaatttaaatgatggaacaattcacagatttaggtctcatataactataatagcaacgggtggatatggaaaaacatattattcatcaacctctgctcatacatgtaccggagatggtaatgcaatggctttaagagcaggattaccattgcaagatatggaatttgttcagtttcatcctacaggaatttatggacatggaactttaatatctgaaggagtcagaggtgaaggtggttacctcctaaaattcaaaggcgaaagattcat

SEQ ID NO: 200352 - DNA, 904 bp, Unknown
  Bacterial polypeptide expressing nucleotide sequence isolated from the Sargasso Sea
tagaagtcacaccgttgcagcacaaggtggaattggtgcttcactgaataacatgggtgaaaatgatagttggcaatttcatatgtatgacactgtaaaaggatctgattggttaggtgatcaagatgcgattgaatatatgtgtaaagaagccataccttcagttacagaattagaaaactttggagttccgttttctcgtacagaagaaggtgaagtttatcagcgtccttttggtggacataccctagattacggaaaaaaaatggctagaagagcttgtgctgcagctgacagaaccggtcacgcaattttgcatactctctatcaacaatgcttaaaacatcaagctgaattttttgtagagtatatagctcttgatttgttaatggatgataatggtaaatgtgtaggtgttttagctttatgtatggatgatgggaaaattcataggtttcgcggtcatcaaactgtattagctactggtggttatggacgtgtttacttttcttgtacctcagcacatacatgtactggagacggtaacgctatggttttgagagccggtttaccactgcaggatatggaatttgtgcaatttcatccaacgggtgtttatggtgctggagttctaattacggaaggctcacgaggagaaggtggttatctaacaaattctgaaggcgaaaggtttatggaaagatatgctcctacggctaaagacctagcaagtagagatgttgtatctaggtcaatgacaattgaaattaatgaaggtagaggtgtaggacctaataaagatcatatttttatgcatcttgaacatattgatcctgcaactttacatatgcgattgccaggaataagtgaaactgcaaaaatatttttgtggtgtcgatgttaa

SEQ ID NO: 200353 - DNA, 709 bp, Unknown
  Bacterial polypeptide expressing nucleotide sequence isolated from the Sargasso Sea
aatgaattacgaaattgaatatcatgattatgacgttgttgttgttggagcgggtggctcaggattaagagccacagtcggagccgttgaaaatggctataagacagcttgtatttcgaaagtatttccaacaagaagtcatacagtcgctgctcaaggcggtatatcggcggcgctaggaaatatgggtgacgatgattggcgttggcatatgtatgatacagttaaaggctcagattggcttggtgatcaagacgcaattgaatatttgtgtaagaatgcgcccaaagcagttttagaattggaagattatggagttccatttagtcgaactgaagatggtaaaatctatcagagagcttttggtggaatgactaaaaactatggagaaggaactgctcaacgaacatgtgcggcggctgacagaactggtcacgccataatacacacattatacggtcaatcacttaaacatgatgttgactattatatagaatattttgttcttgatttactcatggttaatggggaatgcagaggtgtagttgcgtggtgtttagaggacggtaaactgcatgtatttaacgcaaaacaaactgttctagcttctggtggctatggaagagtttacttttctgcaacgtcagcacatacatgtactggcgatggcaatgctatggtactaagggcagggctcccccttcaagat

SEQ ID NO: 200354 - DNA, 910 bp, Unknown
  Bacterial polypeptide expressing nucleotide sequence isolated from the Sargasso Sea
aaacaatgttgaattctttattgaatattttgtacttgatctaatttcagatgataatggaaattgtataggggcagttgcatggtgtttggaagacggatctattcatcgttttttatcccaccaaactatccttgcgactggtggttatggaagggcttatttttcatcaactagtgcacatatttgcacaggtgacggaagtgcaatggctttaagacaaaacttacctctatctgatatggaatttatacaatttcatcctactggagtctatggtgcaggagttttaatcacagagggtgcacgaggtgaagggggttatttaacaaatagtgacggtgaaagatttatggaacgctatgcacctaatgcaaaggatttggcttctagagatgtagttagcagggcgatgacaatggagatcagtgaaaatagaggttgtgggaaaaacgcagatcatgtacttcttcatcttgaacatattgatcctgacacattgcacaaaagattgcctgggatttcagagacagcaaaaatctttgctggtgttgatctgaccaaagatccaataccagttttacctactgttcactataacatgggtggcataccaacaaattatagaactgaggttataaaaccaacaaatatgaaccccgataatatatgcgaaggcctaatggctgtaggagaggctgcttgcgtatctgttcatggagctaataggcttggtactaactctttgattgatttagtagtttttgggaaagcagcaagcttaacatgcaaagaaaaaacaaaaccaaattcaaaaaaaattgaaataagtaaatctaagacagatgatattattcaaagatttgatgaaattagacatagcaaaggtaattctaccacaggtgagctt

SEQ ID NO: 200355 - DNA, 769 bp, Unknown
  Bacterial polypeptide expressing nucleotide sequence isolated from the Sargasso Sea
tatgagcaaatataaaattatagatcatgaatatgatgttgtagttctaggagccggaggatcaggtttaagagctgctgttggactttcagaagcaggtttaaaaactgcatgtatatcgaaagtgtttccaacaagaagtcatacctcagcagcgcaaggaggtatatctgctgcccttggaaatatgggagaagatgattggagatggcacatgtacgatacagtcaaaggttctgactggctaggagatcaagatgcaatcgaacacctttgtaaagaggcacccaaagctgttatcgaattagaaaaatatggtgtaccgtttagtagaacaaaggaaggaaaaatttatcaacgtgcttttggaggtatgaccaaaaattacggaaatgactcagtacaaagaacttgtgccgcagctgatagaacgggacacgcaattttacatactttatatggacaagctttaaaacataataccgaatttttcatagagtatttcgcattagatcttttaatgaaaaacggagagtgcaaaggattaatagcttggaatttaaatgatggaactattcacagatttagatcacatataaccatcatcgcaactggcgggtacggcaaagtttattatactgcaacatctgctcatacttgcactggtgatgggaatgctatggttttgagagcaggactcccattacaagatatggagtttggttcatttcatcctacaggaatttatggagttggcacgttaatatca

SEQ ID NO: 200356 - DNA, 587 bp, Unknown
  Bacterial polypeptide expressing nucleotide sequence isolated from the Sargasso Sea
agatggagcttgtaaaggattaatagcttggaacttaaatgacggcacaatgcacagatttagatctcatataacaataattgctacaggaggttatggaaaagtttactattcagcaacttctgcacatacttgtactggagatggaaatgcaatggtattaagggccggtcttccattgcaagatatggaatttgtacaatttcatccaactggaatttatggacatggaactttaatttcagaaggtgtgagaggagaaggtggttatttattaaattcaaaaggagaaagattcatggagcgttatgctcctaaagctaaagacttagcctctagagatgtggttagtagatctattgctattgaaattaatgaaggaagaggtgttggcacagaaaaagatcatgttcatcttcatttagatcatttagatccaaaagtaatagaaaaaagattgccaggtatttcagaatcttcaagactatttgcaaatgtagatgttactaaagaaccaatacctgtagtaccaacagttcattacaatatgggaggtattcccacaaattataaagcagaagttctta

SEQ ID NO: 200357 - DNA, 601 bp, Unknown
  Bacterial polypeptide expressing nucleotide sequence isolated from the Sargasso Sea
atgagcgcatataaaattatagatcatgaatacgacgtagtcgttctaggtgccggtggctctggtttgagagcagcagtagggctttctgaagctggattaaaaactgcttgcatttcaaaagtgtttccaacaagaagccatacttctgcggctcaaggaggaatatcggcagctcttggcaatatgggtgaagatgattggcgatggcatatgtacgataccgttaaaggctctgattggttaggagaccaagatgccatagaacatttatgtaaagaagctccaaaagcagtaatcgaattagaaaaatatggtgttccatttagcagaactaaggatggaaaaatttatcaaagagcttttggtggaatgacaaaaaattacggaaatgactctgttcaaagaacctgtgcagcagcagatagaacaggtcacgcaatacttcacacattgtatgggcaggctttaaaacataataccgaattttttatagaatattttgcattagatcttttgatgaaaaatggagagtgtaagggtcttatagcttggaacttgaatgatgggactattcataggttcagatctcacataacta

SEQ ID NO: 200358 - DNA, 939 bp, Unknown
  Bacterial polypeptide expressing nucleotide sequence isolated from the Sargasso Sea
taatggcgagggagcacctgctatgagagcttgtgcagcagctgatagaacgggacatgctttactgcatacactttatcagcaatcactaaaaaataatgtagaattttatattgaatattttgttttagatttaatttctgatgatcaaggtaattgcattggtgtggtaacatggtgtttagaagatggatcaatccatcgatttttatctcatcaaacaattctagctactggtggatatggaagagcttacttctcatctacgagtgctcatatatgtactggtgacggtagtgcaatggctttaagacaaaacctacctcttgctgatatggaatttattcagttccatccaactggagtttatggtgcaggagtgttaatcactgagggagcaagaggagagggtggatatttaactaatagtgatggtgaaagatttatggaaagatatgctccaaatgcaaaagatctagcatcaagggatgtagtaagcagagcaatgacaattgaaattagtgaaaatcgaggttgtggagacaatgccgatcatgtgctccttcatcttgagcacattgatgccgatacactgcataaaagattgcctggtatttcagaaactgcaaaaatatttgccggagttgatctgactaaagaaccaataccggttcttccaacagttcattataatatgggtggtataccgacaaattatagaacagaagttctaagaccaactaatgaaaatccagataatgtatgtgaaggtttaatggctgttggtgaggctgcatgtgtttctgtacacggtgcaaatagattaggaacaaattcattaattgatcttgttgtttttggcaaagcagctagtctaacatgtaaagaaaaaataaaaccaaattctaaaaaaattgaaattagtaaatcaaaaacaga

SEQ ID NO: 200359 - DNA, 586 bp, Unknown
  Bacterial polypeptide expressing nucleotide sequence isolated from the Sargasso Sea
tatgaaagcatataaaattatagatcacgaatacgatgttgtagtcttaggagcaggtggttcaggattaagagctgctgtgggactctcagaagctggtcttaaaactgcttgtatatcaaaagtttttccaacaagaagtcatacgtcagctgcacaaggtggaatttcagcagctttaggaaatatgggtgaagatgattggagatggcatatgtacgatacagttaaaggatctgattggttaggagatcaagatgcaatcgagcatttatgtaaagaagctcctaaagctgtaattgaattagaaaaatacggtgttccatttagcagaactaaagagggaaaaatttaccagagagcatttggtggaatgacaaaaaattatggaaatgagtctgtacaaagaacttgtgcagccgcggatagaactggccatgcaatacttcacactttatatggtcaagctttaaaacataatacagaattttttatagaatactttgctttagatcttttaatgaaagatggtcagtgtaaaggtttgattgcttggaatttaaatgatggaacaatacacagatta

SEQ ID NO: 200360 - DNA, 726 bp, Unknown
  Bacterial polypeptide expressing nucleotide sequence isolated from the Sargasso Sea
aatggttgaattgacattaccaaaaaactcaaaaatagtagttggcaaaagttggcctaagccagctagtgaagaagatttgaaaacctttaaaatctacaggtatgatccagataagtcaggaaatccacgactagatacatattttgtcgatatgggtgactgtgggccaatggtactagatgcattaataaagataaagaatgaaactgatcctactcttacctttcgaagatcatgtcgagagggtatttgtgggtcatgctctatgaatatagacggtgttaatactttagcatgtttaaagggcttaaacgaaatcaaaaatgaagtgcgtatatacccgttgccgcacctgccagttattaaagatttgataccagatttatcaaacttttataatcaacatgctagtattatgccttggctggagacgaaaacggatcttcctaaccaagagtggcgtcaatcaatagaagaccgaaaaaaattagacggactatacgagtgtgttatgtgtgcttcttgctcaacctcgtgtccgagttattggtggaatggggacaaatatttgggaccagctgctctacttaacgcatacagatggatacttgacagccgtgataacgctacaaaagagagattagatgatttagaagatccattcaaactttaccgatgccatacaataatgaactgtaccgatacgtgtccaaagggtctcaa

SEQ ID NO: 200361 - DNA, 679 bp, Unknown
  Bacterial polypeptide expressing nucleotide sequence isolated from the Sargasso Sea
tcctcgaagccaagacgacgctttcgccacgggcggtgcaggccggatctacgcggcttccaccaacgccttcatcaacacgggtgacggcctgggcatggccgcgcgcgcaggcgttccgctggaagacatggagttctggcagttccacccgaccggcgtggccggcgcaggcgtgctgatcacggaaggcgtgcgcggcgaaggcggcatcctgcgtaacaaggacggcgagcgcttcatggagcgctatgccccgacgctgaaggatctggcgccgcgtgacttcgtgtcgcgctcgatggaccaggaaatcaaggaaggccgcggctgcggcccgaacggcgactacgtgctgctcgacctgacgcacgtcggcgccgagaccatcatgaagcgcctgccgtcgatccgcgaaattggcctgaagttcgccaacgtcgacgccatcaaggagccgattcccgtggtgccgaccatccactaccagatgggtggcattccgacgaactatcacggtcaggtggtggtgccgaagaacggcaacccgaacgaggtcatcaacggtttctacgcgatcggcgaatgctcgtgcgtgtcggtgcacggcgcgaaccgcctgggcacgaactcgctgctcgacctggtggtgttcggccgttcggcgggcaaccacatc

SEQ ID NO: 200362 - DNA, 784 bp, Unknown
  Bacterial polypeptide expressing nucleotide sequence isolated from the Sargasso Sea
tgcaaaaatttttgcaggtgtagatttaacaaaaaaaccaataccagttctaccaacagtacattataatatgggtggtattcctacaaactatagaacagaggttcttagaccaacgaatgacaatcctgacaatgtatgtgaaggtcttatggcagttggagaagcagcatgtgtttctgttcatggcgctaatagactaggaacaaattcactaattgatctagttgttttcggaaaagcatcaagtgaaacatgtaaagaaaaagtaaaacctaattcaaaaaaaattgaaattagcaaatctataaccgaaggaattattgatagatttgacaagattaggtatagcaaaggagattctacaactggagaattaagaacttcaatgcaacatattatgcaaaaaaaatgtgcagtatttagaactcatgaattaatttctgatggtataaatgaattccagaaagttgaaaactcaatggactcaatagatataaaagacagatcactaatatttaatacagatcttgtagagtctttagaattacataacttaatggctcaatcaaaagttacacttcattctgctttaaacagaactgagagtagaggagcacatgcccgtgaggattatcaagaaagagatgataaaaattggcttgttcactcattagcttggcttaaagataatggggatgttaatatgggaaaaagagcagtgcatacgaatacattaacgaatcatgtacaacctattccgccaaaaaaacgcgtatattga

SEQ ID NO: 200363 - DNA, 906 bp, Unknown
  Bacterial polypeptide expressing nucleotide sequence isolated from the Sargasso Sea
atatgatgcagaatttttcgttgagtattttgctttggatttgttgatggatgacaacggtgcatgtaaaggagttgttgcactgagcttagaggatgggaaaattcacaggtttagagctcataagacagttttagcaactggtggatatggaagagtatatttttcatgtacttctgcacacacttgtacaggagatggaaatgctatggttttaagagccggactcgctttgcaagatatggagtttgtacaatttcatccaactggagtttatggagcaggtgttttaataactgaaggagctcgaggtgaaggtggttacctaaccaactctcaaggggaaaggtttatggaaaggtatgctccaacagcaaaagatttggctagcagagacgttgtttcaagagcaatgactattgaagttaatgaaggaagaggtataggtcaaaacaaggatcatataaatttacatttgcatcatatagatcctgataccctctcaatgagattaccggggataagcgaaacagcaaaaatattttgtggtgtagatgtaacaaaagaacctatacctgtgttaccaacggtacattataatatgggaggtatacctactaattttcatggagaagtaatttgtccaaaaaatggtgataaagatgcagttgttccgggcttgatggctattggtgaagcagcatgtgtatctgttcacggtgcaaacaggttaggtactaattctcttttagatatagttgtttttggaagagcagctgcaatgagaacagacgacaccttaaaaaaaggacttactcattctgacattaataaatctgctacagataaaattcttgatagattggataaaactttgcatgcaaaaggacaaagttcagttggaga

SEQ ID NO: 200364 - DNA, 628 bp, Unknown
  Bacterial polypeptide expressing nucleotide sequence isolated from the Sargasso Sea
gaaggactttatgccgctggagaagttgcatgtgtatctgtgcatggaggaaatagattgggcggtaattctttattggatttagttgtatttggaagagcagctggaatttttattgaagattcaatgaaacaaggagttgacttaaaacctgcttcaagtggagatttagacaaagctctctctagactcaacaaactaaatgcttctcaggatggacatcaagcaacagatgtaaaaaaagctatgcaagaaaacatgcaattaaattttggagttttcaggcgtggtgatttgatggaaaaaggaattgaagaactggcagaagcaagaaatcagatcgaaaatattcatttaaaagataaatcagccgccttcaatacagcgcgaatagaagcattagaaactcaaaatttatttgaagttgctgaagcaacagctatcactgctaatgagagaaaagaaagcagaggcgctcatgctagagatgattttcctgaaagagacgatgatgaatggctcaaacattcaatttattattcagaagacaagtcagtaagcaaaagagatgtaaactttagacctaagcaagtccaagcttttcaacctatagtgagaacttactaat

SEQ ID NO: 200365 - DNA, 898 bp, Unknown
  Bacterial polypeptide expressing nucleotide sequence isolated from the Sargasso Sea
tatgtatgataccgttaagggctctgactggttgggagaccaggatgcaattgaatatttatgcaaagaggcgccgaaggcggtaatagaactagaaaggtatggggttccttttagtagaacaaaagatggaaaaatttaccaaagagcttttggaggaatgaccaaagattatggaaatgaatctgtccaaagaacttgcgcagcagcagacagaactggtcatgcaatacttcacacattgtatggtcaggctttgaaacataatactgaattttttatagaatatcttgcattagatttgttgatgaaaaatggagaatgtaaaggtttgattgcttggaatttaaatgacggaacaattcatagatttagatctcatataactatattggctactggcggttatggtaaaatttattatacagcaacttctgcacacacttgtacaggagatggaaatggaatgattttacgtgcaggattaccacttcaagacatggagtttgttcaatttcatcctacaggaatttatggaaatggtactttaatatccgaaggagttcgaggagaaggtggttttcttttaaattctaaaggtgaaagatttatggaaaaatatgctcctaaagctaaagatttagcatcaagagatgttgttagcaggtcaattgctatcgaaattaatgagggtcgaggtgtgggaaaaaataaagatcatgtaaatttacacttggatcatattgatccaaaaattatagaaaaaagattgccgggtattgctgaatcggcaaaaactttttgtgaagttgatgttacaaaggatccaattccagttgttccaactgttcattataatatgggtggaatcccaacaaactataaggctgaagtataa

SEQ ID NO: 200366 - DNA, 805 bp, Unknown
  Bacterial polypeptide expressing nucleotide sequence isolated from the Sargasso Sea
atgagtgaatacaatattatagatcatgaatatgacgtcgttgttctaggcgcaggaggttctggcttaagggctgcagttggtctaagtgaggccggattaaaaacagcatgcatttcaaaagtttttccaacaagaagtcatacttctgctgctcaaggaggaatatcagcagcattaggtaatatgggagaagatgattggagatggcatatgtatgataccgttaaaggatcagactggttaggtgatcaagactgtattgaatatttatgtaaagaagccccaagagctgttttagaattagaaagatatggagttccatttagtcgaacaaaagatggaaaaatttatcaaagatcttttggaggaatgacaaaaaattatggcaatgagactgttcaaagaacttgtgcggcagcagatagaacaggtcacgctatacttcacactatgtatggccaagcattgaaacataatactgaattttttatcgaatattttgccttggatctattaatgaaaaatggagaatgtaaaggtttattagcttggaacttaaatgacggaacaattcacagatttagatctcatataaccataatagcgacgggtggatatggaaaaacatattactcatcaacttctgctcatacatgtactggagatggcaatgcaatggcactaagagcgggtttgccattacaagatatggaattcgtgcagtttcatccaacaggaatttatggacacggaactttaatatcagaaggagttagaggagaagggtggttacccttgtaaa

SEQ ID NO: 200367 - DNA, 748 bp, Unknown
  Bacterial polypeptide expressing nucleotide sequence isolated from the Sargasso Sea
gatcatgttctccttcatcttgagcacattgatgctgatacattacataaaagattacctggtatttcagaaactgcaaaaatatttgccggagttgatttgactaaagatccaataccagttcttccaacggttcattacaatatgggcggtataccaacaaattatagaacagaagttctaagaccaacaaatgagaatccagataatgtatgtgaaggtttaatggctgttggtgaagctgcatgtgtttctgtacacggtgcaaatagattaggaacaaattcattaatcgatcttgttgtttttggtaaagccgctagtctaacatgtaaagaaaaagtaaaaccaaattctaaaaaaattgaaattggtaaatcaaaaacagataatattattgagcgatttgataagatcagaaacagcaaaggaaactctacaactggagaacttcgcacttctatgcaacatataatgcagcaaaaatgcgcagtatttagaacacatgatctcatatcaaaaggtatcgaagaatattcaaaagttgagagctcaatagatgacatagatattaaagacaaatcattaatctttaatacagacttggtcgaagctttagagttacacaatttaatggcacaatcaaaagttactcttcattctgcgttaaatcgaactgaaagtagaggcgcacatgcaagagaagattataaagaaagagatgataataattggctagttcattctt

SEQ ID NO: 200368 - DNA, 823 bp, Unknown
  Bacterial polypeptide expressing nucleotide sequence isolated from the Sargasso Sea
tatgacaaaaaactacggtaatgaatcagtccaaagaacttgtgcagctgctgaccgtactgggcatgcgatactgcacacattatatggacaagctttaaaacataatacagaattttttatagaatactttgctttagatcttttaatgaaagatggtcagtgcaaaggtttgatcgcatggaatttaaatgatggaacaatacatagatttagatcacacataactatcctagctacaggtggttacggtaaagtttattacacagctacttcagcccacacatgtacaggggatggtaatggtatggcactcagagcaggattaccactacaggatatggaatttgtgcaatttcatccaactggaatttatggtgttggtacactaatttctgaaggtgtaagaggagaaggtggatttttactaaactctaaaggcgaaaggtttatggaaaagtatgctccaaaagcaaaagatttagcttcaagagatgttgtaagtagatcgatagcagttgaaattaatgaaggtagaggagttggtaaaaataaagattatgtaaatttacacttagaccatcttgatccaaaagtaatagaggaaagattgcctggaattgcagagtcagcaaaaacattttgtgaagttgatgtaagaaaagatccaataccagtagttccaactgtacattataatatgggtgggataccaactaattataaagctgaagttttaacattaaatggaaaagagtctacagttcctggtttaatggctataggagaagcagcttgtgtttcagttcacggtgcaaacaga

SEQ ID NO: 200369 - DNA, 911 bp, Unknown
  Bacterial polypeptide expressing nucleotide sequence isolated from the Sargasso Sea
gtttcatcccacagggttatatggaataggtgttttaattactgaaggagcaagaggagaaggtggttatttaacaaacagcaataatgaaaaatttatggaaaagtacgctcccaatgttaaggatttggcttcaagagatgtagtaagcagagctattacaactgaagtaattcaaggaagaggttgtggttcagaaaaagaccatgtttttttacaccttgaacacatagattcaaaaattttacacaaaagacttcctggagttttagaacatgcaaaaatttttgtagatattgatgctacaaaagattctattcccgtggttccaacagttcattataatatgggaggaattccaacaaattacaaaacagaagtcctttctccagacgcacaaaatactgaaaaaatatgtgaggggcttcttgcgattggtgaagcagcctgtgtttcagttcatggtgcaaatagacttggcactaattcattaattgatttagtagtatttggaaaagcagcaagcattacagctaaagaaaaaattaaaagttataaaatattgtcaaaaatcgataataattatttaaataatattttgcaaagattcgactcaataaggcaaaaaaatggaaaaattaaagttggcaatgttagaattaatatgcagaaaacgatgcaaaaacattgtggggtttttagaaacaaagaaatattagaaaagggaattaaagaaatgagtaaaatttctgaatcttttaaagaaatttttatatcagataaatctatgatatttaatactgaattggttgaagctttagagcttgaaaatttactttctcagtcaatagttacacttaatttcagcataaatagaaagaaagcagaagtgcccatgctagagaagacta

SEQ ID NO: 200370 - DNA, 771 bp, Unknown
  Bacterial polypeptide expressing nucleotide sequence isolated from the Sargasso Sea
cttaactaatagtgatggagatagatttatggaaagatatgctcctaatgctaaagatcttgcttccagagatgttgttagtagagctatgacaatagaaattaatgaaaaaagaggttgtggtgaaaacgcagatcacgttctactccatcttgagcatatagatgcagacactatacataaaagactacctggtatttctgagactgcaaaaatttttgcaggtgtagatttaacaaaaaaaccaataccagttctacctacagtacattataatatgggtggtattcccacaaactatagaacagaagttcttagacctacaaatgacaatcctgacaatgtatgtgaaggtctgatggcagttggagaagcagcgtgcgtttctgttcatggtgctaatagactaggaacaaattcactaattgatcttgttgtttttggaaaagcatcaagtgaaacatgtaaagaaaaagtaaaacctcattcaaaaaaaattgaaattagtaagtctagaaccgaaggaattattgatagatttgataagattaggcataccaaaggagattcaacaacaggagaattaagaacttcaatgcaacatattatgcaaaaaaaatgtgctgtatttagaactcatgaattaatttctgatggtataaatgaattccaagaagttgaaaattcaatggactcaatagatataaaagatagatcactaatatttaataccgaccttgtagagtcactagagttacacaacttaatggc

SEQ ID NO: 200371 - DNA, 826 bp, Unknown
  Bacterial polypeptide expressing nucleotide sequence isolated from the Sargasso Sea
aggtaatgataatgatcatatcatgcttcatcttgagcatattgaacctgagatacttaataagcaattgccaggtattacagagacagcaaagatcttctgtggtgttgatgtaacacgggcaccaatacctgtattaccaactgttcattataatatgggcggcattccaaccaattaccatggtgaagtattatcaccaacagctaaagaccagcatcgtacggcccctgggctcatggctattggagaggcagcatgcgtgtctgttcatggagctaaccgtttgggaacaaactctctattagatattgttgtttttggacgcgctgctgcgcatcgtgctgttgatactatgaagccaggcgagcctttacctcctttacctgaatcagttacacaaaaagccattgatcactttgacaggattcgccattcaaaaggtgatgtctcaacagctgaactcagactggatatgcaaaaagctatgcaaaagcatgccgctgtgttccgcaatactgagatacttgatgagggtgtaaagaagctgggtgacattgcaatggatatgaacaatgtccgcatacaagataaatctttgatctggaacacagagctcattgagacattagagcttgataacttgatgggacaggcattggtaacaataagatcagcaagtgagcgtaaagaatcgcgtggtgctcatgcgcatgaggattatccagaaagagatgataaagactggatgaaacacactgtaatgtggctcgatgagaataacaatcaaaactcggatatagagacgttacattatcaacattaa

SEQ ID NO: 200372 - DNA, 283 bp, Unknown
  Bacterial polypeptide expressing nucleotide sequence isolated from the Sargasso Sea
cctgtatgaatgcattctctgcgcctgctgttccacgagctgcccgagttactggtggaattctgaccaatacctgggccctgcgaatcttctacaagcctaccgttggattgcggacagccgggatgaagccagcactgatcgggttgagtatctgaacgacagttttaagctttaccggtgccacacgatcatgaactgtacgaattcttgtccaaaaggcctaaatcccggaaaagccatcggacaaatcaagtcgcggatcgccaagagaaagacttga

SEQ ID NO: 200373 - DNA, 547 bp, Unknown
  Bacterial polypeptide expressing nucleotide sequence isolated from the Sargasso Sea
aatgagtgcttataaaataatagatcatgaatatgatgttgtggtacttggagctggagggtcaggtctaagagcagcagtgggactttctgaatctggtctcaaaactgcttgtatctcaaaagtttttcctaccaggagtcatacttctgctgctcaaggtggaatttctgcagcgttagggaatatgggcgaagatgattggagatggcatatgtatgataccgttaaaggttcagattggcttggtgatcaagatgccattgagtatttatgcaaagaagcaccaaaggcagtaatagagttagaaaggtacggagttccgtttagtagaacgagagacggaaaaatttatcagagagcttttgggggaatgaccaaagattatggaaatgatactgttcaaagaacttgtgcggcagcagatagaactggtcacgcaatacttcacacattatacggacaggctttgaaacataatactgaattttttatagagtattttgcattagatctattgatgaaagatggagaatgtaaaggttta

SEQ ID NO: 200374 - DNA, 619 bp, Unknown
  Bacterial polypeptide expressing nucleotide sequence isolated from the Sargasso Sea
gatggcagactttaccttacctgaaaattctaaagttaataaaggtaatatatttaaagctgatgaagatgctaaaaataccagaaaattcctggtatacagatatgaccctaatgacgattctaatccaagaatagacacctatgagattgatttagaccaatgcggaccaatggtgttagatgctttaattaagattaaagctgattttgatccctcgctttcatttagaaggtcatgcagggaaggaatatgtgggtcctgctcccataacattaacggtgtaaacacattggcttgtactcaacctataaaagacttaaagggggagataagagtctaccctttgcctcatatgaaagttgtcaaggatctggtcattgatcttacagatttttatgaacagtacgcttccattgagccatggttaaaaaccagttcagaaccaccagaaggggctgaacgatatcaaaccaaagatcagcaagaaaaaatagatcgaccctctgcttgcatcctctgtgcctgttgctcaactgcttgtcctagttactggtggaacggcgataagtatttaggacctgctgctttattggcatcttatagatggcttcaagac

SEQ ID NO: 200375 - DNA, 625 bp, Unknown
  Bacterial polypeptide expressing nucleotide sequence isolated from the Sargasso Sea
catggcggaatttacactacctaagaactcaaaaatcgaaaaaggcgattatttcagtgctgatgaatcggctgagaatatcaggacatttcatgtatatcgttatgatccttctgatgattcaaatcctcgtgtggatacttatgagatagatatggataaatgtggcccgatggttttggatgggctcattaaaattaaaagcgattttgatccctcattaacctttaggagatcatgcagagaaggcatttgcgggtcatgttctcacaatatcaatggcgtcaatacactggcatgcataaagccgattaaagatctaaaaggagatattcgcatttttcctctacctcacatggatgttgtaaaagatttagtggtcgacttaactaatttttatgagggttattcatcagttgagccttggctcaagtcagatactcctgctcctgaaggatcagagaggcttcaaagcaaagaagatcagaagaaaattgaccaaccctctgcttgcatcctttgtgcatgctgttcaaccagttgccccagctattggtggaatggagataaatatcttggtcctgcagcattgttggcttcatatcgttggcttcaggatagtcgt

SEQ ID NO: 200376 - DNA, 610 bp, Unknown
  Bacterial polypeptide expressing nucleotide sequence isolated from the Sargasso Sea
atgagtgcttataaaataatagatcacgaatatgacgttgttgtacttggggccggaggatcagggttaagagcagccgttggactttctgaagctggtcttaaaacagcttgcatctcaaaagtatttcctaccagaagccatacttctgctgctcaaggcggaatttctgcagcactaggaaatatgggcgaagatgattggagatggcacatgtacgataccgttaaaggctcagattggcttggtgatcaagatgctatcgaatatttatgcaaagaggcaccgaaggcagtaatagaattagaaagatatggggttccatttagcagaacaaaagacggaaaaatttatcaaagggcttttggtggaatgaccaaaaattatggaaatgatactgtgcaaagaacttgtgcggcggcagacagaaccggtcatgcaatacttcacacattgtatggacaggctttgaaacataatactgaattttttatagaatactttgcattagacctgctaatgaaaaatggagaatgtaaaggtttaatagcctggaatttaaatgatggcacaattcataggtttagatctcatataaccatattagcta

SEQ ID NO: 200377 - DNA, 781 bp, Unknown
  Bacterial polypeptide expressing nucleotide sequence isolated from the Sargasso Sea
gatggtacgatccataccatttttatctcatcaaacaattcttgctacaggtggatacggtagggcttatttttcatcaactagtgcccacatttgtactggtgatggcagtgctatggctttgagacaaaacttacctttatctgatatggaatttattcaatttcatccaacaggtgtctatggagctggggtattaattactgaaggagctagaggggaaggtggatatttaacaaatagtgatggcgaaaggtttatggagcgttatgctccaaatgccaaagatctagcatcaagagatgtagtaagtcgtgctatgacaattgaggttaatgaaaatagaggttgtggtgaaaatgcagatcatgttcttcttcatctagaacatattgatgctgatactcttcataaaagattgcctggcatttctgaaactgctaaaatttttgctggtgtagatttgactaaacaaccaatcccagtattacctactgttcattataacatggggggcatacccactaatcatagaacagaagttctccgtccaactgaagacaatcctgataatatatgtgaagggttattagctgttggtgaggcagcttgtgtatccgttcatggtgctaaccggttagggacaaactcccttatcgaccttgtggtttttggaaaagcgtctagtattactgctaaagaaaaaacaaaacctaatagtaagtctattgacattaatgtgagcactctagatccagttttagatcgttttgataaaatt

SEQ ID NO: 200378 - DNA, 586 bp, Unknown
  Bacterial polypeptide expressing nucleotide sequence isolated from the Sargasso Sea
tatggctgattttattttaccaaaaaattcaaaaatcaaagagggaaaaacatattcttttgaaggtaataaagatttaacaaaaaaattaattatataccggtgggatcctgaagggaatgaaaatcctagattagacaaatatgaaattgatttaaaaaattgtggcccaatggttttagatgctcttataaaaattaaaaatgaaattgatacaactttaacttttagaagatcttgtagagaaggtgtatgcggttcatgtgcaatgaatattgatggagtaaatacattggcttgtttaaaaccaattgaagaaattaaaaaagatattaaaatttatcctcttccccatatgcgtgttgttaaagatttggttcctgatttaacagatgcatataaacaactagagtcaataaaaccatggttgcaaaatgatgaagaaaaaaaagagaaaaatgtttctaaaaatatacaaaagccagaagatagagctaaattagatggaagctgggaatgtgttttatgtttttgttgcacaacttcttgtccaagttattggtggaatggagatgattatttagga

SEQ ID NO: 200379 - DNA, 847 bp, Unknown
  Bacterial polypeptide expressing nucleotide sequence isolated from the Sargasso Sea
tggggaagcgcctgttcagcgagcgtgcgcagcagcagatcgcactggacacgccatgctgcacacgctctaccagcaaagcttaaaacatgaagcagagttttatgtagaatatttcgcgattgatctcattatgagcgatgacggtgtttgtgagggcgtactcgcgtggaaccttgatgacggttctattcatgtgtttcgtggccaccttgtagtgttcgcatccggggggtatggaagatcttatttctcctgcacttccgcgcacacatgtactggggatgggcacggaatgattgctcgtgcgggattgcctctacaggaccaagaatttgtgcaatttcatccgacggggatttatggttcaggttgtttaatcacggagggtgcgcgcggcgaaggtggctatctttctaactcgcagggcgagcgttttatggaacgttatgcgccatcggctaaagatttggctagccgtgatgtagtctcgcgctcgatgacaatggaaattcgtgataaccggggcgtgggccctaatggcgatcacattaatctccatttggaacacttggaccccgacatgctccatgagcggttgcctgggattacagattcagcgcgcatttttgcgggtgtcgatgctaccaaagagccaataccagttttacctactgtacattataatatggggggaatacctacgaactatatgactgaggtgttgcgaccaacaaataaagacccagatgcggtagctccggggttaatggcagtcggggagtgcggttgcgcgtctgtccacggagcgaaccgtttgggaactactctttattggatcttgtag

SEQ ID NO: 200380 - DNA, 656 bp, Unknown
  Bacterial polypeptide expressing nucleotide sequence isolated from the Sargasso Sea
aggcttaattgcttggaatcttaacgacggaactattcatagatttagatctcacataacaattattgcaacaggcggatatggaaaaacatattattcatcaacatccgctcatacatgcactggtgatgggaatgctatggttttaagagctggtttacctttacaagatatggagtttgtacaatttcatcctacaggaatatatggacatggaactttaatttctgagggagttagaggcgaaggaggattcttgctaaattctaaaggagaaagatttatggaaagatatgctcctaaagctaaagatcttgcatctagagatgttgtgagtagatcaatagctgttgaaattaatgaagggagaggagttggaaaagaaaaagatcacgtccatcttcatttaaatcatttagatccagaagtaattgagaaaagacttccaggaatttcagaatcttcaagactgttcgccgacgttgatgttactaaagaaccaataccagttgttccaacagtgcattataatatgggtggtattccaacaaattacaaagctgaagttttaactgttaacggatcagaaaaaattgtacctggactaatggcaataggtgaagcagcatgtgtttcagttcatggtgctaatagac

SEQ ID NO: 200381 - DNA, 907 bp, Unknown
  Bacterial polypeptide expressing nucleotide sequence isolated from the Sargasso Sea
ttagatttaatttctgatgatcaaggtaattgtattggtgtggtaacatggtgcttagaagatggatcaatccatcgatttttatctcatcaaacaattctagctactggtggatatggaagagcttacttctcatctacgagtgctcacatatgtacaggtgacggtagtgcaatggctttaagacaaaacctacctctttctgatatggaatttattcagttccatccaactggagtctacggtgcaggagttttaatcactgagggcgcaagaggagaaggtggatatttaactaatagtgatggtgaaagatttatggaaagatatgctccaaatgcaaaagatctagcatcaagggatgtagtaagccgagctatgacaattgaaataagtgaaaatagaggatgtggagacaatgccgatcatgtgctccttcatcttgaacacattgatgccgatacattacataaaagattgcctggtatttcagaaactgcaaaaatatttgccggagttgatctgactaaagatccaataccagtccttccaacggttcattataatatgggtggtataccgacaaattatagaacagaagttttaagaccaacaaatgaaaatccagataatgtatgtgaaggtttaatggctgttggtgaggctgcatgtgtttctgtacacggtgcaaatagattaggaacaaattcattaattgatcttgttgtttttggcaaagcagctagtctaacatgtaaagaaaaagtaaaaccaaattctaaaaaaattgaaattagtaaatcaaaaacagataatattattgagagatttgataagattagaaacagcaaaggaaactcaacaactggagaacttcgcacttctatgcaacatataatgcagcaaa

SEQ ID NO: 200382 - DNA, 723 bp, Unknown
  Bacterial polypeptide expressing nucleotide sequence isolated from the Sargasso Sea
ctaccaactgtccattataatatgggtggtattcctacaaatcacagaactgaagtactttgtccaacagaagataaccctgataatgtatgtgaaggattattagcagtcggggaagcagcatgcgtatctgttcatggagctaacagattaggaacaaactccttaattgatcttattgtttttggtaaagcctcaagtcttacagctaaagaaaaagttaaacctaatagtaaggcaattgatattgactcaagttcactagatccaattttagatcgctttgataaaattagatttaataaaggagatagttccactggtgaagtgagaacatcgatgcaaaaagttatgcaagaaaaatgtgctgtgtttagaactgatgaactaatatctaaaggtatagaagaatttaatcatattgaaaactctatggataatataaatgtaaaagataagtccatgatttttaacacagacttaactgagtctcttgagctacacaatttaatggctcaatcaaaagttacacttcattctgctctaaatagaactgaaagtagaggggcacacgcaagagaagatcatcaagaaagagatgactcaaactggttggttcattctttgtcttggcttgatagcaaaggtgatgttaaaatgggaaaaagaccagttcatatgaatactctaactaaccatgttcagcctattcctccgaaaaaa

SEQ ID NO: 200383 - DNA, 973 bp, Unknown
  Bacterial polypeptide expressing nucleotide sequence isolated from the Sargasso Sea
ggctaccttactaattcagagggcgagcgttttatggagcgttacgctccaacgcaaaaagatttagcaagccgcgatgtggttagtcgttctatgacaattgaaattaacgagggtaggggtgttggtccaaagaaagaccatatcatgctgcacctagagcatattgacccagaaacacttcataaaaggctacctggcattacagaaactgctaaaatcttttgcggtgttgatgtaacaaaagagccgattccagtattgccgacagtgcattataatatgggtggtgtgccaacaaactatcatggagaggtgttatctcctaccgccaccgaccctaataataccgttcagggattaatggctattggcgaggctgcatgtgtttctgttcatggagccaacagacttggcactaactctttgcttgatattgtggtttttggcagagcagcagcgcaccgcgcaagtgaagtgctgacgcctggggcaacgcatgcgcctgtatccaaagaatcaacagatcgtgccatagaacggcttgatagaatgcgtcacgcaaaaggcgataggcagcctggtgagcttaggcttgatatgcaacaggcgatgcaaaaatatgcggctgtatttcgctcaggtgaatccctaaccgatggcgttaaaacaatggattctattgcaggtgatatgaataatataggcattcaggatagatctttggtctggaatactgatttaattgaagctatggaattacaaaatctgatgagtcaggctttggttactattcgctctgcagaacagcgcaaggaatcaaggggtgcccatgctcatgaagattttactaaaagagatgatgagaattggatgaaacatactgtaatgtggttagatgatgataataaatcatctgttgcttatcgtgacgtgacaatgacaacactcaccaatgaagtagaatcaattc

SEQ ID NO: 200384 - DNA, 887 bp, Unknown
  Bacterial polypeptide expressing nucleotide sequence isolated from the Sargasso Sea
ctcattacagagggagcaagaggtgaaggtggatatttaacaaatggtgacggtgaaagatttatggaacgttatgctcccaatgccaaagatttagcttcaagagatgtagtgagtagagcaatgacaatagagattagtgaaaatagggggtgtggagagaattctgaccatgtactacttcatttagaacatattgatgcagatactttacataaaagattgcctggaatttcagaaacagcaaaaatttttgctggagttgatttaacaaaagatccaataccggttttacctactgttcactataacatgggcggtattcctacaaattatagaactgaagtattaagacccaccaaacaaaaccctgacaatatatgcgaaggcctaatggctgttggtgaagcagcatgcgtatctgtgcatggagcaaatagacttggaactaattctctaattgatttggttgtttttggaaaagcggcaagcttaacatgtagagaaaaagtaaagcctaattctaaaaaaatcgaaataagcaaatcaaaaacagaaaatataattaatagatttgatcaaatcagaaatagcaaaggaaattcaactactggggaattaagaacttcaatgcaaaacgtaatgcaaaaaaaatgtgctgtatttagaacacatgatttaatttcaaaaggtattgaggaatacaatgaaattgagagatctatggatcaaattgatattaaagataaatctcttatctttaataccgatctagttgaagcattagaattacacaatctaatggctcaatcaaaagtgacattgtattctgctcttaatagaaaagaaagtagaggagcacatgctcgtgaagattataaagaaag

SEQ ID NO: 200385 - DNA, 815 bp, Unknown
  Bacterial polypeptide expressing nucleotide sequence isolated from the Sargasso Sea
ttagagaacatgggagtaatttttagccgagatgatgatggaaagcttgggacaagggcatttggtggtcaaaaaaaggcaaggacttactttgtaggagcaattaccggaagtgcgctacttcacgttttatatgaacaatcagttaaatataacctacatgtatacgaagaatggtttgtaactaaattaattaagcaggatggtaaaattgctggagctatagcattcgatattaaaactggtcaaatggaaatgattagtgcgaaagctgttgtgctcgcaacaggaggtgctggaagagtttttgaaccatcaacaaacgcattaatttgtactggagatggtctaagtttggctatgcaggctggagttccacttatggatactgagatgattcaatatcatccaacaactctagcaggcaatggaattttgttgtctgaagccgcaagaggtgatggtgcatatctaataaactctgaaggtgaaagatttatggaaaaatatgctcctgaatatatggaattagcttcaagggatgttgtttcaagagcagaacaaactgaaatagatgagggcagaggtgttgatggatgtgtttttttagatctaagacacttaggcaaaaaatttattgaagatagattgggctatttgcaagaagttgcacttgaatttaggggaatagatctgtctgaaaaacctattccaatcacacctggcatgcattacataatgggtggtataaaaacagatctaaacggagcaaccaatgtgccaggtttgtatgctgcaggagaatgtgcaaacgt

SEQ ID NO: 200386 - DNA, 686 bp, Unknown
  Bacterial polypeptide expressing nucleotide sequence isolated from the Sargasso Sea
acctacgaatattaatggacaagttatttcggtggagcacggtgaagataagatagttgatggtctatatgcagctggtgaagtagcctgcgtatcagttcatggaggaaatagattaggaggaaattctctcctagacttggttgtatttggtagggccgctggtctttacatagaagagagcatgaagcagggtatcgaagtaaaagatgcttctaacgatgatattgaaaaagctttagaaagactaaatagattaaatgcttcaacagaaggcgatcaagtatctgttcttaaagaaaaaatgcaacaaaatatgcagaataattttggagtatttagaagaggagatttgatggaaaaaggtatcgaagaactagccaagactagagaagaagtaaatgacattttccttcaagataagtcggcaacctttaatacagctagaatagaagctttagagatgcaaaacctttttgaggtagcagaagctactgcgataactgctaatgaaagaaaagaaagcagaggtgctcatgccagagatgacttcactgaacgtgatgatgaaaattggctaaaacattcaatttactacgctgatacaaaggaagttagtaaaagagatgtgaactatagacctaaaacagttcaagccttccaaccaatggttaggagttactaat

SEQ ID NO: 200387 - DNA, 856 bp, Unknown
  Bacterial polypeptide expressing nucleotide sequence isolated from the Sargasso Sea
catgtattgcttcatcttgagcacattgatgcaaatacgttgcataaaagattaccaggtatctcagaaactgcgaaaatatttgcaggagttgatctaactagagatccaataccagttcttccaacagttcattataacatgggaggtatacctacaaattatcgaacagaggttctaagacctacaagcgataatcctgataatatttgtgaaggtttaatggccgttggtgaagccgcatgtgtttcagtgcatggtgcaaatagattaggtactaactcattaatagatcttgttgtttttggaaaagcggctagtctaacatgtaaagaaaaggtaaaaccaaattctaaaaaaattgaaattaaccaatctaaaactgataatattattcaacgatttgataaaataagacatactaaaggagactctacaactggtgaactcagaacttcgatgcaacatataatgcagcaaaagtgtgcagtttttagaactcatgacctcatttcaaaaggtattgaggaatatactaaagtagaaagttctatggatgagatagatattaaagacaaatcattaatctttaatactgacttagttgaagcattagaattgcataatttaatggcacaatcaaaagttacacttcattcagcattaaatcgcacagaaagcagaggtgctcatgcaagagaggattataaagaaagagatgataataattggctagtgcattccctagcttggttgaatgaaaacggcgatgtaaagatgggttccaggggcgtccacatgaataccctcacaaatcatgtccaacctatacctcctaaaagaagagtatactaat

SEQ ID NO: 200388 - DNA, 622 bp, Unknown
  Bacterial polypeptide expressing nucleotide sequence isolated from the Sargasso Sea
catggccaaatttaaattgcccaaaaattcaaccctgaccaagggcatgacgcataaagctgatggtgcggcacaaaatgtgaagacctttgaagtttatcgctggtcacctgatgatgatgccaatccgcggattgatagtttcgaagtcgatcttgatcgctgtgggccgatggtgctggatgcgctgatcaagatcaaaagcgaacaagatagcagtctgacctttagacggtcttgtcgtgaaggcatttgcgggtcctgttcaatgaatattgatggcaccaacaccttggcttgcctcaaaagcattgatgatgtaaaaggcacagtcaaaatttatccattgccgcatatgcctgtggtaaaggatttggtaccagacctcagccagccataccgacaactcacctcaattgagccatggttaaaatctgaaaccgccccagcaaatggcgaagaacgtcgacaatcgccggccgaacgtgaaaagctcgatgggctgtgggaatgtgttttatgctttagctgctccacagcttgtccaagctattggtggaatagcgatgaatatcttggccgcggcggttttgttgcaggccctatcgttggattgccgata

SEQ ID NO: 200389 - DNA, 911 bp, Unknown
  Bacterial polypeptide expressing nucleotide sequence isolated from the Sargasso Sea
agctttaggaaatatgggcgaagatgattggagatggcatatgtacgatacagttaaaggatcagattggttaggtgatcaagatgctattgaacacttatgcaaagaagctcctaaagctgtaattgaattagaaaaatatggtgtaccatttagtagaactaaagagggaaaaatttaccagagagcatttggtggaatgacaaaaaattatggtaacgagtctgtccaaagaacttgtgcagcagcagatagaactggtcacgcaatacttcacactttatacggtcaagctttaaaacataatacagaattttttatagaatactttgctttagatcttttaatgaaagatggtcagtgcaaaggtttgattgcttggaatttaaatgatggaacaatacatagatttagatcacacataactattctagctacaggtggttacggaaaagtttattacacagctacttcagcccatacatgtactggagatgggaatggtatggcacttagagcaggattgccattacaggatatggaatttgttcaatttcatccaacaggaatttatggagtaggaactcttatttcagaaggtgttagaggagagggtggttaccttttaaactccaagggtgagagatttatggaaaaatatgcacccaaagctaaagatttagcttcaagagacgttgtaagtagatcgatagcagtagagatcaacgaaggaagaggtgttggtaaaaataaagactatgtcaatttacatttagaccatcttgatccaaaagtgatagaggaaagattgcctggaattgcagagtcagcaaaaacattttgtgaagttgatgtaagaaaagatccaataccagttgttcctactggtcattacaatatggggagggata

SEQ ID NO: 200390 - DNA, 716 bp, Unknown
  Bacterial polypeptide expressing nucleotide sequence isolated from the Sargasso Sea
tatgagtgaatataaaattatagatcatgaatatgacgtcgttgttttaggtgcaggtggctcaggtttaagagcagcagtcggtttaagtgaagcaggattaaaaactgcttgtatttcaaaagtctttcctacaagaagccatacttctgctgctcaaggaggaatatcagcagcattaggtaatatgggtgaggatgattggagatggcatatgtatgataccgttaaaggatcagactggttgggcgatcaggactgtattgaatatttatgcaaagaagccccaagagcagttttggaattagaaagatatggagttccatttagtcgaacaaaagatggaaaaatttaccaaagatcttttggtggaatgacaaaaaattatggtaatgaaactgttcaaagaacttgtgcagcggcagatagaacaggtcatgctatacttcacacaatgtatggccaagcattaaaacataatactgaattttttattgaatattttgcgttagatctattaatgaaaaatggagaatgtaaaggtttattagcttggaatttaaatgatggaacaattcatagatttagatctcatataactataatagcaactggtggatatggaaaaacttattattcatcaacttctgcccatacatgtactggagatggaaatgctatggctttaagagcaggattgccattacaagatatgg

SEQ ID NO: 200391 - DNA, 409 bp, Unknown
  Bacterial polypeptide expressing nucleotide sequence isolated from the Sargasso Sea
atggctgattttattttacccaaaaattcaaaaatcaaagaaggaaaaacatattcttttgaaggcaacaaagattcaacaaaaaaattaattatatacagatgggatcctgaagagaatgaaaatcctagattagacaaatatgaagttgatttaaaaaattgtggtccaatggttttagatgctcttataaaaatcaaaaatgaaattgatacaaccttaacttttagaagatcttgcagagaaggtgtatgcgggtcatgtgcaatgaatattgatggagtaaatacattggcttgtttgaaaccaattgaagaaattaaaaaagatattaaaatttacccccttccacatatgcgtgttgttaaagatttggttcctgatttaacagctgcatataaacaactag

SEQ ID NO: 200392 - DNA, 675 bp, Unknown
  Bacterial polypeptide expressing nucleotide sequence isolated from the Sargasso Sea
ctggaatgcactatataatgggccgaattaaaaccgacttaaacggagctacaaatgttcctggtctttatgctgctggtgaatgcgctaatgtaagtgttcatggcgctaatagattaggcgcaaactctcttcttgatacaattgtgtttggaagaaggtctgctattgagagcgttgaatatattaaatctgtgaaagatgttgaaattgatcctaaagaattatcaagagaaaaatctcgtattcaatcaattttagacagacctaaaggaatgagatctgctgaattaagagataaaatgggctcaacaatgactaagggcattggagtgtggagagatactgaaagtattaagtatgcaattgaaggcatgaaaagcattagaggacaactgccaaatgtgtatgttgaaaataaaggcaaagtttttaatactgaccttacttcatatttagaattagaatttatggttgatgttgctgaatcaatttgccaaggtgcaaatgctagatttgaaagcaggggtgctcattttagaactgatgttactaccagaaatgataaagactggttaaaacatacgattgttgaatataatggagaagaattaaatacatccagtgaagatgtgactataactgactgggaacctactgaaagagtatattaat

SEQ ID NO: 200393 - DNA, 730 bp, Unknown
  Bacterial polypeptide expressing nucleotide sequence isolated from the Sargasso Sea
catgacgacaactcgagtaatgaagttttctatttatcggtttgacccggagcacgattccaagccgtatttgcaagattttgatttggacgtgtctcgcattgaaggtaaaatgctgctatccgcattagaggcattgaaggagctggatccgacgctgacgttcaggcgttcatgccgtgaaggcgtatgtggttcagatggaatgaatattaatggtaaaaatggcctggcgtgtattacccagttagttgatttgccagagcgggttgttgttcaaccattgccgggctttccggttatccgtgatctcgtggtcgatatggatggtttttttgaacagtacagttcggtgaagccttttttgcggagcaagtctgaagcaccggagaaggagcgtttgcaaagccctgaagatcgcgccaaattagatgggatgtatgagtgtattttgtgtgcctgttgctcaggctcttgtccatcttactggtggaatccggataagtttctgggtccggcgacgttgctggcgatgaaccgttttgtgagtgatagccgtgatgattatacgttagagcgtttggacgagattaaagatccgtacagtgcgtttcgctgtcggacgatatccaattgctcgtatgtgtgtcctaaagggttaaatccgaccaaggctattgctaatctaaaacacaagatgttagataagcaggccggtgattccacctag
